(19) United States
(12) Patent Application Publication
(10) Pub. No.: US 2004/0265849 A1
(43) Pub. Date: Dec. 30, 2004

(54) Genetic polymorphisms associated with Alzheimer's disease, methods of detection and uses thereof

(75) Inventors: Michele Cargill, San Francisco, CA (US); Andrew Grupe, Orinda, CA (US); Yonghong Li, Palo Alto, CA (US)

Correspondence Address: McDermott Will & Emery, 600 13th Street, N.W., Washington, DC, 20005-3098, US

(73) Assignee: APPLERA CORPORATION, Norwalk, CT

(21) Appl. No.: 10/719,993

(22) Filed: Nov. 24, 2003

Related U.S. Application Data
(60) Provisional application No. 60/428,268, filed on Nov. 22, 2002.
(60) Provisional application No. 60/428,266, filed on Nov. 22, 2002.
(60) Provisional application No. 60/428,267, filed on Nov. 22, 2002.
(60) Provisional application No. 60/434,731, filed on Dec. 20, 2002.
(60) Provisional application No. 60/441,839, filed on Jan. 23, 2003.
(60) Provisional application No. 60/452,680, filed on Mar. 7, 2003.
(60) Provisional application No. 60/461,762, filed on Apr. 11, 2003.
(60) Provisional application No. 60/463,108, filed on Apr. 16, 2003.
(60) Provisional application No. 60/470,166, filed on May 14, 2003.
(60) Provisional application No. 60/464,954, filed on Apr. 24, 2003.

(51) Int. Cl. C12Q 1/68; G01N 33/53; G01N 33/567; C07H 21/04; C12N 9/64

(52) U.S. Cl. 435/6; 435/7.2; 435/226; 530/388.26; 536/23.2

(57) ABSTRACT

The present invention is based on the discovery of genetic polymorphisms that are associated with Alzheimer's disease. In particular, the present invention relates to nucleic acid molecules containing the polymorphisms, variant proteins encoded by such nucleic acid molecules, reagents for detecting the polymorphic nucleic acid molecules and proteins, and methods of using the nucleic acid and proteins as well as methods of using reagents for their detection.

### FIELD OF THE INVENTION

[0001] The present invention is in the field of Alzheimer's disease diagnosis and therapy. In particular, the present invention relates to specific single nucleotide polymorphisms (SNPs) in the human genome, and their association with Alzheimer's disease and related pathologies. Based on differences in allele frequencies in the Alzheimer's disease patient population relative to normal individuals, the naturally-occurring SNPs disclosed herein can be used as targets for the design of diagnostic reagents and the development of therapeutic agents, as well as for disease association and linkage analysis. In particular, the SNPs of the present invention are useful for identifying an individual who is at an increased or decreased risk of developing Alzheimer's disease and for early detection of the disease, for providing clinically important information for the prevention and/or treatment of Alzheimer's disease, and for screening and selecting therapeutic agents. The SNPs disclosed herein are also useful for human identification applications. Methods, assays, kits, and reagents for detecting the presence of these polymorphisms and their encoded products are provided.

### BACKGROUND OF THE INVENTION

[0002] Neurodegenerative Diseases

[0003] A varied assortment of central nervous system disorders (neurodegenerative diseases) are associated with aging. Neurodegenerative diseases are characterized by a gradual and progressive loss of neural tissue or nerve cells. These diseases, directly or indirectly, affect millions of people worldwide. The number of individuals affected by neurodegenerative diseases is anticipated to grow attendant with the increase in human life expectancy.

[0004] Specific diseases exemplifying this class of disorders include age-related dementia, such as Alzheimer's disease, leukodystrophies, such as adrenoleukodystrophy, metachromatic, leukodystrophy, Krabbe Disease (globoid cell leukodystrophy), Canavan Disease, Alexander Disease, Pelizaeus-Merzbacher Disease, and the like, neuronal ceroid lipofuscinoses, stroke, and the like.

[0005] Parkison's disease affects 1 to 2 percent of people over the age of 50 and 10 to 15% of those over 80. Huntington's disease and ALS each afflict approximately 30,000 in the United States. Stroke is the leading cause of neurological impairment with half a million new stroke victims surviving each year with some degree of permanent neurological damage.

[0006] Alzheimer's disease (described in greater detail in the following section) alone affects 20 million people worldwide. Alzheimer's disease is the fourth leading cause of death in industrialized societies, afflicting 5-11% of the population over the age of 65 and 30% of those over the age of 85. Alzheimer's disease is fast becoming the paramount healthcare problem as the world's geriatric population continues to grow.

[0007] Alzheimer's Disease

[0008] Alzheimer's disease is the most significant and common cause of dementia in developed countries, accounting for 60% or more of all cases of dementia. Alzheimer's disease is a progressive neurodegenerative disorder characterized clinically by memory loss of subtle onset, followed by a slowly progressive dementia that has a course of several years. Brain pathology of Alzheimer's disease is characterized by gross, diffuse atrophy of the cerebral cortex with secondary enlargement of the ventricular system. Microscopically, there are neuritic plaques containing Aβ amyloid, silver-staining neurofibrillary tangles in neuronal cytoplasm, and accumulation of Aβ amyloid in arterial walls of cerebral blood vessels. A definite diagnosis of Alzheimer's disease can only occur at autopsy, where the presence of amyloid plaques and neurofibrillary tangles is confirmed.

[0009] The frequency of Alzheimer's disease increases with each decade of adult life, reaching 20 to 40 percent of the population over the age of 85. Because more and more people will live into their 80's and 90's, the number of patients is expected to triple over the next 20 years. More than 4 million people suffer from Alzheimer's disease in the USA, where 800,000 deaths per year are associated with Alzheimer's disease. It is estimated that the cost of Alzheimer's disease in the USA is $80 billion to $100 billion a year in medical care, personal caretaking and lost productivity. Alzheimer's disease also puts a heavy emotional toll on family members and caregivers: about 2.7 million people care for Alzheimer's disease patients in the USA. Alzheimer's disease patients live for 7 to 10 years after diagnosis and spend an average of 5 years under care either at home or in a nursing home.

[0010] In spite of the high prevalence of Alzheimer's disease today and its expected prevalence increase in an aging population, there are currently no diagnostic tests available that determine the cause of dementia and adequately differentiate between Alzheimer's disease and other types of dementias. A diagnostic test that enables physicians to identify Alzheimer's disease early in the disease process, or identify individuals who are at high risk of developing the disease, will provide the option to intervene at an early stage in the disease process. Early intervention in disease processes does generally result in better treatment results by delaying disease onset or progression compared to later intervention.

[0011] Alzheimer's disease is presumed to have a genetic component, as evidenced by an increased risk for Alzheimer's disease among first degree relatives of affected individuals. So far, three genes have been identified in patients with early onset Alzheimer's disease that lead to the less common, dominantly inherited form of dementia. Mutations in the three genes, beta-amyloid precursor protein (Goate et al. Nature 1991, 349:704-706), presenilin 1 (Sherrington et al. Nature 1995, 375:754-760), and presenilin 2 (Levy-Lahad et al. Science 1996, 269:973-977), lead to an increase in the production of long amyloid beta (Aβ42), the main component in amyloid plaques. Although early onset Alzheimer's disease makes up less than 5% of all Alzheimer's disease cases, the identification of these genes has contributed substantially to the understanding of the disease process.

[0012] Late onset Alzheimer's Disease (LOAD), the much more common form of this dementia, is inherited in a non-Mendelian pattern and involves genetic susceptibility factors and environmental factors. Early genetic studies of Alzheimer's disease demonstrated association and linkage to the same region on chromosome 19 containing the ApoE gene (Schellenberg et al. J. Neurogenet. 1987, 4:97-108, Pericak-Vance et al. Am. J. Hum. Gen. 1991, 48:1034-1050). Three common alleles were identified for the ApoE gene, ε2, ε3, ε4. The ε4 allele frequency is increased to 50% in affected individuals vs. 14% in controls (Corder et al. Science 1993, 281:921-923). Although there is strong association with the ApoE-c4 allele, which has been replicated in many studies, most investigators consider the ApoE-F4 allele to be neither necessary nor sufficient for the development of Alzheimer's disease. ApoE is considered a major risk factor, but ApoE testing does not provide enough sensitivity and specificity for use as an independent diagnostic test and therefore is not recommended as a diagnostic marker for the prediction of Alzheimer's disease (National Institute on Aging/Alzheimer's Association Working Group, 1996).

[0013] Genome-wide linkage screens in LOAD patients, duplicated in at least 2 studies, identified regions on four chromosomes, chromosomes 6, 9, 10, and 12 (reviewed by: Myers and Goate Curr. Op. Neurol. 2001, 14:433-440, Lendon and Craddock TINS 2001, 24:557-559), implying that other genetic risk factors besides ApoE must exist. Co-localization of a quantitative trait for Aβ42 and a susceptibility locus for LOAD on chromosome 10, suggests that the locus influences LOAD risk through increased levels of the Aβ42 peptide (Ertekin-Taner Science 2000, 290:2303-2304).

[0014] The majority of the putative LOAD susceptibility loci were identified through linkage studies of affected sib pairs (ASPs) by looking for regions with increased allele sharing. In order to identify the genes and mutations for LOAD, it would be beneficial to conduct association studies, which have relatively better power than linkage studies to detect genes of modest or small effect. Association studies compare unrelated cases to controls and analyze allele frequency differences between affected and unaffected individuals.

[0015] Thus, there is a definite need for novel diagnostic markers that enable the detection of Alzheimer's disease at an early stage of the disease. The availability of a genetic test will also provide a non-invasive method to assess an individual's risk for developing Alzheimer's disease. Furthermore, there is also an urgent need for new and improved treatments for Alzheimer's disease to prevent or significantly delay the onset of the disease, or to reverse or slow down disease progression after onset.

[0016] GAPDH and Treatment of Neurodegenerative Diseases

[0017] Available treatments for neurodegenerative diseases do not provide an effective and long-term treatment. Various treatments that are used with little or no success include monaamine oxidase inhibitors, anti-apoptotics, anti-inflammatory drugs, anti-oxidants, anti-amyloid and neurotropic factors either alone or in combination. The best present therapy is to provide comfort and emotional support for the victim and the victim's closest relatives.

[0018] While the molecular basis for some neurodegenerative disease are known, the underlying mechanisms of action for most have not been made clear. However, neuronal death underlies the symptoms of many, if not all, human neurological disorders and there is evidence that a common component of the neuronal death is apoptosis.

[0019] The monoamine oxidase inhibitor R-(-)-deprenyl or Selegiline was developed for use in treating Parkinson's disease. Selegiline, it is believed, acts to protect neurons or glias from programmed cell death by inhibition of apoptosis. Paradoxically, CGP 3466, a structural analog of R-(-)-deprenyl, exhibits little monoamine oxidase inhibiting activity, but is a potent neuroprotective agent. The putative molecular target responsible for mediating the antiapoptotic, neuroprotective effects of Deprenyl and CGP 3466 now is identified as glyceraldehyde-3-phosphate dehydrogenase (GAPDH).

[0020] Previously, the sole function of GAPDH was thought to be as a housekeeping enzyme in the glycolytic pathway. However, in keeping with its proposed role in neuronal apoptosis, GAPDH mRNA and GAPDH protein is found to be up-regulated in the particulate fraction of cell extracts during age-induced apoptosis of mature cerebellar and cerebrocortical neurons and ara-C-induced apoptosis of cultured cerebellar neurons. GAPDH mRNA overexpression is reversed by antisense GAPDH oligonucleotides in each of these cellular assays and apoptosis is delayed concomitantly. The up-regulation of GAPDH mRNA and the increase in GAPDH protein content in the apoptotic cell appears to be a general phenomenon in neuronal cells undergoing apoptosis.

[0021] Two CAG-associated neurodegenerative diseases, HD and DRPLA, are known to involve GADPH binding to the polyglutamine domains in the huntingtin protein and DRPLA protein, respectively. GAPDH specifically binds to the carboxy terminal of the β-amyloid precursor protein, which itself, as well as the carboxy terminal fragments thereof, are involved in neuronal loss in Alzheimer's disease. In this regard, a monoclonal antibody raised against amyloid plaques from an Alzheimer's patient's brain was found to cross react with GAPDH. Given that GAPDH has various functions including roles in glycolysis and apoptosis, it is an excellent candidate protein for involvement in the neurodegenerative process. Accordingly, inhibition of GAPDH is an attractive means for treating the effects of neurodegenerative disease.

[0022] SNPs

[0023] The genomes of all organisms undergo spontaneous mutation in the course of their continuing evolution, generating variant forms of progenitor genetic sequences (Gusella, Ann. Rev. Biochem. 55, 831-854 (1986)). A variant form may confer an evolutionary advantage or disadvantage relative to a progenitor form or may be neutral. In some instances, a variant form confers an evolutionary advantage to the species and is eventually incorporated into the DNA of many or most members of the species and effectively becomes the progenitor form. Additionally, the effects of a variant form may be both beneficial and detrimental, depending on the circumstances. For example, a heterozygous sickle cell mutation confers resistance to malaria, but a homozygous sickle cell mutation is usually lethal. In many cases, both progenitor and variant forms survive and co-exist in a species population. The coexistence of multiple forms of a genetic sequence gives rise to genetic polymorphisms, including SNPs.

[0024] Approximately 90% of all polymorphisms in the human genome are SNPs. SNPs are single base positions in DNA at which different alleles, or alternative nucleotides, exist in a population. The SNP position (interchangeably referred to herein as SNP, SNP site, or SNP locus) is usually preceded by and followed by highly conserved sequences of the allele (e.g., sequences that vary in less than 1/100 or 1/1000 members of the populations). An individual may be homozygous or heterozygous for an allele at each SNP position. A SNP can, in some instances, be referred to as a “cSNP” to denote that the nucleotide sequence containing the SNP is an amino acid coding sequence.

[0025] A SNP may arise from a substitution of one nucleotide for another at the polymorphic site. Substitutions can be transitions or transversions. A transition is the replacement of one purine nucleotide by another purine nucleotide, or one pyrimidine by another pyrimidine. A transversion is the replacement of a purine by a pyrimidine, or vice versa. A SNP may also be a single base insertion or deletion variant referred to as an “indel” (Weber et al., “Human diallelic insertion/deletion polymorphisms”, Am J Hum Genet October 2002;71(4):854-62).

[0026] A synonymous codon change, or silent mutation/SNP (the terms “SNP” and “mutation” are used herein interchangeably), is one that does not result in a change of amino acid due to the degeneracy of the genetic code. A substitution that changes a codon coding for one amino acid to a codon coding for a different amino acid (i.e., a non-synonymous codon change) is referred to as a missense mutation. A nonsense mutation results in a type of non-synonymous codon change in which a stop codon is formed, thereby leading to premature termination of a polypeptide chain and a truncated protein. A read-through mutation is another type of non-synonymous codon change that causes the destruction of a stop codon, thereby resulting in an extended polypeptide product. While SNPs can be bi-, tri-, or tetra-allelic, the vast majority of the SNPs are bi-allelic, and are thus often referred to as “bi-allelic markers”, or “di-allelic markers”.

[0027] As used herein, references to SNPs and SNP genotypes include individual SNPs and/or haplotypes, which are groups of SNPs that are generally inherited together. Haplotypes can have stronger correlations with diseases or other phenotypic effects compared with individual SNPs, and therefore may provide increased diagnostic accuracy in some cases (Stephens et al. Science 293, 489-493, 20 Jul. 2001).

[0028] Causative SNPs are those SNPs that produce alterations in gene expression or in the expression, structure, and/or function of a gene product, and therefore are most predictive of a possible clinical phenotype. One such class includes SNPs falling within regions of genes encoding a polypeptide product, i.e. cSNPs. These SNPs may result in an alteration of the amino acid sequence of the polypeptide product (i.e., non-synonymous codon changes) and give rise to the expression of a defective or other variant protein. Furthermore, in the case of nonsense mutations, a SNP may lead to premature termination of a polypeptide product. Such variant products can result in a pathological condition, e.g., genetic disease. Examples of genes in which a SNP within a coding sequence causes a genetic disease include sickle cell anemia and cystic fibrosis.

[0029] Causative SNPs do not necessarily have to occur in coding regions; causative SNPs can occur in, for example, any genetic region that can ultimately affect the expression, structure, and/or activity of the protein encoded by a nucleic acid. Such genetic regions include, for example, those involved in transcription, such as SNPs in transcription factor binding domains, SNPs in promoter regions, in areas involved in transcript processing, such as SNPs at intron-exon boundaries that may cause defective splicing, or SNPs in mRNA processing signal sequences such as polyadenylation signal regions. Some SNPs that are not causative SNPs nevertheless are in close association with, and therefore segregate with, a disease-causing sequence. In this situation, the presence of a SNP correlates with the presence of, or predisposition to, or an increased risk in developing the disease. These SNPs, although not causative, are nonetheless also useful for diagnostics, disease predisposition screening, and other uses.

[0030] An association study of a SNP and a specific disorder involves determining the presence or frequency of the SNP allele in biological samples from individuals with the disorder of interest, such as Alzheimer's disease, and comparing the information to that of controls (i.e., individuals who do not have the disorder; controls may be also referred to as “healthy” or “normal” individuals) who are preferably of similar age and race. The appropriate selection of patients and controls is important to the success of SNP association studies. Therefore, a pool of individuals with well-characterized phenotypes is extremely desirable.

[0031] A SNP may be screened in diseased tissue samples or any biological sample obtained from a diseased individual, and compared to control samples, and selected for its increased (or decreased) occurrence in a specific pathological condition, such as pathologies related to Alzheimer's disease. Once a statistically significant association is established between one or more SNP(s) and a pathological condition (or other phenotype) of interest, then the region around the SNP can optionally be thoroughly screened to identify the causative genetic locus/sequence(s) (e.g., causative SNP/mutation, gene, regulatory region, etc.) that influences the pathological condition or phenotype. Association studies may be conducted within the general population and are not limited to studies performed on related individuals in affected families (linkage studies).

[0032] Clinical trials have shown that patient response to treatment with pharmaceuticals is often heterogeneous. There is a continuing need to improve pharmaceutical agent design and therapy. In that regard, SNPs can be used to identify patients most suited to therapy with particular pharmaceutical agents (this is often termed “pharmacogenomics”). Similarly, SNPs can be used to exclude patients from certain treatment due to the patient's increased likelihood of developing toxic side effects or their likelihood of not responding to the treatment. Pharmacogenomics can also be used in pharmaceutical research to assist the drug development and selection process. (Linder et al. (1997), Clinical Chemistry, 43, 254; Marshall (1997), Nature Biotechnology, 15, 1249; International Patent Application WO 97/40462, Spectra Biomedical; and Schafer et al. (1998), Nature Biotechnology, 16, 3).

### SUMMARY OF THE INVENTION

[0033] The present invention relates to the identification of novel SNPs, unique combinations of such SNPs, and haplotypes of SNPs that are associated with Alzheimer's disease and related pathologies. The polymorphisms disclosed herein are directly useful as targets for the design of diagnostic reagents and the development of therapeutic agents for use in the diagnosis and treatment of Alzheimer's disease and related pathologies.

[0034] Based on the identification of SNPs associated with Alzheimer's disease, the present invention also provides methods of detecting these variants as well as the design and preparation of detection reagents needed to accomplish this task. The invention specifically provides novel SNPs in genetic sequences involved in Alzheimer's disease, variant proteins encoded by nucleic acid molecules containing such SNPs, antibodies to the encoded variant proteins, computer-based and data storage systems containing the novel SNP information, methods of detecting these SNPs in a test sample, methods of identifying individuals who have an altered (i.e., increased or decreased) risk of developing Alzheimer's disease based on the presence of a SNP disclosed herein or its encoded product, methods of identifying individuals who are more or less likely to respond to a treatment, methods of screening for compounds useful in the treatment of a disorder associated with a variant gene/protein, compounds identified by these methods, methods of treating disorders mediated by a variant gene/protein, and methods of using the novel SNPs of the present invention for human identification.

[0035] In Tables 1-2, the present invention provides gene information, transcript sequences (SEQ ID NOS:1-433), encoded amino acid sequences (SEQ ID NOS:434-866), genomic sequences (SEQ ID NOS:6752-7071), transcript-based context sequences (SEQ ID NOS:867-6751) and genomic-based context sequences (SEQ ID NOS:7072-54,769) that contain the SNPs of the present invention, and extensive SNP information that includes observed alleles, allele frequencies, populations/ethnic groups in which alleles have been observed, information about the type of SNP and corresponding functional effect, and, for cSNPs, information about the encoded polypeptide product. The transcript sequences (SEQ ID NOS:1-433), amino acid sequences (SEQ ID NOS:434-866), genomic sequences (SEQ ID NOS:6752-7071), transcript-based SNP context sequences (SEQ ID NOS: 867-6751), and genomic-based SNP context sequences (SEQ ID NOS:7072-54,769) are also provided in the Sequence Listing.

[0036] In a specific embodiment of the present invention, naturally-occurring SNPs in the human genome are provided. These SNPs are associated with Alzheimer's disease such that they can have a variety of uses in the diagnosis and/or treatment of Alzheimer's disease. One aspect of the present invention relates to an isolated nucleic acid molecule comprising a nucleotide sequence in which at least one nucleotide is a SNP disclosed in Tables 3 and/or 4. In an alternative embodiment, a nucleic acid of the invention is an amplified polynucleotide, which is produced by amplification of a SNP-containing nucleic acid template. In another embodiment, the invention provides for a variant protein which is encoded by a nucleic acid molecule containing a SNP disclosed herein.

[0037] In yet another embodiment of the invention, a reagent for detecting a SNP in the context of its naturally-occurring flanking nucleotide sequences (which can be, e.g., either DNA or mRNA) is provided. In particular, such a reagent may be in the form of, for example, a hybridization probe or an amplification primer that is useful in the specific detection of a SNP of interest. In an alternative embodiment, a protein detection reagent is used to detect a variant protein which is encoded by a nucleic acid molecule containing a SNP disclosed herein. A preferred embodiment of a protein detection reagent is an antibody or an antigen-reactive antibody fragment.

[0038] Also provided in the invention are kits comprising SNP detection reagents, and methods for detecting the SNPs disclosed herein by employing detection reagents. In a specific embodiment, the present invention provides for a method of identifying an individual having an increased or decreased risk of developing Alzheimer's disease by detecting the presence or absence of a SNP allele disclosed herein. In another embodiment, a method for diagnosis of Alzheimer's disease by detecting the presence or absence of a SNP allele disclosed herein is provided.

[0039] The nucleic acid molecules of the invention can be inserted in an expression vector, such as to produce a variant protein in a host cell. Thus, the present invention also provides for a vector comprising a SNP-containing nucleic acid molecule, genetically-engineered host cells containing the vector, and methods for expressing a recombinant variant protein using such host cells. In another specific embodiment, the host cells, SNP-containing nucleic acid molecules, and/or variant proteins can be used as targets in a method for screening and identifying therapeutic agents or pharmaceutical compounds useful in the treatment of Alzheimer's disease.

[0040] An aspect of this invention is a method for treating neurodegenerative disease in a human subject wherein said human subject harbors a mutant glyceraldehyde-3-phosphate dehydrogenase (GAPDH) gene (hCG2005673, for example, identifies a GAPDH gene that is disclosed in Tables 1-2 along with associated transcript, protein, and genomic sequences and SNP information), which method comprises administering to said human subject a therapeutically or prophylactically effective amount of one or more agents counteracting the neurodegenerative effects of the disease.

[0041] Another aspect of this invention is a method for treating neurodegenerative disease in a human subject wherein said human subject harbors a mutant glyceraldehyde-3-phosphate dehydrogenase (GAPDH) gene, which method comprises administering to said patient a therapeutically or prophylactically effective amount of one or more neuroprotective agents.

[0042] Another aspect of this invention is a method for treating neurodegenerative disease in a human subject wherein said human subject harbors a mutant glyceraldehyde-3-phosphate dehydrogenase (GAPDH) gene, which method comprises administering to said patient a therapeutically or prophylactically effective amount of one or more anti-apoptotic agents.

[0043] Another aspect of this invention is a method for treating neurodegenerative disease in a human subject wherein said human subject harbors a mutant glyceraldehyde-3-phosphate dehydrogenase (GAPDH) gene, which method comprises administering to said patient a therapeutically or prophylactically effective amount of one or more agents which inhibit the activity of GAPDH.

[0044] Another aspect of this invention is a method for treating neurodegenerative disease in a human subject wherein said human subject harbors a mutant glyceraldehyde-3-phosphate dehydrogenase (GAPDH) gene, which method comprises administering to said patient a therapeutically or prophylactically effective amount of one or more agents which bind to and thereby inhibit the activity of GAPDH, in particular wherein the disease is selected from adrenoleukodystrophy, Alexander Disease, Alzheimer's disease, amyotrophic lateral sclerosis, Canavan Disease, cerebellar degeneration, cerebral ischemias, glaucoma, Krabbe Disease, metachromatic leukodystrophy, multiple sclerosis, neuronal ceroid lipofuscinoses, Parkinson's disease, Pelizaeus-Merzbacher Disease, retinitis pigmentosa, stroke, neurodegenerative disease caused by traumatic injury.

[0045] Another aspect of this invention is a method for treating neurodegenerative disease in a human subject wherein said human subject harbors a mutant GAPDH gene comprising a polynucleotide sequence selected from the group consisting of the genomic sequence of SEQ ID NO:6795, the transcript sequences of SEQ ID NOS:125-127, and nucleic acid sequences that encode a polypeptide comprising an amino acid sequence of SEQ ID NOS:558-560.

[0046] Another aspect of this invention is a method for identifying an agent useful in therapeutically or prophylactically treating neurodegenerative disease in a human subject wherein said human subject harbors a mutant glyceraldehyde-3-phosphate dehydrogenase (GAPDH) gene, which method comprises contacting GAPDH with a candidate agent under conditions suitable to allow formation of a binding complex between the GAPDH and the candidate agent and detecting the formation of the binding complex, wherein the presence of the complex identifies said agent.

[0047] Another aspect of this invention is a method for treating neurodegenerative disease in a human subject, which method comprises:

[0048] (i) determining that said human subject harbors a mutant glyceraldehyde-3-phospate dehydrogenase (GAPDH) gene, and

[0049] (ii) administering to said subject a therapeutically or prophylactically effective amount of one or more agents counteracting the neurodegenerative effects of the disease.

[0050] Many other uses and advantages of the present invention will be apparent to those skilled in the art upon review of the detailed description of the preferred embodiments herein. Solely for clarity of discussion, the invention is described in the sections below by way of non-limiting examples.

[0051] Description of the Files Contained on the CD-R Named CL001496CDR

[0052] The CD-R named CL001496CDR contains the following five text (ASCII) files:

[0053] 1) File SEQLIST_{—}1496.txt provides the Sequence Listing. The Sequence Listing provides the transcript sequences (SEQ ID NOS:1-433) and protein sequences (SEQ ID NOS:434-866) as shown in Table 1, and genomic sequences (SEQ ID NOS:6752-707 1) as shown in Table 2, for each Alzheimer's disease-associated gene that contains one or more SNPs of the present invention. Also provided in the Sequence Listing are context sequences flanking each SNP, including both transcript-based context sequences as shown in Table 1 (SEQ ID NOS:867-675 1) and genomic-based context sequences as shown in Table 2 (SEQ ID NOS:7072-54,769). The context sequences generally provide 100 bp upstream (5′) and 100 bp downstream (3′) of each SNP, with the SNP in the middle of the context sequence, for a total of 200 bp of context sequence surrounding each SNP. File SEQLIST_{—}1496.txt is 54,809 KB in size.

[0054] 2) File TABLE1_{—}1496.txt provides Table 1. File TABLE1_{—}1496.txt is 5,513 KB in size.

[0055] 3) File TABLE2_{—}1496.txt provides Table 2. File TABLE2_{—}1496.txt is 48,391 KB in size.

[0056] 4) File TABLE3_{—}1496.txt provides Table 3. File TABLE3_{—}1496.txt is 57 KB in size.

[0057] 5) File TABLE4_{—}1496.txt provides Table 4. File TABLE4_{—}1496.txt is 106 KB in size.

[0058] The material contained on the CD-R labeled CL001496CDR is hereby incorporated by reference pursuant to 37 CFR 1.77(b)(4).

[0059] Description of Table 1 and Table 2

[0060] Table 1 and Table 2 (both provided on the CD-R) disclose the SNP and associated gene/transcript/protein information of the present invention. For each gene, Table 1 and Table 2 each provide a header containing gene/transcript/protein information, followed by a transcript and protein sequence (in Table 1) or genomic sequence (in Table 2), and then SNP information regarding each SNP found in that gene/transcript.

[0061] NOTE: SNPs may be included in both Table 1 and Table 2; Table 1 presents the SNPs relative to their transcript sequences and encoded protein sequences, whereas Table 2 presents the SNPs relative to their genomic sequences (in some instances Table 2 may also include, after the last gene sequence, genomic sequences of one or more intergenic regions, as well as SNP context sequences and other SNP information for any SNPs that lie within these intergenic regions). SNPs can readily be cross-referenced between Tables based on their hCV (or, in some instances, hDV) identification numbers.

[0062] The gene/transcript/protein information includes:

[0063] a gene number (1 through n, where n=the total number of genes in the Table)

[0064] a Celera hCG and UID internal identification numbers for the gene

[0065] a Celera hCT and UID internal identification numbers for the transcript (Table 1 only)

[0066] a public Genbank accession number (e.g., RefSeq NM number) for the transcript (Table 1 only)

[0067] a Celera hCP and UID internal identification numbers for the protein encoded by the hCT transcript (Table 1 only)

[0068] a public Genbank accession number (e.g., RefSeq NP number) for the protein (Table 1 only)

[0069] an art-known gene symbol

[0070] an art-known gene/protein name

[0071] Celera genomic axis position (indicating start nucleotide position-stop nucleotide position)

[0072] the chromosome number of the chromosome on which the gene is located

[0073] an OMIM (Online Mendelian Inheritance in Man; Johns Hopkins University/NCBI) public reference number for obtaining further information regarding the medical significance of each gene

[0074] alternative gene/protein name(s) and/or symbol(s) in the OMIM entry

[0075] NOTE: Due to the presence of alternative splice forms, multiple transcript/protein entries can be provided for a single gene entry in Table 1; i.e., for a single Gene Number, multiple entries may be provided in series that differ in their transcript/protein information and sequences.

[0076] Following the gene/transcript/protein information is a transcript sequence and protein sequence (in Table 1), or a genomic sequence (in Table 2), for each gene, as follows:

[0077] transcript sequence (Table 1 only) (corresponding to SEQ ID NOS:1-433 of the Sequence Listing), with SNPs identified by their IUB codes (transcript sequences can include 5′ UTR, protein coding, and 3′ UTR regions). (NOTE: If there are differences between the nucleotide sequence of the hCT transcript and the corresponding public transcript sequence identified by the Genbank accession number, the hCT transcript sequence (and encoded protein) is provided, unless the public sequence is a RefSeq transcript sequence identified by an NM number, in which case the RefSeq NM transcript sequence (and encoded protein) is provided. However, whether the hCT transcript or RefSeq NM transcript is used as the transcript sequence, the disclosed SNPs are represented by their IUB codes within the transcript.)

[0078] the encoded protein sequence (Table 1 only) (corresponding to SEQ ID NOS:434-866 of the Sequence Listing)

[0079] the genomic sequence of the gene (Table 2 only), including 6 kb on each side of the gene boundaries (i.e., 6 kb on the 5′ side of the gene plus 6 kb on the 3′ side of the gene) (corresponding to SEQ ID NOS:6752-7071 of the Sequence Listing).

[0080] After the last gene sequence, Table 2 may include additional genomic sequences of intergenic regions (in such instances, these sequences are identified as “Intergenic region:” followed by a numerical identification number), as well as SNP context sequences and other SNP information for any SNPs that lie within each intergenic region (and such SNPs are identified as “INTERGENIC” for SNP type).

[0081] NOTE: The transcript, protein, and transcript-based SNP context sequences are provided in both Table 1 and in the Sequence Listing. The genomic and genomic-based SNP context sequences are provided in both Table 2 and in the Sequence Listing. SEQ ID NOS are indicated in Table 1 for each transcript sequence (SEQ ID NOS:1-433), protein sequence (SEQ ID NOS:434-866), and transcript-based SNP context sequence (SEQ ID NOS:867-6751), and SEQ ID NOS are indicated in Table 2 for each genomic sequence (SEQ ID NOS:6752-7071), and genomic-based SNP context sequence (SEQ ID NOS:7072-54,769).

[0082] The SNP information includes:

[0083] context sequence (taken from the transcript sequence in Table 1, and taken from the genomic sequence in Table 2) with the SNP represented by its IUB code, including 100 bp upstream (5′) of the SNP position plus 100 bp downstream (3′) of the SNP position (the transcript-based SNP context sequences in Table 1 are provided in the Sequence Listing as SEQ ID NOS:867-6751; the genomic-based SNP context sequences in Table 2 are provided in the Sequence Listing as SEQ ID NOS:7072-54,769).

[0084] Celera hCV internal identification number for the SNP (in some instances, an “hDV” number is given instead of an “hCV” number)

[0085] SNP position [position of the SNP within the given transcript sequence (Table 1) or within the given genomic sequence (Table 2)]

[0086] SNP source (may include any combination of one or more of the following five codes, depending on which internal sequencing projects and/or public databases the SNP has been observed in: “Applera”=SNP observed during the re-sequencing of genes and regulatory regions of 39 individuals, “Celera”=SNP observed during shotgun sequencing and assembly of the Celera human genome sequence, “Celera Diagnostics”=SNP observed during re-sequencing of nucleic acid samples from individuals who have Alzheimer's disease, “dbSNP”=SNP observed in the dbSNP public database, “HGBASE”=SNP observed in the HGBASE public database, “HGMD”=SNP observed in the Human Gene Mutation Database (HGMD) public database) (NOTE: multiple “Applera” source entries for a single SNP indicate that the same SNP was covered by multiple overlapping amplification products and the re-sequencing results (e.g., observed allele counts) from each of these amplification products is being provided)

[0087] Population/allele/allele count information in the format of [population 1(allele 1 ,count|allele2,count) population2(allele 1 ,count|allele2,count) total (allele 1,total count|allele2,total count)]. The information in this field includes populations/ethnic groups in which particular SNP alleles have been observed (“cau”=Caucasian, “his”=Hispanic, “chn”=Chinese, and “afr”=African-American, “jpn”=Japanese, “ind”=Indian, “mex”=Mexican, “ain”=“American Indian, “cra”=Celera donor, “no_pop”=no population information available), identified SNP alleles, and observed allele counts (within each population group and total allele counts), where available [“−” in the allele field represents a deletion allele of an insertion/deletion (“indel”) polymorphism (in which case the corresponding insertion allele, which may be comprised of one or more nucleotides, is indicated in the allele field on the opposite side of the “|”); “−”in the count field indicates that allele count information is not available].

[0088] NOTE: For SNPs of “Applera” SNP source, genes/regulatory regions of 39 individuals (20 Caucasians and 19 African Americans) were re-sequenced and, since each SNP position is represented by two chromosomes in each individual (with the exception of SNPs on X and Y chromosomes in males, for which each SNP position is represented by a single chromosome), up to 78 chromosomes were genotyped for each SNP position. Thus, the sum of the African-American (“afr”) allele counts is up to 38, the sum of the Caucasian allele counts (“cau”) is up to 40, and the total sum of all allele counts is up to 78.

[0089] (NOTE: semicolons separate population/allele/count information corresponding to each indicated SNP source; i.e., if four SNP sources are indicated, such as “Celera”, “dbSNP”, “HGBASE”, and “HGMD”, then population/allele/count information is provided in four groups which are separated by semicolons and listed in the same order as the listing of SNP sources, with each population/allele/count information group corresponding to the respective SNP source based on order; thus, in this example, the first population/allele/count information group would correspond to the first listed SNP source (Celera) and the third population/allele/count information group separated by semicolons would correspond to the third listed SNP source (HGBASE); if population/allele/count information is not available for any particular SNP source, then a pair of semicolons is still inserted as a place-holder in order to maintain correspondence between the list of SNP sources and the corresponding listing of population/allele/count information)

[0090] SNP type (e.g., location within gene/transcript and/or predicted functional effect) [“MIS-SENSE MUTATION”=SNP causes a change in the encoded amino acid (i.e., a non-synonymous coding SNP); “SILENT MUTATION”=SNP does not cause a change in the encoded amino acid (i.e., a synonymous coding SNP); “STOP CODON MUTATION”=SNP is located in a stop codon; “NONSENSE MUTATION”=SNP creates or destroys a stop codon; “UTR 5”=SNP is located in a 5′ UTR of a transcript; “UTR 3”=SNP is located in a 3′ UTR of a transcript; “PUTATIVE UTR 5”=SNP is located in a putative 5′ UTR; “PUTATIVE UTR 3”=SNP is located in a putative 3′ UTR; “DONOR SPLICE SITE”=SNP is located in a donor splice site (5′ intron boundary); “ACCEPTOR SPLICE SITE”=SNP is located in an acceptor splice site (3′ intron boundary); “CODING REGION”=SNP is located in a protein-coding region of the transcript; “EXON”=SNP is located in an exon; “INTRON”=SNP is located in an intron; “hmCS”=SNP is located in a human-mouse conserved segment; “TFBS”=SNP is located in a transcription factor binding site; “UNKNOWN”=SNP type is not defined; “INTERGENIC”=SNP is intergenic, i.e., outside of any gene boundary]

[0091] Protein coding information (Table 1 only), where relevant, in the format of [protein SEQ ID NO:#, amino acid position, (amino acid-1, codon1) (amino acid-2, codon2)]. The information in this field includes SEQ ID NO of the encoded protein sequence, position of the amino acid residue within the protein identified by the SEQ ID NO that is encoded by the codon containing the SNP, amino acids (represented by one-letter amino acid codes) that are encoded by the alternative SNP alleles (in the case of stop codons, “X” is used for the one-letter amino acid code), and alternative codons containing the alternative SNP nucleotides which encode the amino acid residues (thus, for example, for missense mutation-type SNPs, at least two different amino acids and at least two different codons are generally indicated; for silent mutation-type SNPs, one amino acid and at least two different codons are generally indicated, etc.). In instances where the SNP is located outside of a protein-coding region (e.g., in a UTR region), “None” is indicated following the protein SEQ ID NO.

[0092] Description of Table 3 and Table 4

[0093] Tables 3 and 4 (both provided on the CD-R) provide a list of a subset of SNPs from Table 1 (in the case of Table 3) or Table 2 (in the case of Table 4) for which the SNP source falls into one of the following three categories: 1) SNPs for which the SNP source is only “Applera” and none other, 2) SNPs for which the SNP source is only “Celera Diagnostics” and none other, and 3) SNPs for which the SNP source is both “Applera” and “Celera Diagnostics” but none other.

[0094] These SNPs have not been observed in any of the public databases (dbSNP, HGBASE, and HGMD), and were also not observed during shotgun sequencing and assembly of the Celera human genome sequence (i.e., “Celera” SNP source). Tables 3 and 4 provide the hCV identification number (or hDV identification number for SNPs having “Celera Diagnostics” SNP source) and the SEQ ID NO of the context sequence for each of these SNPs.

[0095] Description of Table 5

[0096] Table 5 provides sequences (SEQ ID NOS:54,770-55,342) of primers that have been synthesized and used in the laboratory to carry out allele-specific PCR reactions in order to assay the SNPs disclosed in Tables 6-7 during the course of Alzheimer's disease association studies.

[0097] Table 5 provides the following:

[0098] the column labeled “hCV” provides an hCV identification number for each SNP position

[0099] the column labeled “Allele 1” designates which allele at the SNP position identified by the hCV identification number is targeted by the allele-specific primers (the allele-specific primers are shown as “Sequence A” and “Sequence B” in each row)

[0100] the column labeled “Sequence A” provides an allele-specific primer that is specific for an allele at the SNP position identified by the hCV identification number

[0101] the column labeled “Sequence B” provides an allele-specific primer that is specific for the other allele at the SNP position identified by the hCV identification number

[0102] the column labeled “Sequence C” provides a common primer that is used in conjunction with each of the allele-specific primers (“Sequence A” and “Sequence B”) and which hybridizes at a site away from the SNP position.

[0103] All primer sequences are given in the 5′ to 3′ direction.

[0104] The allele given in the “Allele1” column matches the 3′ nucleotide of either “Sequence A” or “Sequence B”. Whichever of these two sequences matches the allele is the allele-specific primer that is specific for the allele given in the “Allele1” column, and the other sequence (the sequence which does not match the allele given in the “Allele1” column) will be specific for the other allele at the SNP position identified by the hCV identification number (this other allele is not given in Table 5 but is indicated in Tables 1 and/or 2 for the SNP position identified by the hCV identification number).

[0105] Description of Table 6 and Table 7

[0106] Tables 6-7 provide results of statistical analyses for SNPs disclosed in Tables 1-5 (SNPs can be cross-referenced between Tables based on their hCV or hDV identification numbers). The statistical results shown in Tables 6-7 provide support for the association of these SNPs with Alzheimer's disease. For example, the statistical results provided in Tables 6-7 show that the association of these SNPs with Alzheimer's disease is supported by p-values<0.05 in at least one of three genotypic association tests and/or an allelic association test. Moreover, Table 6 provides results of markers that are significant in at least two independently collected sample sets, which further verifies the association of these SNPs with Alzheimer's disease. Table 7 lists an additional set of markers that have shown significant association in one sample set (p<0.05) and remain significant (p<0.01) after all genotyped sample sets, including the initial set, are analyzed together.

[0107] Description of column headings for Tables 6 & 7

TABLE 6 & 7

| column | |
|---|---|
| heading | Definition |
| Marker | Identification number for the SNP that is tested |
| Sample Set | Sample Set used in the analysis (1, 2, or 3) |
| Strata | Indicates if the analysis of the dataset was based on a substratum |
| | such as ApoE4 genotype, gender, or age of disease onset (strata are |
| | described below) |
| Adjust | describes the parameters that were used to adjust the p-values |
| | derived by Cochran Mantel Haenszel test [no adjustments (none), |
| | presence or absence of ApoE4 allele (apoe4), gender (male), age of |
| | disease onset in cases and age at mental exam in controls |
| | (age_ge75), sample set (source)] |
| Allelic p-value | result of the asymptotic chi square test for allelic association or the |
| | allelic p-value of the stratified analysis with Cochran Mantel Haenszel |
| | test (Cochran Mantel Haenszel test was used when ‘Adjust’ is different |
| | from ‘none’) |
| Additive p-value | result of the Armitage trendtest for additive genotypic association or |
| | the additive p-value of the stratified analysis with Cochran Mantel |
| | Haenszel test with ordered scores (Cochran Mantel Haenszel test was |
| | used when ‘Adjust’ is different from ‘none’) |
| Dominant p-value | result of the asymptotic chi square test for dominant genotypic |
| | association or the dominant p-value of the stratified analysis with |
| | Cochran Mantel Haenszel test (Cochran Mantel Haenszel test was |
| | used when ‘Adjust’ is different from ‘none’) |
| Recessive p-value | result of the asymptotic chi square test for recessive genotypic |
| | association or the recessive p-value of the stratified analysis with |
| | Cochran Mantel Haenszel test (Cochran Mantel Haenszel test was |
| | used when ‘Adjust’ is different from ‘none’) |
| OR-allelic | allelic odds ratio |
| OR-allelic 95% Cl | 95% confidence interval of the allelic odds ratio |
| OR-dominant | dominant odds ratio |
| OR-dominant 95% Cl | 95% confidence interval of the dominant odds ratio |
| OR-recessive | recessive odds ratio |
| OR-recessive 95% Cl | 95% confidence interval of the recessive odds ratio |
| Allele 1 | Polymorphic nucleotide of the tested SNP for which allele frequencies |
| | are being reported |
| Case Allele 1 Freq | Allele frequency of allele 1 in cases |
| Control Allele 1 Freq | Allele frequency of allele 1 in controls |
| Case Samples | Count of case individuals that were analyzed |
| Control Samples | Count of control individuals that were analyzed |

[0108] Definition of entries in the “Strata” column (Tables 6 & 7) for stratification-based analyses:

| Strata | Definition |
|---|---|
| apoe4 = 0 | no Apo E4 allele present |
| apoe4 = 1 | at least one Apo E4 allele present |
| age_ge75 = 0 | age at disease onset is less than 75 years of |
| | age (controls are <75 years old at mental exam) |
| age_ge75 = 1 | age at disease onset is 75 years of age or older |
| | (controls are >=75 years old at mental exam) |
| male = 0 | only female |
| male = 1 | only male |
| ALL | all individuals |

[0109] NOTE: SNPs can be cross-referenced between Tables 1-7 based on the hCV (or hDV) identification number of each SNP. However, five of the SNPs that are included in Tables 1-7 possess two different identification numbers, as follows:

[0110] hCV12126867 is equivalent to hCV27398082

[0111] hCV2981216 is equivalent to hCV26956511

[0112] hCV8227677 is equivalent to hCV26838632

[0113] hCV8856240 is equivalent to hCV26740731

[0114] hDV68530963 is equivalent to hCV27939864

### DESCRIPTION OF THE FIGURE

[0115] FIG. 1 provides a diagrammatic representation of a computer-based discovery system containing the SNP information of the present invention in computer readable form.

### DETAILED DESCRIPTION OF THE INVENTION

[0116] The present invention provides SNPs associated with Alzheimer's disease, nucleic acid molecules containing SNPs, methods and reagents for the detection of the SNPs disclosed herein, uses of these SNPs for the development of detection reagents, and assays or kits that utilize such reagents. The Alzheimer's disease-associated SNPs disclosed herein are useful for diagnosing, screening for, and evaluating predisposition to Alzheimer's disease and related pathologies in humans. Furthermore, such SNPs and their encoded products are useful targets for the development of therapeutic agents.

[0117] A large number of SNPs have been identified from re-sequencing DNA from 39 individuals, and they are indicated as “Applera” SNP source in Tables 1-2. Their allele frequencies observed in each of the Caucasian and African-American ethnic groups are provided. Additional SNPs included herein were previously identified during shotgun sequencing and assembly of the human genome, and they are indicated as “Celera” SNP source in Tables 1-2. Furthermore, the information provided in Table 1-2, particularly the allele frequency information obtained from 39 individuals and the identification of the precise position of each SNP within each gene/transcript, allows haplotypes (i.e., groups of SNPs that are co-inherited) to be readily inferred. The present invention encompasses SNP haplotypes, as well as individual SNPs.

[0118] Thus, the present invention provides individual SNPs associated with Alzheimer's disease, as well as combinations of SNPs and haplotypes in genetic regions associated with Alzheimer's disease, polymorphic/variant transcript sequences (SEQ ID NOS: 1-433) and genomic sequences (SEQ ID NOS:6752-7071) containing SNPs, encoded amino acid sequences (SEQ ID NOS: 434-866), and both transcript-based SNP context sequences (SEQ ID NOS: 867-6751) and genomic-based SNP context sequences (SEQ ID NOS:7072-54,769) (transcript sequences, protein sequences, and transcript-based SNP context sequences are provided in Table 1 and the Sequence Listing; genomic sequences and genomic-based SNP context sequences are provided in Table 2 and the Sequence Listing), methods of detecting these polymorphisms in a test sample, methods of determining the risk of an individual of having or developing Alzheimer's disease, methods of screening for compounds useful for treating disorders associated with a variant gene/protein such as Alzheimer's disease, compounds identified by these screening methods, methods of using the disclosed SNPs to select a treatment strategy, methods of treating a disorder associated with a variant gene/protein (i.e., therapeutic methods), and methods of using the SNPs of the present invention for human identification.

[0119] The present invention provides novel SNPs associated with Alzheimer's disease, as well as SNPs that were previously known in the art, but were not previously known to be associated with Alzheimer's disease. Accordingly, the present invention provides novel compositions and methods based on the novel SNPs disclosed herein, and also provides novel methods of using the known, but previously unassociated, SNPs in methods relating to Alzheimer's disease (e.g., for diagnosing Alzheimer's disease, etc.). In Tables 1-2, known SNPs are identified based on the public database in which they have been observed, which is indicated as one or more of the following SNP types: “dbSNP”=SNP observed in dbSNP, “HGBASE”=SNP observed in HGBASE, and “HGMD”=SNP observed in the Human Gene Mutation Database (HGMD). Novel SNPs for which the SNP source is only “Applera” and none other, i.e., those that have not been observed in any public databases and which were also not observed during shotgun sequencing and assembly of the Celera human genome sequence (i.e., “Celera” SNP source), are indicated in Tables 3-4.

[0120] Particular SNP alleles of the present invention can be associated with either an increased risk of having or developing Alzheimer's disease, or a decreased risk of having or developing Alzheimer's disease. SNP alleles that are associated with a decreased risk of having or developing Alzheimer's disease may be referred to as “protective” alleles, and SNP alleles that are associated with an increased risk of having or developing Alzheimer's disease may be referred to as “susceptibility” alleles or “risk factors”. Thus, whereas certain SNPs (or their encoded products) can be assayed to determine whether an individual possesses a SNP allele that is indicative of an increased risk of having or developing Alzheimer's disease (i.e., a susceptibility allele), other SNPs (or their encoded products) can be assayed to determine whether an individual possesses a SNP allele that is indicative of a decreased risk of having or developing Alzheimer's disease (i.e., a protective allele). Similarly, particular SNP alleles of the present invention can be associated with either an increased or decreased likelihood of responding to a particular treatment or therapeutic compound, or an increased or decreased likelihood of experiencing toxic effects from a particular treatment or therapeutic compound. The term “altered” may be used herein to encompass either of these two possibilities (e.g., an increased or a decreased risk/likelihood).

[0121] Those skilled in the art will readily recognize that nucleic acid molecules may be double-stranded molecules and that reference to a particular site on one strand refers, as well, to the corresponding site on a complementary strand. In defining a SNP position, SNP allele, or nucleotide sequence, reference to an adenine, a thymine (uridine), a cytosine, or a guanine at a particular site on one strand of a nucleic acid molecule also defines the thymine (uridine), adenine, guanine, or cytosine (respectively) at the corresponding site on a complementary strand of the nucleic acid molecule. Thus, reference may be made to either strand in order to refer to a particular SNP position, SNP allele, or nucleotide sequence. Probes and primers, may be designed to hybridize to either strand and SNP genotyping methods disclosed herein may generally target either strand. Throughout the specification, in identifying a SNP position, reference is generally made to the protein-encoding strand, only for the purpose of convenience.

[0122] References to variant peptides, polypeptides, or proteins of the present invention include peptides, polypeptides, proteins, or fragments thereof, that contain at least one amino acid residue that differs from the corresponding amino acid sequence of the art-known peptide/polypeptide/protein (the art-known protein may be interchangeably referred to as the “wild-type”, “reference”, or “normal” protein). Such variant peptides/polypeptides/proteins can result from a codon change caused by a nonsynonymous nucleotide substitution at a protein-coding SNP position (i.e., a missense mutation) disclosed by the present invention. Variant peptides/polypeptides/proteins of the present invention can also result from a nonsense mutation, i.e. a SNP that creates a premature stop codon, a SNP that generates a read-through mutation by abolishing a stop codon, or due to any SNP disclosed by the present invention that otherwise alters the structure, function/activity, or expression of a protein, such as a SNP in a regulatory region (e.g. a promoter or enhancer) or a SNP that leads to alternative or defective splicing, such as a SNP in an intron or a SNP at an exon/intron boundary. As used herein, the terms “polypeptide”, “peptide”, and “protein” are used interchangeably.

[0123] Isolated Nucleic Acid Molecules and SNP Detection Reagents & Kits

[0124] Tables 1 and 2 provide a variety of information about each SNP of the present invention that is associated with Alzheimer's disease, including the transcript sequences (SEQ ID NOS:1-433), genomic sequences (SEQ ID NOS:6752-7071); and protein sequences (SEQ ID NOS:434-866) of the encoded gene products (with the SNPs indicated by IUB codes in the nucleic acid sequences). In addition, Tables 1 and 2 include SNP context sequences, which generally include 100 nucleotide upstream (5′) plus 100 nucleotides downstream (3′) of each SNP position (SEQ ID NOS:867-6751 correspond to transcript-based SNP context sequences disclosed in Table 1, and SEQ ID NOS:7072-54,769 correspond to genomic-based context sequences disclosed in Table 2), the alternative nucleotides (alleles) at each SNP position, and additional information about the variant where relevant, such as SNP type (coding, missense, splice site, UTR, etc.), human populations in which the SNP was observed, observed allele frequencies, information about the encoded protein, etc.

[0125] Isolated Nucleic Acid Molecules

[0126] The present invention provides isolated nucleic acid molecules that contain one or more SNPs disclosed Table 1 and/or Table 2. Preferred isolated nucleic acid molecules contain one or more SNPs identified in Table 3 and/or Table 4. Isolated nucleic acid molecules containing one or more SNPs disclosed in at least one of Tables 1-4 may be interchangeably referred to throughout the present text as “SNP-containing nucleic acid molecules”. Isolated nucleic acid molecules may optionally encode a full-length variant protein or fragment thereof. The isolated nucleic acid molecules of the present invention also include probes and primers (which are described in greater detail below in the section entitled “SNP Detection Reagents”), which may be used for assaying the disclosed SNPs, and isolated full-length genes, transcripts, cDNA molecules, and fragments thereof, which may be used for such purposes as expressing an encoded protein.

[0127] As used herein, an “isolated nucleic acid molecule” generally is one that contains a SNP of the present invention or one that hybridizes to such molecule such as a nucleic acid with a complementary sequence, and is separated from most other nucleic acids present in the natural source of the nucleic acid molecule. Moreover, an “isolated” nucleic acid molecule, such as a cDNA molecule containing a SNP of the present invention, can be substantially free of other cellular material, or culture medium when produced by recombinant techniques, or chemical precursors or other chemicals when chemically synthesized. A nucleic acid molecule can be fused to other coding or regulatory sequences and still be considered “isolated”. Nucleic acid molecules present in non-human transgenic animals, which do not naturally occur in the animal, are also considered “isolated”. For example, recombinant DNA molecules contained in a vector are considered “isolated”. Further examples of “isolated” DNA molecules include recombinant DNA molecules maintained in heterologous host cells, and purified (partially or substantially) DNA molecules in solution. Isolated RNA molecules include in vivo or in vitro RNA transcripts of the isolated SNP-containing DNA molecules of the present invention. Isolated nucleic acid molecules according to the present invention further include such molecules produced synthetically.

[0128] Generally, an isolated SNP-containing nucleic acid molecule comprises one or more SNP positions disclosed by the present invention with flanking nucleotide sequences on either side of the SNP positions. A flanking sequence can include nucleotide residues that are naturally associated with the SNP site and/or heterologous nucleotide sequences. Preferably the flanking sequence is up to about 500, 300, 100, 60, 50, 30, 25, 20, 15, 10, 8, or 4 nucleotides (or any other length in-between) on either side of a SNP position, or as long as the full-length gene or entire protein-coding sequence (or any portion thereof such as an exon), especially if the SNP-containing nucleic acid molecule is to be used to produce a protein or protein fragment.

[0129] For full-length genes and entire protein-coding sequences, a SNP flanking sequence can be, for example, up to about 5 KB, 4 KB, 3 KB, 2 KB, 1 KB on either side of the SNP. Furthermore, in such instances, the isolated nucleic acid molecule comprises exonic sequences (including protein-coding and/or non-coding exonic sequences), but may also include intronic sequences. Thus, any protein coding sequence may be either contiguous or separated by introns. The important point is that the nucleic acid is isolated from remote and unimportant flanking sequences and is of appropriate length such that it can be subjected to the specific manipulations or uses described herein such as recombinant protein expression, preparation of probes and primers for assaying the SNP position, and other uses specific to the SNP-containing nucleic acid sequences.

[0130] An isolated SNP-containing nucleic acid molecule can comprise, for example, a full-length gene or transcript, such as a gene isolated from genomic DNA (e.g., by cloning or PCR amplification), a cDNA molecule, or an mRNA transcript molecule. Polymorphic transcript sequences are provided in Table 1 and in the Sequence Listing (SEQ ID NOS: 1-433), and polymorphic genomic sequences are provided in Table 2 and in the Sequence Listing (SEQ ID NOS:6752-7071). Furthermore, fragments of such full-length genes and transcripts that contain one or more SNPs disclosed herein are also encompassed by the present invention, and such fragments may be used, for example, to express any part of a protein, such as a particular functional domain or an antigenic epitope.

[0131] Thus, the present invention also encompasses fragments of the nucleic acid sequences provided in Tables 1-2 (transcript sequences are provided in Table 1 as SEQ ID NOS:1-433, genomic sequences are provided in Table 2 as SEQ ID NOS:6752-7071, transcript-based SNP context sequences are provided in Table 1 as SEQ ID NO:867-6751, and genomic-based SNP context sequences are provided in Table 2 as SEQ ID NO:7072-54,769) and their complements. A fragment typically comprises a contiguous nucleotide sequence at least about 8 or more nucleotides, more preferably at least about 12 or more nucleotides, and even more preferably at least about 16 or more nucleotides. Further, a fragment could comprise at least about 18, 20, 22, 25, 30, 40, 50, 60, 100, 250 or 500 (or any other number in-between) nucleotides in length. The length of the fragment will be based on its intended use. For example, the fragment can encode epitope-bearing regions of a variant peptide or regions of a variant peptide that differ from the normal/wild-type protein, or can be useful as a polynucleotide probe or primer. Such fragments can be isolated using the nucleotide sequences provided in Table 1 and/or Table 2 for the synthesis of a polynucleotide probe. A labeled probe can then be used, for example, to screen a cDNA library, genomic DNA library, or mRNA to isolate nucleic acid corresponding to the coding region. Further, primers can be used in amplification reactions, such as for purposes of assaying one or more SNPs sites or for cloning specific regions of a gene.

[0132] An isolated nucleic acid molecule of the present invention further encompasses a SNP-containing polynucleotide that is the product of any one of a variety of nucleic acid amplification methods, which are used to increase the copy numbers of a polynucleotide of interest in a nucleic acid sample. Such amplification methods are well known in the art, and they include but are not limited to, polymerase chain reaction (PCR) (U.S. Pat. Nos. 4,683,195; and 4,683,202; PCR Technology: Principles and Applications for DNA Amplification, ed. H. A. Erlich, Freeman Press, NY, N.Y., 1992), ligase chain reaction (LCR) (Wu and Wallace, Genomics 4:560, 1989; Landegren et al., Science 241:1077, 1988), strand displacement amplification (SDA) (U.S. Pat. Nos. 5,270,184; and 5,422,252), transcription-mediated amplification (TMA) (U.S. Pat. No. 5,399,491), linked linear amplification (LLA) (U.S. Pat. No. 6,027,923), and the like, and isothermal amplification methods such as nucleic acid sequence based amplification (NASBA), and self-sustained sequence replication (Guatelli et al., Proc. Natl. Acad. Sci. USA 87: 1874, 1990). Based on such methodologies, a person skilled in the art can readily design primers in any suitable regions 5′ and 3′ to a SNP disclosed herein. Such primers may be used to amplify DNA of any length so long that it contains the SNP of interest in its sequence.

[0133] As used herein, an “amplified polynucleotide” of the invention is a SNP-containing nucleic acid molecule whose amount has been increased at least two fold by any nucleic acid amplification method performed in vitro as compared to its starting amount in a test sample. In other preferred embodiments, an amplified polynucleotide is the result of at least ten fold, fifty fold, one hundred fold, one thousand fold, or even ten thousand fold increase as compared to its starting amount in a test sample. In a typical PCR amplification, a polynucleotide of interest is often amplified at least fifty thousand fold in amount over the unamplified genomic DNA, but the precise amount of amplification needed for an assay depends on the sensitivity of the subsequent detection method used.

[0134] Generally, an amplified polynucleotide is at least about 16 nucleotides in length. More typically, an amplified polynucleotide is at least about 20 nucleotides in length. In a preferred embodiment of the invention, an amplified polynucleotide is at least about 30 nucleotides in length. In a more preferred embodiment of the invention, an amplified polynucleotide is at least about 32, 40, 45, 50, or 60 nucleotides in length. In yet another preferred embodiment of the invention, an amplified polynucleotide is at least about 100, 200, or 300 nucleotides in length. While the total length of an amplified polynucleotide of the invention can be as long as an exon, an intron or the entire gene where the SNP of interest resides, an amplified product is typically no greater than about 1,000 nucleotides in length (although certain amplification methods may generate amplified products greater than 1000 nucleotides in length). More preferably, an amplified polynucleotide is not greater than about 600 nucleotides in length. It is understood that irrespective of the length of an amplified polynucleotide, a SNP of interest may be located anywhere along its sequence.

[0135] In a specific embodiment of the invention, the amplified product is at least about 201 nucleotides in length, comprises one of the transcript-based context sequences or the genomic-based context sequences shown in Tables 1-2. Such a product may have additional sequences on its 5′ end or 3′ end or both. In another embodiment, the amplified product is about 101 nucleotides in length, and it contains a SNP disclosed herein. Preferably, the SNP is located at the middle of the amplified product (e.g., at position 101 in an amplified product that is 201 nucleotides in length, or at position 51 in an amplified product that is 101 nucleotides in length), or within 1, 2, 3, 4, 5, 6, 7, 8, 9, 10, 12, 15, or 20 nucleotides from the middle of the amplified product (however, as indicated above, the SNP of interest may be located anywhere along the length of the amplified product).

[0136] The present invention provides isolated nucleic acid molecules that comprise, consist of, or consist essentially of one or more polynucleotide sequences that contain one or more SNPs disclosed herein, complements thereof, and SNP-containing fragments thereof.

[0137] Accordingly, the present invention provides nucleic acid molecules that consist of any of the nucleotide sequences shown in Table 1 and/or Table 2 (transcript sequences are provided in Table 1 as SEQ ID NOS:1-433, genomic sequences are provided in Table 2 as SEQ ID NOS:6752-7071, transcript-based SNP context sequences are provided in Table 1 as SEQ ID NO:867-6751, and genomic-based SNP context sequences are provided in Table 2 as SEQ ID NO:7072-54,769), or any nucleic acid molecule that encodes any of the variant proteins provided in Table 1 (SEQ ID NOS:434-866). A nucleic acid molecule consists of a nucleotide sequence when the nucleotide sequence is the complete nucleotide sequence of the nucleic acid molecule.

[0138] The present invention further provides nucleic acid molecules that consist essentially of any of the nucleotide sequences shown in Table 1 and/or Table 2 (transcript sequences are provided in Table 1 as SEQ ID NOS:1-433, genomic sequences are provided in Table 2 as SEQ ID NOS:6752-7071, transcript-based SNP context sequences are provided in Table 1 as SEQ ID NO:867-6751, and genomic-based SNP context sequences are provided in Table 2 as SEQ ID NO:7072-54,769), or any nucleic acid molecule that encodes any of the variant proteins provided in Table 1 (SEQ ID NOS:434-866). A nucleic acid molecule consists essentially of a nucleotide sequence when such a nucleotide sequence is present with only a few additional nucleotide residues in the final nucleic acid molecule.

[0139] The present invention further provides nucleic acid molecules that comprise any of the nucleotide sequences shown in Table 1 and/or Table 2 or a SNP-containing fragment thereof (transcript sequences are provided in Table 1 as SEQ ID NOS:1-433, genomic sequences are provided in Table 2 as SEQ ID NOS:6752-7071, transcript-based SNP context sequences are provided in Table 1 as SEQ ID NO:867-6751, and genomic-based SNP context sequences are provided in Table 2 as SEQ ID NO:7072-54,769), or any nucleic acid molecule that encodes any of the variant proteins provided in Table 1 (SEQ ID NOS:434-866). A nucleic acid molecule comprises a nucleotide sequence when the nucleotide sequence is at least part of the final nucleotide sequence of the nucleic acid molecule. In such a fashion, the nucleic acid molecule can be only the nucleotide sequence or have additional nucleotide residues, such as residues that are naturally associated with it or heterologous nucleotide sequences. Such a nucleic acid molecule can have one to a few additional nucleotides or can comprise many more additional nucleotides. A brief description of how various types of these nucleic acid molecules can be readily made and isolated is provided below, and such techniques are well known to those of ordinary skill in the art (Sambrook and Russell, 2000, Molecular Cloning: A Laboratory Manual, Cold Spring Harbor Press, NY).

[0140] The isolated nucleic acid molecules can encode mature proteins plus additional amino or carboxyl-terminal amino acids or both, or amino acids interior to the mature peptide (when the mature form has more than one peptide chain, for instance). Such sequences may play a role in processing of a protein from precursor to a mature form, facilitate protein trafficking, prolong or shorten protein half-life, or facilitate manipulation of a protein for assay or production. As generally is the case in situ, the additional amino acids may be processed away from the mature protein by cellular enzymes.

[0141] Thus, the isolated nucleic acid molecules include, but are not limited to, nucleic acid molecules having a sequence encoding a peptide alone, a sequence encoding a mature peptide and additional coding sequences such as a leader or secretory sequence (e.g., a pre-pro or pro-protein sequence), a sequence encoding a mature peptide with or without additional coding sequences, plus additional non-coding sequences, for example introns and non-coding 5′ and 3′ sequences such as transcribed but untranslated sequences that play a role in, for example, transcription, mRNA processing (including splicing and polyadenylation signals), ribosome binding, and/or stability of mRNA. In addition, the nucleic acid molecules may be fused to heterologous marker sequences encoding, for example, a peptide that -facilitates purification.

[0142] Isolated nucleic acid molecules can be in the form of RNA, such as mRNA, or in the form DNA, including cDNA and genomic DNA, which may be obtained, for example, by molecular cloning or produced by chemical synthetic techniques or by a combination thereof (Sambrook and Russell, 2000, Molecular Cloning: A Laboratory Manual, Cold Spring Harbor Press, NY). Furthermore, isolated nucleic acid molecules, particularly SNP detection reagents such as probes and primers, can also be partially or completely in the form of one or more types of nucleic acid analogs, such as peptide nucleic acid (PNA) (U.S. Pat. Nos. 5,539,082; 5,527,675; 5,623,049; 5,714,331). The nucleic acid, especially DNA, can be double-stranded or single-stranded. Single-stranded nucleic acid can be the coding strand (sense strand) or the complementary non-coding strand (anti-sense strand). DNA, RNA, or PNA segments can be assembled, for example, from fragments of the human genome (in the case of DNA or RNA) or single nucleotides, short oligonucleotide linkers, or from a series of oligonucleotides, to provide a synthetic nucleic acid molecule. Nucleic acid molecules can be readily synthesized using the sequences provided herein as a reference; oligonucleotide and PNA oligomer synthesis techniques are well known in the art (see, e.g., Corey, “Peptide nucleic acids: expanding the scope of nucleic acid recognition”, Trends Biotechnol. June 1997;15(6):224-9, and Hyrup et al., “Peptide nucleic acids (PNA): synthesis, properties and potential applications”, Bioorg Med Chem. January 1996;4(1):5-23). Furthermore, large-scale automated oligonucleotide/PNA synthesis (including synthesis on an array or bead surface or other solid support) can readily be accomplished using commercially available nucleic acid synthesizers, such as the Applied Biosystems (Foster City, Calif.) 3900 High-Throughput DNA Synthesizer or Expedite 8909 Nucleic Acid Synthesis System, and the sequence information provided herein.

[0143] The present invention encompasses nucleic acid analogs that contain modified, synthetic, or non-naturally occurring nucleotides or structural elements or other alternative/modified nucleic acid chemistries known in the art. Such nucleic acid analogs are useful, for example, as detection reagents (e.g., primers/probes) for detecting one or more SNPs identified in Table 1 and/or Table 2. Furthermore, kits/systems (such as beads, arrays, etc.) that include these analogs are also encompassed by the present invention. For example, PNA oligomers that are based on the polymorphic sequences of the present invention are specifically contemplated. PNA oligomers are analogs of DNA in which the phosphate backbone is replaced with a peptide-like backbone (Lagriffoul et al., Bioorganic & Medicinal Chemistry Letters, 4: 1081-1082 (1994), Petersen et al., Bioorganic & Medicinal Chemistry Letters, 6: 793-796 (1996), Kumar et al., Organic Letters 3(9): 1269-1272 (2001), WO96/04000). PNA hybridizes to complementary RNA or DNA with higher affinity and specificity than conventional oligonucleotides and oligonucleotide analogs. The properties of PNA enable novel molecular biology and biochemistry applications unachievable with traditional oligonucleotides and peptides.

[0144] Additional examples of nucleic acid modifications that improve the binding properties and/or stability of a nucleic acid include the use of base analogs such as inosine, intercalators (U.S. Pat. No. 4,835,263) and the minor groove binders (U.S. Pat. No. 5,801,115). Thus, references herein to nucleic acid molecules, SNP-containing nucleic acid molecules, SNP detection reagents (e.g., probes and primers), oligonucleotides/polynucleotides include PNA oligomers and other nucleic acid analogs. Other examples of nucleic acid analogs and alternative/modified nucleic acid chemistries known in the art are described in Current Protocols in Nucleic Acid Chemistry, John Wiley & Sons, N.Y. (2002).

[0145] The present invention further provides nucleic acid molecules that encode fragments of the variant polypeptides disclosed herein as well as nucleic acid molecules that encode obvious variants of such variant polypeptides. Such nucleic acid molecules may be naturally occurring, such as paralogs (different locus) and orthologs (different organism), or may be constructed by recombinant DNA methods or by chemical synthesis. Non-naturally occurring variants may be made by mutagenesis techniques, including those applied to nucleic acid molecules, cells, or organisms. Accordingly, the variants can contain nucleotide substitutions, deletions, inversions and insertions (in addition to the SNPs disclosed in Tables 1-2). Variation can occur in either or both the coding and non-coding regions. The variations can produce conservative and/or non-conservative amino acid substitutions.

[0146] Further variants of the nucleic acid molecules disclosed in Tables 1-2, such as naturally occurring allelic variants (as well as orthologs and paralogs) and synthetic variants produced by mutagenesis techniques, can be identified and/or produced using methods well known in the art. Such further variants can comprise a nucleotide sequence that shares at least 70-80%, 80-85%, 85-90%, 91%, 92%, 93%, 94%, 95%, 96%, 97%, 98%, or 99% sequence identity with a nucleic acid sequence disclosed in Table 1 and/or Table 2 (or a fragment thereof) and that includes a novel SNP allele disclosed in Table 1 and/or Table 2. Further, variants can comprise a nucleotide sequence that encodes a polypeptide that shares at least 70-80%, 80-85%, 85-90%, 91%, 92%, 93%, 94%, 95%, 96%, 97%, 98%, or 99% sequence identity with a polypeptide sequence disclosed in Table 1 (or a fragment thereof) and that includes a novel SNP allele disclosed in Table 1 and/or Table 2. Thus, the present invention specifically contemplates isolated nucleic acid molecule that have a certain degree of sequence variation compared with the sequences shown in Tables 1-2, but that contain a novel SNP allele disclosed herein. In other words, as long as an isolated nucleic acid molecule contains a novel SNP allele disclosed herein, other portions of the nucleic acid molecule that flank the novel SNP allele can vary to some degree from the specific transcript, genomic, and context sequences shown in Tables 1-2, and can encode a polypeptide that varies to some degree from the specific polypeptide sequences shown in Table 1.

[0147] To determine the percent identity of two amino acid sequences or two nucleotide sequences of two molecules that share sequence homology, the sequences are aligned for optimal comparison purposes (e.g., gaps can be introduced in one or both of a first and a second amino acid or nucleic acid sequence for optimal alignment and non-homologous sequences can be disregarded for comparison purposes). In a preferred embodiment, at least 30%, 40%, 50%, 60%, 70%, 80%, or 90% or more of the length of a reference sequence is aligned for comparison purposes. The amino acid residues or nucleotides at corresponding amino acid positions or nucleotide positions are then compared. When a position in the first sequence is occupied by the same amino acid residue or nucleotide as the corresponding position in the second sequence, then the molecules are identical at that position (as used herein, amino acid or nucleic acid “identity” is equivalent to amino acid or nucleic acid “homology”). The percent identity between the two sequences is a function of the number of identical positions shared by the sequences, taking into account the number of gaps, and the length of each gap, which need to be introduced for optimal alignment of the two sequences.

[0148] The comparison of sequences and determination of percent identity between two sequences can be accomplished using a mathematical algorithm. (Computational Molecular Biology, Lesk, A. M., ed., Oxford University Press, New York, 1988; Biocomputing: Informatics and Genome Projects, Smith, D. W., ed., Academic Press, New York, 1993; Computer Analysis of Sequence Data, Part 1, Griffin, A. M., and Griffin, H. G., eds., Humana Press, New Jersey, 1994; Sequence Analysis in Molecular Biology, von Heinje, G., Academic Press, 1987; and Sequence Analysis Primer, Gribskov, M. and Devereux, J., eds., M Stockton Press, New York, 1991). In a preferred embodiment, the percent identity between two amino acid sequences is determined using the Needleman and Wunsch algorithm (J. Mol. Biol. (48):444-453 (1970)) which has been incorporated into the GAP program in the GCG software package, using either a Blossom 62 matrix or a PAM250 matrix, and a gap weight of 16, 14, 12, 10, 8, 6, or 4 and a length weight of 1, 2, 3, 4, 5, or 6.

[0149] In yet another preferred embodiment, the percent identity between two nucleotide sequences is determined using the GAP program in the GCG software package (Devereux, J., et al., Nucleic Acids Res. 12(1):387 (1984)), using a NWSgapdna.CMP matrix and a gap weight of 40, 50, 60, 70, or 80 and a length weight of 1, 2, 3, 4, 5, or 6. In another embodiment, the percent identity between two amino acid or nucleotide sequences is determined using the algorithm of E. Myers and W. Miller (CABIOS, 4:11-17 (1989)) which has been incorporated into the ALIGN program (version 2.0), using a PAM120 weight residue table, a gap length penalty of 12, and a gap penalty of 4.

[0150] The nucleotide and amino acid sequences of the present invention can further be used as a “query sequence” to perform a search against sequence databases to, for example, identify other family members or related sequences. Such searches can be performed using the NBLAST and XBLAST programs (version 2.0) of Altschul, et al. (J. Mol. Biol. 215:403-10 (1990)). BLAST nucleotide searches can be performed with the NBLAST program, score=100, wordlength=12 to obtain nucleotide sequences homologous to the nucleic acid molecules of the invention. BLAST protein searches can be performed with the XBLAST program, score=50, wordlength=3 to obtain amino acid sequences homologous to the proteins of the invention. To obtain gapped alignments for comparison purposes, Gapped BLAST can be utilized as described in Altschul et al. (Nucleic Acids Res. 25(17):3389-3402 (1997)). When utilizing BLAST and gapped BLAST programs, the default parameters of the respective programs (e.g., XBLAST and NBLAST) can be used. In addition to BLAST, examples of other search and sequence comparison programs used in the art include, but are not limited to, FASTA (Pearson, Methods Mol. Biol. 25, 365-389 (1994)) and KERR (Dufresne et al., Nat Biotechnol December 2000;20(12):1269-71).

[0151] The present invention further provides non-coding fragments of the nucleic acid molecules disclosed in Table 1 and/or Table 2. Preferred non-coding fragments include, but are not limited to, promoter sequences, enhancer sequences, intronic sequences, 5′ untranslated regions (UTRs), 3′ untranslated regions, gene modulating sequences and gene termination sequences. Such fragments are useful, for example, in controlling heterologous gene expression and in developing screens to identify gene-modulating agents.

[0152] SNP Detection Reagents

[0153] In a specific aspect of the present invention, the SNPs disclosed in Table 1 and/or Table 2, and their associated transcript sequences (provided in Table 1 as SEQ ID NOS:1-433), genomic sequences (provided in Table 2 as SEQ ID NOS:6752-707 1), and context, sequences (transcript-based context sequences are provided in Table 1 as SEQ ID NOS:867-6751; genomic-based context sequences are provided in Table 2 as SEQ ID NOS:7072-54,769), can be used for the design of SNP detection reagents. As used herein, a “SNP detection reagent” is a reagent that specifically detects a specific target SNP position disclosed herein, and that is preferably specific for a particular nucleotide (allele) of the target SNP position (i.e., the detection reagent preferably can differentiate between different alternative nucleotides at a target SNP position, thereby allowing the identity of the nucleotide present at the target SNP position to be determined). Typically, such detection reagent hybridizes to a target SNP-containing nucleic acid molecule by complementary base-pairing in a sequence specific manner, and discriminates the target variant sequence from other nucleic acid sequences such as an art-known form in a test sample. An example of a detection reagent is a probe that hybridizes to a target nucleic acid containing one or more of the SNPs provided in Table 1 and/or Table 2. In a preferred embodiment, such a probe can differentiate between nucleic acids having a particular nucleotide (allele) at a target SNP position from other nucleic acids that have a different nucleotide at the same target SNP position. In addition, a detection reagent may hybridize to a specific region 5′ and/or 3′ to a SNP position, particularly a region corresponding to the context sequences provided in Table 1 and/or Table 2 (transcript-based context sequences are provided in Table 1 as SEQ ID NOS:867-6751; genomic-based context sequences are provided in Table 2 as SEQ ID NOS:7072-54,769). Another example of a detection reagent is a primer which acts as an initiation point of nucleotide extension along a complementary strand of a target polynucleotide. The SNP sequence information provided herein is also useful for designing primers, e.g. allele-specific primers, to amplify (e.g., using PCR) any SNP of the present invention. Preferred sets of primers for allele-specific amplification reactions, which have been synthesized and used in the laboratory to assay SNPs, are provided in Table 5 as SEQ ID NOS:54,770-55,342.

[0154] In one preferred embodiment of the invention, a SNP detection reagent is an isolated or synthetic DNA or RNA polynucleotide probe or primer or PNA oligomer, or a combination of DNA, RNA and/or PNA, that hybridizes to a segment of a target nucleic acid molecule containing a SNP identified in Table 1 and/or Table 2. A detection reagent in the form of a polynucleotide may optionally contain modified base analogs, intercalators or minor groove binders. Multiple detection reagents such as probes may be, for example, affixed to a solid support (e.g., arrays or beads) or supplied in solution (e.g., probe/primer sets for enzymatic reactions such as PCR, RT-PCR, TaqMan assays, or primer-extension reactions) to form a SNP detection kit.

[0155] A probe or primer typically is a substantially purified oligonucleotide or PNA oligomer. Such oligonucleotide typically comprises a region of complementary nucleotide sequence that hybridizes under stringent conditions to at least about 8, 10, 12, 16, 18, 20, 22, 25, 30, 40, 50, 60, 100 (or any other number in-between) or more consecutive nucleotides in a target nucleic acid molecule. Depending on the particular assay, the consecutive nucleotides can either include the target SNP position, or be a specific region in close enough proximity 5′ and/or 3′ to the SNP position to carry out the desired assay.

[0156] Other preferred primer and probe sequences can readily be determined using the transcript sequences (SEQ ID NOS:1-433), genomic sequences (SEQ ID NOS:6752-7071), and SNP context sequences (transcript-based context sequences are provided in Table 1 as SEQ ID NOS:867-6751; genomic-based context sequences are provided in Table 2 as SEQ ID NOS:7072-54,769) disclosed in the Sequence Listing and in Tables 1-2. It will be apparent to one of skill in the art that such primers and probes are directly useful as reagents for genotyping the SNPs of the present invention, and can be incorporated into any kit/system format.

[0157] In order to produce a probe or primer specific for a target SNP-containing sequence, the gene/transcript and/or context sequence surrounding the SNP of interest is typically examined using a computer algorithm which starts at the 5′ or at the 3′ end of the nucleotide sequence. Typical algorithms will then identify oligomers of defined length that are unique to the gene/SNP context sequence, have a GC content within a range suitable for hybridization, lack predicted secondary structure that may interfere with hybridization, and/or possess other desired characteristics or that lack other undesired characteristics.

[0158] A primer or probe of the present invention is typically at least about 8 nucleotides in length. In one embodiment of the invention, a primer or a probe is at least about 10 nucleotides in length. In a preferred embodiment, a primer or a probe is at least about 12 nucleotides in length. In a more preferred embodiment, a primer or probe is at least about 16, 17, 18, 19, 20, 21, 22, 23, 24 or 25 nucleotides in length. While the maximal length of a probe can be as long as the target sequence to be detected, depending on the type of assay in which it is employed, it is typically less than about 50, 60, 65, or 70 nucleotides in length. In the case of a primer, it is typically less than about 30 nucleotides in length. In a specific preferred embodiment of the invention, a primer or a probe is within the length of about 18 and about 28 nucleotides. However, in other embodiments, such as nucleic acid arrays and other embodiments in which probes are affixed to a substrate, the probes can be longer, such as on the order of 30-70, 75, 80, 90, 100, or more nucleotides in length (see the section below entitled “SNP Detection Kits and Systems”).

[0159] For analyzing SNPS, it may be appropriate to use oligonucleotides specific for alternative SNP alleles. Such oligonucleotides which detect single nucleotide variations in target sequences may be referred to by such terms as “allele-specific oligonucleotides”, “allele-specific probes”, or “allele-specific primers”. The design and use of allele-specific probes for analyzing polymorphisms is described in, e.g., Mutation Detection A Practical Approach, ed. Cotton et al. Oxford University Press, 1998; Saiki et al., Nature 324, 163-166 (1986); Dattagupta, EP235,726; and Saiki, WO 89/11548.

[0160] While the design of each allele-specific primer or probe depends on variables such as the precise composition of the nucleotide sequences flanking a SNP position in a target nucleic acid molecule, and the length of the primer or probe, another factor in the use of primers and probes is the stringency of the condition under which the hybridization between the probe or primer and the target sequence is performed. Higher stringency conditions utilize buffers with lower ionic strength and/or a higher reaction temperature, and tend to require a more perfect match between probe/primer and a target sequence in order to form a stable duplex. If the stringency is too high, however, hybridization may not occur at all. In contrast, lower stringency conditions utilize buffers with higher ionic strength and/or a lower reaction temperature, and permit the formation of stable duplexes with more mismatched bases between a probe/primer and a target sequence. By way of example and not limitation, exemplary conditions for high stringency hybridization conditions using an allele-specific probe are as follows: Prehybridization with a solution containing 5X standard saline phosphate EDTA (SSPE), 0.5% NaDodSO₄ (SDS) at 55° C., and incubating probe with target nucleic acid molecules in the same solution at the same temperature, followed by washing with a solution containing 2× SSPE, and 0.1% SDS at 55° C. or room temperature.

[0161] Moderate stringency hybridization conditions may be used for allele-specific primer extension reactions with a solution containing, e.g., about 50 mM KCl at about 46° C. Alternatively, the reaction may be carried out at an elevated temperature such as 60° C. In another embodiment, a moderately stringent hybridization condition suitable for oligonucleotide ligation assay (OLA) reactions wherein two probes are ligated if they are completely complementary to the target sequence may utilize a solution of about 100 mM KCl at a temperature of 46° C.

[0162] In a hybridization-based assay, allele-specific probes can be designed that hybridize to a segment of target DNA from one individual but do not hybridize to the corresponding segment from another individual due to the presence of different polymorphic forms (e.g., alternative SNP alleles/nucleotides) in the respective DNA segments from the two individuals. Hybridization conditions should be sufficiently stringent that there is a significant detectable difference in hybridization intensity between alleles, and preferably an essentially binary response, whereby a probe hybridizes to only one of the alleles or significantly more strongly to one allele. While a probe may be designed to hybridize to a target sequence that contains a SNP site such that the SNP site aligns anywhere along the sequence of the probe, the probe is preferably designed to hybridize to a segment of the target sequence such that the SNP site aligns with a central position of the probe (e.g., a position within the probe that is at least three nucleotides from either end of the probe). This design of probe generally achieves good discrimination in hybridization between different allelic forms.

[0163] In another embodiment, a probe or primer may be designed to hybridize to a segment of target DNA such that the SNP aligns with either the 5′ most end or the 3′ most end of the probe or primer. In a specific preferred embodiment which is particularly suitable for use in an oligonucleotide ligation assay (U.S. Pat. No. 4,988,617), the 3′ most nucleotide of the probe aligns with the SNP position in the target sequence.

[0164] Oligonucleotide probes and primers may be prepared by methods well known in the art. Chemical synthetic methods include, but are limited to, the phosphotriester method described by Narang et al., 1979, Methods in Enzymology 68:90; the phosphodiester method described by Brown et al., 1979, Methods in Enzymology 68:109, the diethylphosphoamidate method described by Beaucage et al., 1981, Tetrahedron Letters 22:1859; and the solid support method described in U.S. Pat. No. 4,458,066.

[0165] Allele-specific probes are often used in pairs (or, less commonly, in sets of 3 or 4, such as if a SNP position is known to have 3 or 4 alleles, respectively, or to assay both strands of a nucleic acid molecule for a target SNP allele), and such pairs may be identical except for a one nucleotide mismatch that represents the allelic variants at the SNP position.

[0166] Commonly, one member of a pair perfectly matches a reference form of a target sequence that has a more common SNP allele (i.e., the allele that is more frequent in the target population) and the other member of the pair perfectly matches a form of the target sequence that has a less common SNP allele (i.e., the allele that is rarer in the target population). In the case of an array, multiple pairs of probes can be immobilized on the same support for simultaneous analysis of multiple different polymorphisms.

[0167] In one type of PCR-based assay, an allele-specific primer hybridizes to a region on a target nucleic acid molecule that overlaps a SNP position and only primes amplification of an allelic form to which the primer exhibits perfect complementarity (Gibbs, 1989, Nucleic Acid Res. 17 2427-2448). Preferred sets of primers for allele-specific amplification reactions, which have been synthesized and used in the laboratory to assay SNPs, are provided in Table 5 as SEQ ID NOS:54,770-55,342. Typically, the primer's 3′-most nucleotide is aligned with and complementary to the SNP position of the target nucleic acid molecule. This primer is used in conjunction with a second primer that hybridizes at a distal site. Amplification proceeds from the two primers, producing a detectable product that indicates which allelic form is present in the test sample. A control is usually performed with a second pair of primers, one of which shows a single base mismatch at the polymorphic site and the other of which exhibits perfect complementarity to a distal site. The single-base mismatch prevents amplification or substantially reduces amplification efficiency, so that either no detectable product is formed or it is formed in lower amounts or at a slower pace. The method generally works most effectively when the mismatch is at the 3′-most position of the oligonucleotide (i.e., the 3′-most position of the oligonucleotide aligns with the target SNP position) because this position is most destabilizing to elongation from the primer (see, e.g., WO 93/22456). This PCR-based assay can be utilized as part of the TaqMan assay, described below.

[0168] In a specific embodiment of the invention, a primer of the invention contains a sequence substantially complementary to a segment of a target SNP-containing nucleic acid molecule except that the primer has a mismatched nucleotide in one of the three nucleotide positions at the 3′-most end of the primer, such that the mismatched nucleotide does not base pair with a particular allele at the SNP site. In a preferred embodiment, the mismatched nucleotide in the primer is the second from the last nucleotide at the 3′-most position of the primer. In a more preferred embodiment, the mismatched nucleotide in the primer is the last nucleotide at the 3′-most position of the primer.

[0169] In another embodiment of the invention, a SNP detection reagent of the invention is labeled with a fluorogenic reporter dye that emits a detectable signal. While the preferred reporter dye is a fluorescent dye, any reporter dye that can be attached to a detection reagent such as an oligonucleotide probe or primer is suitable for use in the invention. Such dyes include, but are not limited to, Acridine, AMCA, BODIPY, Cascade Blue, Cy2, Cy3, Cy5, Cy7, Dabcyl, Edans, Eosin, Erythrosin, Fluorescein, 6-Fam, Tet, Joe, Hex, Oregon Green, Rhodamine, Rhodol Green, Tamra, Rox, and Texas Red.

[0170] In yet another embodiment of the invention, the detection reagent may be further labeled with a quencher dye such as Tamra, especially when the reagent is used as a self-quenching probe such as a TaqMan (U.S. Pat. Nos. 5,210,015 and 5,538,848) or Molecular Beacon probe (U.S. Pat. Nos. 5,118,801 and 5,312,728), or other stemless or linear beacon probe (Livak et al., 1995, PCR Method Appl. 4:357-362; Tyagi et al., 1996, Nature Biotechnology 14: 303-308; Nazarenko et al., 1997, Nucl. Acids Res. 25:2516-2521; U.S. Pat. Nos. 5,866,336 and 6,117,635).

[0171] The detection reagents of the invention may also contain other labels, including but not limited to, biotin for streptavidin binding, hapten for antibody binding, and oligonucleotide for binding to another complementary oligonucleotide such as pairs of zipcodes.

[0172] The present invention also contemplates reagents that do not contain (or that are complementary to) a SNP nucleotide identified herein but that are used to assay one or more SNPs disclosed herein. For example, primers that flank, but do not hybridize directly to a target SNP position provided herein are useful in primer extension reactions in which the primers hybridize to a region adjacent to the target SNP position (i.e., within one or more nucleotides from the target SNP site). During the primer extension reaction, a primer is typically not able to extend past a target SNP site if a particular nucleotide (allele) is present at that target SNP site, and the primer extension product can readily be detected in order to determine which SNP allele is present at the target SNP site. For example, particular ddNTPs are typically used in the primer extension reaction to terminate primer extension once a ddNTP is incorporated into the extension product (a primer extension product which includes a ddNTP at the 3′-most end of the primer extension product, and in which the ddNTP corresponds to a SNP disclosed herein, is a composition that is encompassed by the present invention). Thus, reagents that bind to a nucleic acid molecule in a region adjacent to a SNP site, even though the bound sequences do not necessarily include the SNP site itself, are also encompassed by the present invention.

[0173] SNP Detection Kits and Systems

[0174] A person skilled in the art will recognize that, based on the SNP and associated sequence information disclosed herein, detection reagents can be developed and used to assay any SNP of the present invention individually or in combination, and such detection reagents can be readily incorporated into one of the established kit or system formats which are well known in the art. The terms “kits” and “systems”, as used herein in the context of SNP detection reagents, are intended to refer to such things as combinations of multiple SNP detection reagents, or one or more SNP detection reagents in combination with one or more other types of elements or components (e.g., other types of biochemical reagents, containers, packages such as packaging intended for commercial sale, substrates to which SNP detection reagents are attached, electronic hardware components, etc.). Accordingly, the present invention further provides SNP detection kits and systems, including but not limited to, packaged probe and primer sets (e.g., TaqMan probe/primer sets), arrays/microarrays of nucleic acid molecules, and beads that contain one or more probes, primers, or other detection reagents for detecting one or more SNPs of the present invention. The kits/systems can optionally include various electronic hardware components; for example, arrays (“DNA chips”) and microfluidic systems (“lab-on-a-chip” systems) provided by various manufacturers typically comprise hardware components. Other kits/systems (e.g., probe/primer sets) may not include electronic hardware components, but may be comprised of, for example, one or more SNP detection reagents (along with, optionally, other biochemical reagents) packaged in one or more containers.

[0175] An exemplary kit/system of the present invention can be based on the primer sequences disclosed in Table 5. Preferred sets of primers for allele-specific amplification reactions, which have been synthesized and used in the laboratory to assay SNPs, are provided in Table 5 as SEQ ID NOS:54,770-55,342. It will be apparent to one of skill in the art that these primers disclosed in Table 5 for detecting SNPs of the present invention are useful in diagnostic assays for Alzheimer's disease and related pathologies, and can be readily incorporated into a kit/system format. For example, for a particular target SNP position identified by an hCV identification number in Table 5, the two corresponding allele-specific primers (identified in Table 5 as “Sequence A” and “Sequence B”) and the common primer (identified in Table 5 as “Sequence C”), which have been used and validated in the laboratory, can all three be readily packaged into a kit format along with, optionally, other biochemical reagents, such as reagents for carrying out allele-specific amplification reactions (e.g., enzymes, dNTPs, buffer, etc.).

[0176] In some embodiments, a SNP detection kit typically contains one or more detection reagents and other components (e.g., a buffer, enzymes such as DNA polymerases or ligases, chain extension nucleotides such as deoxynucleotide triphosphates, and in the case of Sanger-type DNA sequencing reactions, chain terminating nucleotides, positive control sequences, negative control sequences, and the like) necessary to carry out an assay or reaction, such as amplification and/or detection of a SNP-containing nucleic acid molecule. A kit may further contain means for determining the amount of a target nucleic acid, and means for comparing the amount with a standard, and can comprise instructions for using the kit to detect the SNP-containing nucleic acid molecule of interest. In one embodiment of the present invention, kits are provided which contain the necessary reagents to carry out one or more assays to detect one or more SNPs disclosed herein. In a preferred embodiment of the present invention, SNP detection kits/systems are in the form of nucleic acid arrays, or compartmentalized kits, including microfluidic/lab-on-a-chip systems.

[0177] SNP detection kits/systems may contain, for example, one or more probes, or pairs of probes, that hybridize to a nucleic acid molecule at or near each target SNP position. Multiple pairs of allele-specific probes may be included in the kit/system to simultaneously assay large numbers of SNPs, at least one of which is a SNP of the present invention. In some kits/systems, the allele-specific probes are immobilized to a substrate such as an array or bead. For example, the same substrate can comprise allele-specific probes for detecting at least 1; 10; 100; 1000; 10,000; 100,000 (or any other number in-between) or substantially all of the SNPs shown in Table 1 and/or Table 2.

[0178] The terms “arrays”, “microarrays”, and “DNA chips” are used herein interchangeably to refer to an array of distinct polynucleotides affixed to a substrate, such as glass, plastic, paper, nylon or other type of membrane, filter, chip, or any other suitable solid support. The polynucleotides can be synthesized directly on the substrate, or synthesized separate from the substrate and then affixed to the substrate. In one embodiment, the microarray is prepared and used according to the methods described in U.S. Pat. No. 5,837,832, Chee et al., PCT application W095/11995 (Chee et al.), Lockhart, D. J. et al. (1996; Nat. Biotech. 14: 1675-1680) and Schena, M. et al. (1996; Proc. Natl. Acad. Sci. 93: 10614-10619), all of which are incorporated herein in their entirety by reference. In other embodiments, such arrays are produced by the methods described by Brown et al., U.S. Pat. No. 5,807,522.

[0179] Nucleic acid arrays are reviewed in the following references: Zammatteo et al., “New chips for molecular biology and diagnostics”, Biotechnol Annu Rev. 2002;8:85-101; Sosnowski et al., “Active microelectronic array system for DNA hybridization, genotyping and pharmacogenomic applications”, Psychiatr Genet. December 2002;12(4): 181-92; Heller, “DNA microarray technology: devices, systems, and applications”, Annu Rev Biomed Eng. 2002;4: 129-53. Epub 2002 Mar. 22; Kolchinsky et al., “Analysis of SNPs and other genomic variations using gel-based chips”, Hum Mutat. April 2002;19(4):343-60; and McGall et al., “High-density genechip oligonucleotide probe arrays”, Adv Biochem Eng Biotechnol. 2002;77:21-42.

[0180] Any number of probes, such as allele-specific probes, may be implemented in an array, and each probe or pair of probes can hybridize to a different SNP position. In the case of polynucleotide probes, they can be synthesized at designated areas (or synthesized separately and then affixed to designated areas) on a substrate using a light-directed chemical process. Each DNA chip can contain, for example, thousands to millions of individual synthetic polynucleotide probes arranged in a grid-like pattern and miniaturized (e.g., to the size of a dime). Preferably, probes are attached to a solid support in an ordered, addressable array.

[0181] A microarray can be composed of a large number of unique, single-stranded polynucleotides, usually either synthetic antisense polynucleotides or fragments of cDNAs, fixed to a solid support. Typical polynucleotides are preferably about 6-60 nucleotides in length, more preferably about 15-30 nucleotides in length, and most preferably about 18-25 nucleotides in length. For certain types of microarrays or other detection kits/systems, it may be preferable to use oligonucleotides that are only about 7-20 nucleotides in length. In other types of arrays, such as arrays used in conjunction with chemiluminescent detection technology, preferred probe lengths can be, for example, about 15-80 nucleotides in length, preferably about 50-70 nucleotides in length, more preferably about 55-65 nucleotides in length, and most preferably about 60 nucleotides in length. The microarray or detection kit can contain polynucleotides that cover the known 5′ or 3′ sequence of a gene/transcript or target SNP site, sequential polynucleotides that cover the full-length sequence of a gene/transcript; or unique polynucleotides selected from particular areas along the length of a target gene/transcript sequence, particularly areas corresponding to one or more SNPs disclosed in Table 1 and/or Table 2. Polynucleotides used in the microarray or detection kit can be specific to a SNP or SNPs of interest (e.g., specific to a particular SNP allele at a target SNP site, or specific to particular SNP alleles at multiple different SNP sites), or specific to a polymorphic gene/transcript or genes/transcripts of interest.

[0182] Hybridization assays based on polynucleotide arrays rely on the differences in hybridization stability of the probes to perfectly matched and mismatched target sequence variants. For SNP genotyping, it is generally preferable that stringency conditions used in hybridization assays are high enough such that nucleic acid molecules that differ from one another at as little as a single SNP position can be differentiated (e.g., typical SNP hybridization assays are designed so that hybridization will occur only if one particular nucleotide is present at a SNP position, but will not occur if an alternative nucleotide is present at that SNP position). Such high stringency conditions may be preferable when using, for example, nucleic acid arrays of allele-specific probes for SNP detection. Such high stringency conditions are described in the preceding section, and are well known to those skilled in the art and can be found in, for example, Current Protocols in Molecular Biology, John Wiley & Sons, N.Y. (1989), 6.3.1-6.3.6.

[0183] In other embodiments, the arrays are used in conjunction with chemiluminescent detection technology. The following patents and patent applications, which are all hereby incorporated by reference, provide additional information pertaining to chemiluminescent detection: U.S. patent application Ser. Nos. 10/620332 and 10/620333 describe chemiluminescent approaches for microarray detection; U.S. Pat. Nos. 6,124,478, 6,107,024, 5,994,073, 5,981,768, 5,871,938, 5,843,681, 5,800,999, and 5,773,628 describe methods and compositions of dioxetane for performing chemiluminescent detection; and U.S. published application US2002/0110828 discloses methods and compositions for microarray controls.

[0184] In one embodiment of the invention, a nucleic acid array can comprise an array of probes of about 15-25 nucleotides in length. In further embodiments, a nucleic acid array can comprise any number of probes, in which at least one probe is capable of detecting one or more SNPs disclosed in Table 1 and/or Table 2, and/or at least one probe comprises a fragment of one of the sequences selected from the group consisting of those disclosed in Table 1, Table 2, the Sequence Listing, and sequences complementary thereto, said fragment comprising at least about 8 consecutive nucleotides, preferably 10, 12, 15, 16, 18, 20, more preferably 22, 25, 30, 40, 47, 50, 55, 60, 65, 70, 80, 90, 100, or more consecutive nucleotides (or any other number in-between) and containing (or being complementary to) a novel SNP allele disclosed in Table 1 and/or Table 2. In some embodiments, the nucleotide complementary to the SNP site is within 5, 4, 3, 2, or 1 nucleotide from the center of the probe, more preferably at the center of said probe.

[0185] A polynucleotide probe can be synthesized on the surface of the substrate by using a chemical coupling procedure and an ink jet application apparatus, as described in PCT application W095/251116 (Baldeschweiler et al.) which is incorporated herein in its entirety by reference. In another aspect, a “gridded” array analogous to a dot (or slot) blot may be used to arrange and link cDNA fragments or oligonucleotides to the surface of a substrate using a vacuum system, thermal, UV, mechanical or chemical bonding procedures. An array, such as those described above, may be produced by hand or by using available devices (slot blot or dot blot apparatus), materials (any suitable solid support), and machines (including robotic instruments), and may contain 8, 24, 96, 384, 1536, 6144 or more polynucleotides, or any other number which lends itself to the efficient use of commercially available instrumentation.

[0186] Using such arrays or other kits/systems, the present invention provides methods of identifying the SNPs disclosed herein in a test sample. Such methods typically involve incubating a test sample of nucleic acids with an array comprising one or more probes corresponding to at least one SNP position of the present invention, and assaying for binding of a nucleic acid from the test sample with one or more of the probes. Conditions for incubating a SNP detection reagent (or a kit/system that employs one or more such SNP detection reagents) with a test sample vary. Incubation conditions depend on such factors as the format employed in the assay, the detection methods employed, and the type and nature of the detection reagents used in the assay. One skilled in the art will recognize that any one of the commonly available hybridization, amplification and array assay formats can readily be adapted to detect the SNPs disclosed herein.

[0187] A SNP detection kit/system of the present invention may include components that are used to prepare nucleic acids from a test sample for the subsequent amplification and/or detection of a SNP-containing nucleic acid molecule. Such sample preparation components can be used to produce nucleic acid extracts (including DNA and/or RNA), proteins or membrane extracts from any bodily fluids (such as blood, serum, plasma, urine, saliva, phlegm, gastric juices, semen, tears, sweat, etc.), skin, hair, cells (especially nucleated cells), biopsies, buccal swabs or tissue specimens. The test samples used in the above-described methods will vary based on such factors as the assay format, nature of the detection method, and the specific tissues, cells or extracts used as the test sample to be assayed. Methods of preparing nucleic acids, proteins, and cell extracts are well known in the art and can be readily adapted to obtain a sample that is compatible with the system utilized. Automated sample preparation systems for extracting nucleic acids from a test sample are commercially available, and examples are Qiagen's BioRobot 9600, Applied Biosystems' PRISM 6700, and Roche Molecular Systems' COBAS AmpliPrep System.

[0188] Another form of kit contemplated by the present invention is a compartmentalized kit. A compartmentalized kit includes any kit in which reagents are contained in separate containers. Such containers include, for example, small glass containers, plastic containers, strips of plastic, glass or paper, or arraying material such as silica. Such containers allow one to efficiently transfer reagents from one compartment to another compartment such that the test samples and reagents are not cross-contaminated, or from one container to another vessel not included in the kit, and the agents or solutions of each container can be added in a quantitative fashion from one compartment to another or to another vessel. Such containers may include, for example, one or more containers which will accept the test sample, one or more containers which contain at least one probe or other SNP detection reagent for detecting one or more SNPs of the present invention, one or more containers which contain wash reagents (such as phosphate buffered saline, Tris-buffers, etc.), and one or more containers which contain the reagents used to reveal the presence of the bound probe or other SNP detection reagents. The kit can optionally further comprise compartments and/or reagents for, for example, nucleic acid amplification or other enzymatic reactions such as primer extension reactions, hybridization, ligation, electrophoresis (preferably capillary electrophoresis), mass spectrometry, and/or laser-induced fluorescent detection. The kit may also include instructions for using the kit. Exemplary compartmentalized kits include microfluidic devices known in the art (see, e.g., Weigl et al., “Lab-on-a-chip for drug development”, Adv Drug Deliv Rev. 2003 Feb. 24;55(3):349-77). In such microfluidic devices, the containers may be referred to as, for example, microfluidic “compartments”, “chambers”, or “channels”.

[0189] Microfluidic devices, which may also be referred to as “lab-on-a-chip” systems, biomedical micro-electro-mechanical systems (bioMEMs), or multicomponent integrated systems, are exemplary kits/systems of the present invention for analyzing SNPs. Such systems miniaturize and compartmentalize processes such as probe/target hybridization, nucleic acid amplification, and capillary electrophoresis reactions in a single functional device. Such microfluidic devices typically utilize detection reagents in at least one aspect of the system, and such detection reagents may be used to detect one or more SNPs of the present invention. One example of a microfluidic system is disclosed in U.S. Pat. No. 5,589,136, which describes the integration of PCR amplification and capillary electrophoresis in chips. Exemplary microfluidic systems comprise a pattern of microchannels designed onto a glass, silicon, quartz, or plastic wafer included on a microchip. The movements of the samples may be controlled by electric, electroosmotic or hydrostatic forces applied across different areas of the microchip to create functional microscopic valves and pumps with no moving parts. Varying the voltage can be used as a means to control the liquid flow at intersections between the micro-machined channels and to change the liquid flow rate for pumping across different sections of the microchip. See, for example, U.S. Pat. No. 6,153,073, Dubrow et al., and U.S. Pat. No. 6,156,181, Parce et al.

[0190] For genotyping SNPs, an exemplary microfluidic system may integrate, for example, nucleic acid amplification, primer extension, capillary electrophoresis, and a detection method such as laser induced fluorescence detection. In a first step of an exemplary process for using such an exemplary system, nucleic acid samples are amplified, preferably by PCR. Then, the amplification products are subjected to automated primer extension reactions using ddNTPs (specific fluorescence for each ddNTP) and the appropriate oligonucleotide primers to carry out primer extension reactions which hybridize just upstream of the targeted SNP. Once the extension at the 3′ end is completed, the primers are separated from the unincorporated fluorescent ddNTPs by capillary electrophoresis. The separation medium used in capillary electrophoresis can be, for example, polyacrylamide, polyethyleneglycol or dextran. The incorporated ddNTPs in the single nucleotide primer extension products are identified by laser-induced fluorescence detection. Such an exemplary microchip can be used to process, for example, at least 96 to 384 samples, or more, in parallel.

[0191] Uses of Nucleic Acid Molecules

[0192] The nucleic acid molecules of the present invention have a variety of uses, especially in the diagnosis and treatment of Alzheimer's disease. For example, the nucleic acid molecules are useful as hybridization probes, such as for genotyping SNPs in messenger RNA, transcript, cDNA, genomic DNA, amplified DNA or other nucleic acid molecules, and for isolating full-length cDNA and genomic clones encoding the variant peptides disclosed in Table 1 as well as their orthologs.

[0193] A probe can hybridize to any nucleotide sequence along the entire length of a nucleic acid molecule provided in Table 1 and/or Table 2. Preferably, a probe of the present invention hybridizes to a region of a target sequence that encompasses a SNP position indicated in Table 1 and/or Table 2. More preferably, a probe hybridizes to a SNP-containing target sequence in a sequence-specific manner such that it distinguishes the target sequence from other nucleotide sequences which vary from the target sequence only by which nucleotide is present at the SNP site. Such a probe is particularly useful for detecting the presence of a SNP-containing nucleic acid in a test sample, or for determining which nucleotide (allele) is present at a particular SNP site (i.e., genotyping the SNP site).

[0194] A nucleic acid hybridization probe may be used for determining the presence, level, form, and/or distribution of nucleic acid expression. The nucleic acid whose level is determined can be DNA or RNA. Accordingly, probes specific for the SNPs described herein can be used to assess the presence, expression and/or gene copy number in a given cell, tissue, or organism. These uses are relevant for diagnosis of disorders involving an increase or decrease in gene expression relative to normal levels. In vitro techniques for detection of mRNA include, for example, Northern blot hybridizations and in situ hybridizations. In vitro techniques for detecting DNA include Southern blot hybridizations and in situ hybridizations (Sambrook and Russell, 2000, Molecular Cloning: A Laboratory Manual, Cold Spring Harbor Press, Cold Spring Harbor, N.Y.).

[0195] Probes can be used as part of a diagnostic test kit for identifying cells or tissues in which a variant protein is expressed, such as by measuring the level of a variant protein-encoding nucleic acid (e.g., mRNA) in a sample of cells from a subject or determining if a polynucleotide contains a SNP of interest.

[0196] Thus, the nucleic acid molecules of the invention can be used as hybridization probes to detect the SNPs disclosed herein, thereby determining whether an individual with the polymorphisms is at risk for Alzheimer's disease or has developed early stage Alzheimer's disease. Detection of a SNP associated with a disease phenotype provides a diagnostic tool for an active disease and/or genetic predisposition to the disease.

[0197] The nucleic acid molecules of the invention are also useful as primers to amplify any given region of a nucleic acid molecule, particularly a region containing a SNP identified in Table 1 and/or Table 2.

[0198] The nucleic acid molecules of the invention are also useful for constructing recombinant vectors (described in greater detail below). Such vectors include expression vectors that express a portion of, or all of, any of the variant peptide sequences provided in Table 1. Vectors also include insertion vectors, used to integrate into another nucleic acid molecule sequence, such as into the cellular genome, to alter in situ expression of a gene and/or gene product. For example, an endogenous coding sequence can be replaced via homologous recombination with all or part of the coding region containing one or more specifically introduced SNPs.

[0199] The nucleic acid molecules of the invention are also useful for expressing antigenic portions of the variant proteins, particularly antigenic portions that contain a variant amino acid sequence (e.g., an amino acid substitution) caused by a SNP disclosed in Table 1 and/or Table 2.

[0200] The nucleic acid molecules of the invention are also useful for constructing vectors containing a gene regulatory region of the nucleic acid molecules of the present invention.

[0201] The nucleic acid molecules of the invention are also useful for designing ribozymes corresponding to all, or a part, of an mRNA molecule expressed from a SNP-containing nucleic acid molecule described herein.

[0202] The nucleic acid molecules of the invention are also useful for constructing host cells expressing a part, or all, of the nucleic acid molecules and variant peptides.

[0203] The nucleic acid molecules of the invention are also useful for constructing transgenic animals expressing all, or a part, of the nucleic acid molecules and variant peptides. The production of recombinant cells and transgenic animals having nucleic acid molecules which contain the SNPs disclosed in Table 1 and/or Table 2 allow, for example, effective clinical design of treatment compounds and dosage regimens.

[0204] The nucleic acid molecules of the invention are also useful in assays for drug screening to identify compounds that, for example, modulate nucleic acid expression.

[0205] The nucleic acid molecules of the invention are also useful in gene therapy in patients whose cells have aberrant gene expression. Thus, recombinant cells, which include a patient's cells that have been engineered ex vivo and returned to the patient, can be introduced into an individual where the recombinant cells produce the desired protein to treat the individual.

[0206] SNP Genotyping Methods

[0207] The process of determining which specific nucleotide (i.e., allele) is present at each of one or more SNP positions, such as a SNP position in a nucleic acid molecule disclosed in Table 1 and/or Table 2, is referred to as SNP genotyping. The present invention provides methods of SNP genotyping, such as for use in screening for Alzheimer's disease or related pathologies, or determining predisposition thereto, or determining responsiveness to a form of treatment, or in genome mapping or SNP association analysis, etc.

[0208] Nucleic acid samples can be genotyped to determine which allele(s) is/are present at any given genetic region (e.g., SNP position) of interest by methods well known in the art. The neighboring sequence can be used to design SNP detection reagents such as oligonucleotide probes, which may optionally be implemented in a kit format. Exemplary SNP genotyping methods are described in Chen et al., “Single nucleotide polymorphism genotyping: biochemistry, protocol, cost and throughput”, Pharmacogenomics J. 2003;3(2):77-96; Kwok et al., “Detection of single nucleotide polymorphisms”, Curr Issues Mol Biol. April 2003;5(2):43-60; Shi, “Technologies for individual genotyping: detection of genetic polymorphisms in drug targets and disease genes”, Am J Pharmacogenomics. 2002;2(3): 197-205; and Kwok, “Methods for genotyping single nucleotide polymorphisms”, Annu Rev Genomics Hum Genet 2001;2:235-58. Exemplary techniques for high-throughput SNP genotyping are described in Marnellos, “High-throughput SNP analysis for genetic association studies”, Curr Opin Drug Discov Devel. May 2003;6(3):317-21. Common SNP genotyping methods include, but are not limited to, TaqMan assays, molecular beacon assays, nucleic acid arrays, allele-specific primer extension, allele-specific PCR, arrayed primer extension, homogeneous primer extension assays, primer extension with detection by mass spectrometry, pyrosequencing, multiplex primer extension sorted on genetic arrays, ligation with rolling circle amplification, homogeneous ligation, OLA (U.S. Pat. No. 4,988,167), multiplex ligation reaction sorted on genetic arrays, restriction-fragment length polymorphism, single base extension-tag assays, and the Invader assay. Such methods may be used in combination with detection mechanisms such as, for example, luminescence or chemiluminescence detection, fluorescence detection, time-resolved fluorescence detection, fluorescence resonance energy transfer, fluorescence polarization, mass spectrometry, and electrical detection.

[0209] Various methods for detecting polymorphisms include, but are not limited to, methods in which protection from cleavage agents is used to detect mismatched bases in RNA/RNA or RNA/DNA duplexes (Myers et al., Science 230:1242 (1985); Cotton et al., PNAS 85:4397 (1988); and Saleeba et al., Meth. Enzymol. 217:286-295 (1992)), comparison of the electrophoretic mobility of variant and wild type nucleic acid molecules (Orita et al., PNAS 86:2766 (1989); Cotton et al., Mutat. Res. 285:125-144 (1993); and Hayashi et al., Genet. Anal. Tech. Appl. 9:73-79 (1992)), and assaying the movement of polymorphic or wild-type fragments in polyacrylamide gels containing a gradient of denaturant using denaturing gradient gel electrophoresis (DGGE) (Myers et al., Nature 313:495 (1985)). Sequence variations at specific locations can also be assessed by nuclease protection assays such as RNase and S1 protection or chemical cleavage methods.

[0210] In a preferred embodiment, SNP genotyping is performed using the TaqMan assay, which is also known as the 5′ nuclease assay (U.S. Pat. Nos. 5,210,015 and 5,538,848). The TaqMan assay detects the accumulation of a specific amplified product during PCR. The TaqMan assay utilizes an oligonucleotide probe labeled with a fluorescent reporter dye and a quencher dye. The reporter dye is excited by irradiation at an appropriate wavelength, it transfers energy to the quencher dye in the same probe via a process called fluorescence resonance energy transfer (FRET). When attached to the probe, the excited reporter dye does not emit a signal. The proximity of the quencher dye to the reporter dye in the intact probe maintains a reduced fluorescence for the reporter. The reporter dye and quencher dye may be at the 5′ most and the 3′ most ends, respectively or vice versa. Alternativey, the reporter dye may be at the 5′ or 3′ most end while the quencher dye is attached to an internal nucleotide, or vice versa. In yet another embodiment, both the reporter and the quencher may be attached to internal nucleotides at a distance from each other such that fluorescence of the reporter is reduced.

[0211] During PCR, the 5′ nuclease activity of DNA polymerase cleaves the probe, thereby separating the reporter dye and the quencher dye and resulting in increased fluorescence of the reporter. Accumulation of PCR product is detected directly by monitoring the increase in fluorescence of the reporter dye. The DNA polymerase cleaves the probe between the reporter dye and the quencher dye only if the probe hybridizes to the target SNP-containing template which is amplified during PCR, and the probe is designed to hybridize to the target SNP site only if a particular SNP allele is present.

[0212] Preferred TaqMan primer and probe sequences can readily be determined using the SNP and associated nucleic acid sequence information provided herein. A number of computer programs, such as Primer Express (Applied Biosystems, Foster City, Calif.), can be used to rapidly obtain optimal primer/probe sets. It will be apparent to one of skill in the art that such primers and probes for detecting the SNPs of the present invention are useful in diagnostic assays for Alzheimer's disease and related pathologies, and can be readily incorporated into a kit format. The present invention also includes modifications of the Taqman assay well known in the art such as the use of Molecular Beacon probes (U.S. Pat. Nos. 5,118,801 and 5,312,728) and other variant formats (U.S. Pat. Nos. 5,866,336 and 6,117,635).

[0213] Another preferred method for genotyping the SNPs of the present invention is the use of two oligonucleotide probes in an OLA (see, e.g., U.S. Pat. No. 4,988,617). In this method, one probe hybridizes to a segment of a target nucleic acid with its 3′ most end aligned with the SNP site. A second probe hybridizes to an adjacent segment of the target nucleic acid molecule directly 3′ to the first probe. The two juxtaposed probes hybridize to the target nucleic acid molecule, and are ligated in the presence of a linking agent such as a ligase if there is perfect complementarity between the 3′ most nucleotide of the first probe with the SNP site. If there is a mismatch, ligation would not occur. After the reaction, the ligated probes are separated from the target nucleic acid molecule, and detected as indicators of the presence of a SNP.

[0214] The following patents, patent applications, and published international patent applications, which are all hereby incorporated by reference, provide additional information pertaining to techniques for carrying out various types of OLA: U.S. Pat. Nos. 6,027,889, 6,268,148, 5,494,810, 5,830,711, and 6,054,564 describe OLA strategies for performing SNP detection; WO 97/31256 and WO 00/56927 describe OLA strategies for performing SNP detection using universal arrays, wherein a zipcode sequence can be introduced into one of the hybridization probes, and the resulting product, or amplified product, hybridized to a universal zip code array; U.S. application Ser. Nos. 01/17329 (and 09/584,905) describes OLA (or LDR) followed by PCR, wherein zipcodes are incorporated into OLA probes, and amplified PCR products are determined by electrophoretic or universal zipcode array readout; U.S. applications 60/427818, 60/445636, and 60/445494 describe SNPlex methods and software for multiplexed SNP detection using OLA followed by PCR, wherein zipcodes are incorporated into OLA probes, and amplified PCR products are hybridized with a zipchute reagent, and the identity of the SNP determined from electrophoretic readout of the zipchute. In some embodiments, OLA is carried out prior to PCR (or another method of nucleic acid amplification). In other embodiments, PCR (or another method of nucleic acid amplification) is carried out prior to OLA.

[0215] Another method for SNP genotyping is based on mass spectrometry. Mass spectrometry takes advantage of the unique mass of each of the four nucleotides of DNA. SNPs can be unambiguously genotyped by mass spectrometry by measuring the differences in the mass of nucleic acids having alternative SNP alleles. MALDI-TOF (Matrix Assisted Laser Desorption Ionization—Time of Flight) mass spectrometry technology is preferred for extremely precise determinations of molecular mass, such as SNPs. Numerous approaches to SNP analysis have been developed based on mass spectrometry. Preferred mass spectrometry-based methods of SNP genotyping include primer extension assays, which can also be utilized in combination with other approaches, such as traditional gel-based formats and microarrays.

[0216] Typically, the primer extension assay involves designing and annealing a primer to a template PCR amplicon upstream (5′) from a target SNP position. A mix of dideoxynucleotide triphosphates (ddNTPs) and/or deoxynucleotide triphosphates (dNTPs) are added to a reaction mixture containing template (e.g., a SNP-containing nucleic acid molecule which has typically been amplified, such as by PCR), primer, and DNA polymerase. Extension of the primer terminates at the first position in the template where a nucleotide complementary to one of the ddNTPs in the mix occurs. The primer can be either immediately adjacent (i.e., the nucleotide at the 3′ end of the primer hybridizes to the nucleotide next to the target SNP site) or two or more nucleotides removed from the SNP position. If the primer is several nucleotides removed from the target SNP position, the only limitation is that the template sequence between the 3′ end of the primer and the SNP position cannot contain a nucleotide of the same type as the one to be detected, or this will cause premature termination of the extension primer. Alternatively, if all four ddNTPs alone, with no dNTPs, are added to the reaction mixture, the primer will always be extended by only one nucleotide, corresponding to the target SNP position. In this instance, primers are designed to bind one nucleotide upstream from the SNP position (i.e., the nucleotide at the 3′ end of the primer hybridizes to the nucleotide that is immediately adjacent to the target SNP site on the 5′ side of the target SNP site). Extension by only one nucleotide is preferable, as it minimizes the overall mass of the extended primer, thereby increasing the resolution of mass differences between alternative SNP nucleotides. Furthermore, mass-tagged ddNTPs can be employed in the primer extension reactions in place of unmodified ddNTPs. This increases the mass difference between primers extended with these ddNTPs, thereby providing increased sensitivity and accuracy, and is particularly useful for typing heterozygous base positions. Mass-tagging also alleviates the need for intensive sample-preparation procedures and decreases the necessary resolving power of the mass spectrometer.

[0217] The extended primers can then be purified and analyzed by MALDI-TOF mass spectrometry to determine the identity of the nucleotide present at the target SNP position. In one method of analysis, the products from the primer extension reaction are combined with light absorbing crystals that form a matrix. The matrix is then hit with an energy source such as a laser to ionize and desorb the nucleic acid molecules into the gas-phase. The ionized molecules are then ejected into a flight tube and accelerated down the tube towards a detector. The time between the ionization event, such as a laser pulse, and collision of the molecule with the detector is the time of flight of that molecule. The time of flight is precisely correlated with the mass-to-charge ratio (m/z) of the ionized molecule. Ions with smaller m/z travel down the tube faster than ions with larger m/z and therefore the lighter ions reach the detector before the heavier ions. The time-of-flight is then converted into a corresponding, and highly precise, m/z. In this manner, SNPs can be identified based on the slight differences in mass, and the corresponding time of flight differences, inherent in nucleic acid molecules having different nucleotides at a single base position. For further information regarding the use of primer extension assays in conjunction with MALDI-TOF mass spectrometry for SNP genotyping, see, e.g., Wise et al., “A standard protocol for single nucleotide primer extension in the human genome using matrix-assisted laser desorption/ionization time-of-flight mass spectrometry”, Rapid Commun Mass Spectrom. 2003;17(11):1195-202.

[0218] The following references provide further information describing mass spectrometry-based methods for SNP genotyping: Bocker, “SNP and mutation discovery using base-specific cleavage and MALDI-TOF mass spectrometry”, Bioinformatics. July 2003;19 Suppl 1:I44-I53; Storm et al., “MALDI-TOF mass spectrometry-based SNP genotyping”, Methods Mol Biol. 2003;212:241-62; Jurinke et al., “The use of MassARRAY technology for high throughput genotyping”, Adv Biochem Eng Biotechnol. 2002;77:57-74; and Jurinke et al., “Automated genotyping using the DNA MassArray technology”, Methods Mol Biol. 2002; 187:179-92.

[0219] SNPs can also be scored by direct DNA sequencing. A variety of automated sequencing procedures can be utilized ((1995) Biotechniques 19:448), including sequencing by mass spectrometry (see, e.g., PCT International Publication No. W094/16101; Cohen et al., Adv. Chromatogr. 36:127-162 (1996); and Griffin et al., Appl. Biochem. Biotechnol. 38:147-159 (1993)). The nucleic acid sequences of the present invention enable one of ordinary skill in the art to readily design sequencing primers for such automated sequencing procedures. Commercial instrumentation, such as the Applied Biosystems 377, 3100, 3700, 3730, and 3730x1 DNA Analyzers (Foster City, Calif.), is commonly used in the art for automated sequencing.

[0220] Other methods that can be used to genotype the SNPs of the present invention include single-strand conformational polymorphism (SSCP), and denaturing gradient gel electrophoresis (DGGE) (Myers et al., Nature 313:495 (1985)). SSCP identifies base differences by alteration in electrophoretic migration of single stranded PCR products, as described in Orita et al., Proc. Nat. Acad. Single-stranded PCR products can be generated by heating or otherwise denaturing double stranded PCR products. Single-stranded nucleic acids may refold or form secondary structures that are partially dependent on the base sequence. The different electrophoretic mobilities of single-stranded amplification products are related to base-sequence differences at SNP positions. DGGE differentiates SNP alleles based on the different sequence-dependent stabilities and melting properties inherent in polymorphic DNA and the corresponding differences in electrophoretic migration patterns in a denaturing gradient gel (Erlich, ed., PCR Technology, Principles and Applications for DNA Amplification, W. H. Freeman and Co, New York, 1992, Chapter 7).

[0221] Sequence-specific ribozymes (U.S. Pat. No. 5,498,531) can also be used to score SNPs based on the development or loss of a ribozyme cleavage site. Perfectly matched sequences can be distinguished from mismatched sequences by nuclease cleavage digestion assays or by differences in melting temperature. If the SNP affects a restriction enzyme cleavage site, the SNP can be identified by alterations in restriction enzyme digestion patterns, and the corresponding changes in nucleic acid fragment lengths determined by gel electrophoresis SNP genotyping can include the steps of, for example, collecting a biological sample from a human subject (e.g., sample of tissues, cells, fluids, secretions, etc.), isolating nucleic acids (e.g., genomic DNA, mRNA or both) from the cells of the sample, contacting the nucleic acids with one or more primers which specifically hybridize to a region of the isolated nucleic acid containing a target SNP under conditions such that hybridization and amplification of the target nucleic acid region occurs, and determining the nucleotide present at the SNP position of interest, or, in some assays, detecting the presence or absence of an amplification product (assays can be designed so that hybridization and/or amplification will only occur if a particular SNP allele is present or absent). In some assays, the size of the amplification product is detected and compared to the length of a control sample; for example, deletions and insertions can be detected by a change in size of the amplified product compared to a normal genotype.

[0222] SNP genotyping is useful for numerous practical applications, as described below. Examples of such applications include, but are not limited to, SNP-disease association analysis, disease predisposition screening, disease diagnosis, disease prognosis, disease progression monitoring, determining therapeutic strategies based on an individual's genotype (“pharmacogenomics”), developing therapeutic agents based on SNP genotypes associated with a disease or likelihood of responding to a drug, stratifying a patient population for clinical trial for a treatment regimen, predicting the likelihood that an individual will experience toxic side effects from a therapeutic agent, and human identification applications such as forensics.

[0223] Analysis of Genetic Association Between SNPs and Phenotypic Traits

[0224] SNP genotyping for disease diagnosis, disease predisposition screening, disease prognosis, determining drug responsiveness (pharmacogenomics), drug toxicity screening, and other uses described herein, typically relies on initially establishing a genetic association between one or more specific SNPs and the particular phenotypic traits of interest.

[0225] Different study designs may be used for genetic association studies (Modern Epidemiology, Lippincott Williams & Wilkins (1998), 609-622). Observational studies are most frequently carried out in which the response of the patients is not interfered with. The first type of observational study identifies a sample of persons in whom the suspected cause of the disease is present and another sample of persons in whom the suspected cause is absent, and then the frequency of development of disease in the two samples is compared. These sampled populations are called cohorts, and the study is a prospective study. The other type of observational study is case-control or a retrospective study. In typical case-control studies, samples are collected from individuals with the phenotype of interest (cases) such as certain manifestations of a disease, and from individuals without the phenotype (controls) in a population (target population) that conclusions are to be drawn from. Then the possible causes of the disease are investigated retrospectively. As the time and costs of collecting samples in case-control studies are considerably less than those for prospective studies, case-control studies are the more commonly used study design in genetic association studies, at least during the exploration and discovery stage.

[0226] In both types of observational studies, there may be potential confounding factors that should be taken into consideration. Confounding factors are those that are associated with both the real cause(s) of the disease and the disease itself, and they include demographic information such as age, gender, ethnicity as well as environmental factors. When confounding factors are not matched in cases and controls in a study, and are not controlled properly, spurious association results can arise. If potential confounding factors are identified, they should be controlled for by analysis methods explained below.

[0227] In a genetic association study, the cause of interest to be tested is a certain allele or a SNP or a combination of alleles or a haplotype from several SNPs. Thus, tissue specimens (e.g., whole blood) from the sampled individuals may be collected and genomic DNA genotyped for the SNP(s) of interest. In addition to the phenotypic trait of interest, other information such as demographic (e.g., age, gender, ethnicity, etc.), clinical, and environmental information that may influence the outcome of the trait can be collected to further characterize and define the sample set. In many cases, these factors are known to be associated with diseases and/or SNP allele frequencies. There are likely gene-environment and/or gene-gene interactions as well. Analysis methods to address gene-environment and gene-gene interactions (for example, the effects of the presence of both susceptibility alleles at two different genes can be greater than the effects of the individual alleles at two genes combined) are discussed below.

[0228] After all the relevant phenotypic and genotypic information has been obtained, statistical analyses are carried out to determine if there is any significant correlation between the presence of an allele or a genotype with the phenotypic characteristics of an individual. Preferably, data inspection and cleaning are first performed before carrying out statistical tests for genetic association. Epidemiological and clinical data of the samples can be summarized by descriptive statistics with tables and graphs. Data validation is preferably performed to check for data completion, inconsistent entries, and outliers. Chi-squared tests and t-tests (Wilcoxon rank-sum tests if distributions are not normal) may then be used to check for significant differences between cases and controls for discrete and continuous variables, respectively. To ensure genotyping quality, Hardy-Weinberg disequilibrium tests can be performed on cases and controls separately. Significant deviation from Hardy-Weinberg equilibrium (HWE) in both cases and controls for individual markers can be indicative of genotyping errors. If HWE is violated in a majority of markers, it is indicative of population substructure that should be further investigated. Moreover, Hardy-Weinberg disequilibrium in cases only can indicate genetic association of the markers with the disease (Genetic Data Analysis, Weir B., Sinauer (1990)).

[0229] To test whether an allele of a single SNP is associated with the case or control status of a phenotypic trait, one skilled in the art can compare allele frequencies in cases and controls. Standard chi-squared tests and Fisher exact tests can be carried out on a 2×2 table (2 SNP alleles×2 outcomes in the categorical trait of interest). To test whether genotypes of a SNP are associated, chi-squared tests can be carried out on a 3×2 table (3 genotypes×2 outcomes). Score tests are also carried out for genotypic association to contrast the three genotypic frequencies (major homozygotes, heterozygotes and minor homozygotes) in cases and controls, and to look for trends using 3 different modes of inheritance, namely dominant (with contrast coefficients 2, −1, −1), additive (with contrast coefficients 1, 0, −1) and recessive (with contrast coefficients 1, 1, −2). Odds ratios for minor versus major alleles, and odds ratios for heterozygote and homozygote variants versus the wild type genotypes are calculated with the desired confidence limits, usually 95%.

[0230] In order to control for confounders and to test for interaction and effect modifiers, stratified analyses may be performed using stratified factors that are likely to be confounding, including demographic information such as age, ethnicity, and gender, or an interacting element or effect modifier, such as a known major gene (e.g., APOE for Alzheimer's disease or HLA genes for autoimmune diseases), or environmental factors such as smoking in lung cancer. Stratified association tests may be carried out using Cochran-Mantel-Haenszel tests that take into account the ordinal nature of genotypes with 0, 1, and 2 variant alleles. Exact tests by StatXact may also be performed when computationally possible. Another way to adjust for confounding effects and test for interactions is to perform stepwise multiple logistic regression analysis using statistical packages such as SAS or R. Logistic regression is a model-building technique in which the best fitting and most parsimonious model is built to describe the relation between the dichotomous outcome (for instance, getting a certain disease or not) and a set of independent variables (for instance, genotypes of different associated genes, and the associated demographic and environmental factors). The most common model is one in which the logit transformation of the odds ratios is expressed as a linear combination of the variables (main effects) and their cross-product terms (interactions) (Applied Logistic Regression, Hosmer and Lemeshow, Wiley (2000)). To test whether a certain variable or interaction is significantly associated with the outcome, coefficients in the model are first estimated and then tested for statistical significance of their departure from zero.

[0231] In addition to performing association tests one marker at a time, haplotype association analysis may also be performed to study a number of markers that are closely linked together. Haplotype association tests can have better power than genotypic or allelic association tests when the tested markers are not the disease-causing mutations themselves but are in linkage disequilibrium with such mutations. The test will even be more powerful if the disease is indeed caused by a combination of alleles on a haplotype (e.g., APOE is a haplotype formed by 2 SNPs that are very close to each other). In order to perform haplotype association effectively, marker-marker linkage disequilibrium measures, both D′ and R², are typically calculated for the markers within a gene to elucidate the haplotype structure. Recent studies (Daly et al, Nature Genetics, 29, 232-235, 2001) in linkage disequilibrium indicate that SNPs within a gene are organized in block pattern, and a high degree of linkage disequilibrium exists within blocks and very little linkage disequilibrium exists between blocks. Haplotype association with the disease status can be performed using such blocks once they have been elucidated.

[0232] Haplotype association tests can be carried out in a similar fashion as the allelic and genotypic association tests. Each haplotype in a gene is analogous to an allele in a multi-allelic marker. One skilled in the art can either compare the haplotype frequencies in cases and controls or test genetic association with different pairs of haplotypes. It has been proposed (Schaid et al, Am. J. Hum. Genet., 70,425-434, 2002) that score tests can be done on haplotypes using the program “haplo.score”. In that method, haplotypes are first inferred by EM algorithm and score tests are carried out with a generalized linear model (GLM) framework that allows the adjustment of other factors.

[0233] An important decision in the performance of genetic association tests is the determination of the significance level at which significant association can be declared when the p-value of the tests reaches that level. In an exploratory analysis where positive hits will be followed up in subsequent confirmatory testing, an unadjusted p-value<0.1 (a significance level on the lenient side) may be used for generating hypotheses for significant association of a SNP with certain phenotypic characteristics of a disease. It is preferred that a p-value<0.05 (a significance level traditionally used in the art) is achieved in order for a SNP to be considered to have an association with a disease. It is more preferred that a p-value<0.01 (a significance level on the stringent side) is achieved for an association to be declared. When hits are followed up in confirmatory analyses in more samples of the same source or in different samples from different sources, adjustment for multiple testing will be performed as to avoid excess number of hits while maintaining the experiment-wise error rates at 0.05. While there are different methods to adjust for multiple testing to control for different kinds of error rates, a commonly used but rather conservative method is Bonferroni correction to control the experiment-wise or family-wise error rate (Multiple comparisons and multiple tests, Westfall et al, SAS Institute (1999)). Permutation tests to control for the false discovery rates, FDR, can be more powerful (Benjamini and Hochberg, Journal of the Royal Statistical Society, Series B 57, 1289-1300, 1995, Resampling-based Multiple Testing, Westfall and Young, Wiley (1993)). Such methods to control for multiplicity would be preferred when the tests are dependent and controlling for false discovery rates is sufficient as opposed to controlling for the experiment-wise error rates.

[0234] In replication studies using samples from different populations after statistically significant markers have been identified in the exploratory stage, meta-analyses can then be performed by combining evidence of different studies (Modern Epidemiology, Lippincott Williams & Wilkins, 1998, 643-673). If available, association results known in the art for the same SNPs can be included in the meta-analyses.

[0235] Since both genotyping and disease status classification can involve errors, sensitivity analyses may be performed to see how odds ratios and p-values would change upon various estimates on genotyping and disease classification error rates.

[0236] It has been well known that subpopulation-based sampling bias between cases and controls can lead to spurious results in case-control association studies (Ewens and Spielman, Am. J. Hum. Genet. 62, 450-458, 1995) when prevalence of the disease is associated with different subpopulation groups. Such bias can also lead to a loss of statistical power in genetic association studies. To detect population stratification, Pritchard and Rosenberg (Pritchard et al. Am. J. Hum. Gen. 1999, 65:220-228) suggested typing markers that are unlinked to the disease and using results of association tests on those markers to determine whether there is any population stratification. When stratification is detected, the genomic control (GC) method as proposed by Devlin and Roeder (Devlin et al. Biometrics 1999, 55:997-1004) can be used to adjust for the inflation of test statistics due to population stratification. GC method is robust to changes in population structure levels as well as being applicable to DNA pooling designs (Devlin et al. Genet. Epidem. 20001, 21:273-284).

[0237] While Pritchard's method recommended using 15-20 unlinked microsatellite markers, it suggested using more than 30 biallelic markers to get enough power to detect population stratification. For the GC method, it has been shown (Bacanu et al. Am. J. Hum. Genet. 2000, 66:1933-1944) that about 60-70 biallelic markers are sufficient to, estimate the inflation factor for the test statistics due to population stratification. Hence, 70 intergenic SNPs can be chosen in unlinked regions as indicated in a genome scan (Kehoe et al. Hum. Mol. Genet. 1999, 8:237-245).

[0238] Once individual risk factors, genetic or non-genetic, have been found for the predisposition to disease, the next step is to set up a classification/prediction scheme to predict the category (for instance, disease or no-disease) that an individual will be in depending on his genotypes of associated SNPs and other non-genetic risk factors. Logistic regression for discrete trait and linear regression for continuous trait are standard techniques for such tasks (Applied Regression Analysis, Draper and Smith, Wiley (1998)). Moreover, other techniques can also be used for setting up classification. Such techniques include, but are not limited to, MART, CART, neural network, and discriminant analyses that are suitable for use in comparing the performance of different methods (The Elements of Statistical Learning, Hastie, Tibshirani & Friedman, Springer (2002)).

[0239] Disease Diagnosis and Predisposition Screening

[0240] Information on association/correlation between genotypes and disease-related phenotypes can be exploited in several ways. For example, in the case of a highly statistically significant association between one or more SNPs with predisposition to a disease for which treatment is available, detection of such a genotype pattern in an individual may justify immediate administration of treatment, or at least the institution of regular monitoring of the individual. Detection of the susceptibility alleles associated with serious disease in a couple contemplating a family may also be valuable to the couple in their reproductive decisions. In the case of a weaker but still statistically significant association between a SNP and a human disease, immediate therapeutic intervention or monitoring may not be justified after detecting the susceptibility allele or SNP. Nevertheless, the subject can be motivated to begin simple life-style changes (e.g., diet, exercise) that can be accomplished at little or no cost to the individual but would confer potential benefits in reducing the risk of developing conditions for which that individual may have an increased risk by virtue of having the susceptibility alleles.

[0241] The SNPs of the invention may contribute to Alzheimer's disease in an individual in different ways. Some polymorphisms occur within a protein coding sequence and contribute to disease phenotype by affecting protein structure. Other polymorphisms occur in noncoding regions but may exert phenotypic effects indirectly via influence on replication, transcription, and/or translation. A single SNP may affect more than one phenotypic trait. Likewise, a single phenotypic trait may be affected by multiple SNPs in different genes.

[0242] As used herein, the terms “diagnose”, “diagnosis”, and “diagnostics” include, but are not limited to any of the following: detection of Alzheimer's disease that an individual may presently have, predisposition screening (i.e., determining the increased risk of an individual in developing Alzheimer's disease in the future, or determining whether an individual has a decreased risk of developing Alzheimer's disease in the future), determining a particular type or subclass of Alzheimer's disease in an individual known to have Alzheimer's disease, confirming or reinforcing a previously made diagnosis of Alzheimer's disease, pharmacogenomic evaluation of an individual to determine which therapeutic strategy that individual is most likely to positively respond to or to predict whether a patient is likely to respond to a particular treatment, predicting whether a patient is likely to experience toxic effects from a particular treatment or therapeutic compound, and evaluating the future prognosis of an individual having Alzheimer's disease. Such diagnostic uses are based on the SNPs individually or in a unique combination or SNP haplotypes of the present invention.

[0243] Haplotypes are particularly useful in that, for example, fewer SNPs can be genotyped to determine if a particular genomic region harbors a locus that influences a particular phenotype, such as in linkage disequilibrium (LD)-based SNP association analysis. LD refers to the co-inheritance of alleles (e.g., alternative nucleotides) at two or more different SNP sites at frequencies greater than would be expected from the separate frequencies of occurrence of each allele in a given population. The expected frequency of occurrence of two alleles that are inherited independently is the frequency of the first allele multiplied by the frequency of the second allele. Alleles that co-occur at expected frequencies are said to be in “linkage equilibrium”. In contrast, LD refers to any non-random genetic association between allele(s) at two or more different SNP sites, which is generally due to the physical proximity of the two loci along a chromosome. LD can occur when two or more SNPs sites are in close physical proximity to each other on a given chromosome and therefore alleles at these SNP sites will tend to remain unseparated for multiple generations with the consequence that a particular nucleotide (allele) at one SNP site will show a non-random association with a particular nucleotide (allele) at a different SNP site located nearby. Hence, genotyping one of the SNP sites will give almost the same information as genotyping the other SNP site that is in LD.

[0244] For diagnostic purposes, if a particular SNP site is found to be useful for diagnosing Alzheimer's disease, then the skilled artisan would recognize that other SNP sites which are in LD with this SNP site would also be useful for diagnosing the condition. Various degrees of LD can be encountered between two or more SNPs with the result being that some SNPs are more closely associated (i.e., in stronger LD) than others. Furthermore, the physical distance over which LD extends along a chromosome differs between different regions of the genome, and therefore the degree of physical separation between two or more SNP sites necessary for LD to occur can differ between different regions of the genome.

[0245] For diagnostic applications, polymorphisms (e.g., SNPs and/or haplotypes) that are not the actual disease-causing (causative) polymorphisms, but are in LD with such causative polymorphisms, are also useful. In such instances, the genotype of the polymorphism(s) that is/are in LD with the causative polymorphism is predictive of the genotype of the causative polymorphism and, consequently, predictive of the phenotype (e.g., Alzheimer's disease) that is influenced by the causative SNP(s). Thus, polymorphic markers that are in LD with causative polymorphisms are useful as diagnostic markers, and are particularly useful when the actual causative polymorphism(s) is/are unknown.

[0246] The contribution or association of particular SNPs and/or SNP haplotypes with disease phenotypes, such as Alzheimer's disease, enables the SNPs of the present invention to be used to develop superior diagnostic tests capable of identifying individuals who express a detectable trait, such as Alzheimer's disease, as the result of a specific genotype, or individuals whose genotype places them at an increased or decreased risk of developing a detectable trait at a subsequent time as compared to individuals who do not have that genotype. As described herein, diagnostics may be based on a single SNP or a group of SNPs. Combined detection of a plurality of SNPs (for example, 2, 3,4, 5, 6, 7, 8, 9, 10, 11, 12, 13, 14, 15, 16, 17, 18, 19, 20, 25, 30, 50, 100, or any other number in-between, or more, of the SNPs provided in Table 1 and/or Table 2) typically increases the probability of an accurate diagnosis. For example, the presence of a single SNP known to correlate with Alzheimer's disease might indicate a probability of 20% that an individual has or is at risk of developing Alzheimer's disease, whereas detection of five SNPs, each of which correlates with Alzheimer's disease, might indicate a probability of 80% that an individual has or is at risk of developing Alzheimer's disease. To further increase the accuracy of diagnosis or predisposition screening, analysis of the SNPs of the present invention can be combined with that of other polymorphisms or other risk factors of Alzheimer's disease, such as family history, diet, environmental factors or lifestyle factors.

[0247] It will, of course, be understood by practitioners skilled in the treatment or diagnosis of Alzheimer's disease that the present invention generally does not intend to provide an absolute identification of individuals who are at risk (or less at risk) of developing Alzheimer's disease, and/or pathologies related to Alzheimer's disease, but rather to indicate a certain increased (or decreased) degree or likelihood of developing the disease based on statistically significant association results. However, this information is extremely valuable as it can, in certain circumstances, be used to initiate preventive treatments or to allow an individual carrying one or more significant SNPs or SNP haplotypes to foresee warning signs such as minor clinical symptoms. Particularly with diseases that are extremely debilitating or fatal if not treated on time, the knowledge of a potential predisposition, even if this predisposition is not absolute, would likely contribute in a very significant manner to treatment efficacy.

[0248] The diagnostic techniques of the present invention may employ a variety of methodologies to determine whether a test subject has a SNP or a SNP pattern associated with an increased or decreased risk of developing a detectable trait or whether the individual suffers from a detectable trait as a result of a particular mutation, including methods which enable the analysis of individual chromosomes for haplotyping, family studies, single sperm DNA analysis, or somatic hybrids. The trait analyzed using the diagnostics of the invention may be any detectable trait that is commonly observed in pathologies and disorders related to Alzheimer's disease.

[0249] Another aspect of the present invention relates to a method of determining whether an individual is at risk (or less at risk) of developing one or more traits or whether an individual expresses one or more traits as a consequence of possessing a particular trait-causing or trait-influencing allele. These methods generally involve obtaining a nucleic acid sample from an individual and assaying the nucleic acid sample to determine which nucleotide(s) is/are present at one or more SNP positions, wherein the assayed nucleotide(s) is/are indicative of an increased or decreased risk of developing the trait or indicative that the individual expresses the trait as a result of possessing a particular trait-causing or trait-influencing allele.

[0250] In another embodiment, the SNP detection reagents of the present invention are used to determine whether an individual has one or more SNP allele(s) affecting the level (i.e., the concentration of mRNA or protein in a sample, etc.) or pattern (i.e., the kinetics of expression, rate of decomposition, stability profile, Km, Vmax, etc.) of gene expression (collectively, the “gene response” of a cell or bodily fluid). Such a determination can be accomplished by screening for mRNA or protein expression (e.g., by using nucleic acid arrays, RT-PCR or mass spectrometry), identifying genes having altered expression in an individual, genotyping SNPs disclosed in Table 1 and/or Table 2 that could affect the expression of the genes having altered expression (e.g., SNPs that are in and/or around the gene(s) having altered expression, SNPs in regulatory/control regions, SNPs in and/or around other genes that are involved in pathways that could affect the expression of the gene(s) having altered expression, or all SNPs could be genotyped), and correlating SNP genotypes with altered gene expression. In this manner, specific SNP alleles at particular SNP sites can be identified that affect gene expression.

[0251] Pharmacogenomics and Therapeutics/Drug Development

[0252] The present invention provides methods for assessing the pharmacogenomics of a subject harboring particular SNP alleles or haplotypes to a particular therapeutic agent or pharmaceutical compound, or to a class of such compounds. Pharmacogenomics deals with the roles which clinically significant hereditary variations (e.g., SNPs) play in the response to drugs due to altered drug disposition and/or abnormal action in affected persons. See, e.g., Roses, Nature 405, 857-865 (2000); Gould Rothberg, Nature Biotechnology 19, 209-211 (2001); Eichelbaum, Clin. Exp. Pharmacol. Physiol. 23(10-11):983-985 (1996); and Linder, Clin. Chem. 43(2):254-266 (1997). The clinical outcomes of these variations can result in severe toxicity of therapeutic drugs in certain individuals or therapeutic failure of drugs in certain individuals as a result of individual variation in metabolism. Thus, the SNP genotype of an individual can determine the way a therapeutic compound acts on the body or the way the body metabolizes the compound. For example, SNPs in drug metabolizing enzymes can affect the activity of these enzymes, which in turn can affect both the intensity and duration of drug action, as well as drug metabolism and clearance.

[0253] Pharmacogenomics in general is discussed further in Rose et al., “Pharmacogenetic analysis of clinically relevant genetic polymorphisms”, Methods Mol Med. 2003;85:225-37. Pharmacogenomics as it relates to Alzheimer's disease and other neurodegenerative disorders is discussed in Cacabelos, “Pharmacogenomics for the treatment of dementia”, Ann Med. 2002;34(5):357-79, Maimone et al., “Pharmacogenomics of neurodegenerative diseases”, Eur J Pharmacol. 2001 Feb. 9;413(1):11-29, and Poirier, “Apolipoprotein E: a pharmacogenetic target for the treatment of Alzheimer's disease”, Mol Diagn. December 1999;4(4):33541. Pharmacogenomics as it relates to cardiovascular disorders is discussed in Siest et al., “Pharmacogenomics of drugs affecting the cardiovascular system”, Clin Chem Lab Med. April 2003;41(4):590-9, Mukheijee et al., “Pharmacogenomics in cardiovascular diseases”, Prog Cardiovasc Dis. May-June 2002;44(6):479-98, and Mooser et al., “Cardiovascular pharmacogenetics in the SNP era”, J Thromb Haemost. July 2003;1(7):1398-402. Pharmacogenomics as it relates to cancer is discussed in McLeod et al., “Cancer pharmacogenomics: SNPs, chips, and the individual patient”, Cancer Invest. 2003;21(4):630-40 and Watters et al., “Cancer pharmacogenomics: current and future applications”, Biochim Biophys Acta. 2003 Mar. 17;1603(2):99-111.

[0254] The discovery of SNPs in drug metabolizing enzymes, drug transporters, proteins for pharmaceutical agents, and other drug targets has explained why some patients do not obtain the expected drug effects, show an exaggerated drug effect, or experience serious toxicity from standard drug dosages. SNPs can be expressed in the phenotype of the extensive metabolizer and in the phenotype of the poor metabolizer. Accordingly, SNPs may lead to allelic variants of a protein in which one or more of the protein functions in one population are different from those in another population. SNPs and the encoded variant peptides thus provide targets to ascertain a genetic predisposition that can affect treatment modality. For example, in a ligand-based treatment, SNPs may give rise to amino terminal extracellular domains and/or other ligand-binding regions of a receptor that are more or less active in ligand binding, thereby affecting subsequent protein activation. Accordingly, ligand dosage would necessarily be modified to maximize the therapeutic effect within a given population containing particular SNP alleles or haplotypes.

[0255] As an alternative to genotyping, specific variant peptides containing variant amino acid sequences encoded by alternative SNP alleles could be identified. Thus, pharmacogenomic characterization of an individual permits the selection of effective compounds and effective dosages of such compounds for prophylactic or therapeutic uses based on the individual's SNP genotype, thereby enhancing and optimizing the effectiveness of the therapy. Furthermore, the production of recombinant cells and transgenic animals containing particular SNPs/haplotypes allow effective clinical design and testing of treatment compounds and dosage regimens. For example, transgenic animals can be produced that differ only in specific SNP alleles in a gene that is orthologous to a human disease susceptibility gene.

[0256] Pharmacogenomic uses of the SNPs of the present invention provide several significant advantages for patient care, particularly in treating Alzheimer's disease. Pharmacogenomic characterization of an individual, based on an individual's SNP genotype, identifies those individuals unlikely to respond to treatment with a particular medication and thereby allows physicians to avoid prescribing the ineffective medication to those individuals. On the other hand, SNP genotyping of an individual may enable physicians to select the appropriate medication and dosage regimen that will be most effective based on an individual's SNP genotype. This information increases a physician's confidence in prescribing medications and motivates patients to comply with their drug regimens. Furthermore, pharmacogenomics may identify patients predisposed to toxicity and adverse reactions to particular drugs or drug dosages. Adverse drug reactions lead to more than 100,000 avoidable deaths per year in the United States alone and therefore represent a significant cause of hospitalization and death, as well as a significant economic burden on the healthcare system (Pfost et. al., Trends in Biotechnology, August 2000.). Thus, pharmacogenomics based on the SNPs disclosed herein has the potential to both save lives and reduce healthcare costs substantially.

[0257] The SNPs of the present invention also can be used to identify novel therapeutic targets for Alzheimer's disease. For example, genes containing the disease-associated variants or their products, as well as genes or their products that are directly or indirectly regulated by or interacting with these disease-associated SNP-containing genes or their products, can be targeted for the development of therapeutics that, for example, treat the disease or prevent or delay disease onset. The therapeutics may be composed of, for example, small molecules, proteins, protein fragments or peptides, antibodies, nucleic acids, or their derivatives or mimetics which modulate the functions or levels of the target genes or gene products.

[0258] The SNP-containing nucleic acid molecules disclosed herein, and their complementary nucleic acid molecules, may be used as antisense constructs to control gene expression in cells, tissues, and organisms. Antisense technology is well established in the art and extensively reviewed in Antisense Drug Technology: Principles, Strategies, and Applications, Crooke (ed.), Marcel Dekker, Inc.: New York (2001). An antisense nucleic acid molecule is generally designed to be complementary to a region of mRNA expressed by a gene so that the antisense molecule hybridizes to the mRNA and thereby blocks translation of mRNA into protein. Various classes of antisense oligonucleotides are used in the art, two of which are cleavers and blockers. Cleavers, by binding to target RNAs, activate intracellular nucleases (e.g., RNaseH or RNase L) that cleave the target RNA. Blockers, which also bind to target RNAs, inhibit protein translation through steric hindrance of ribosomes. Exemplary blockers include peptide nucleic acids, morpholinos, locked nucleic acids, and methylphosphonates (see, e.g., Thompson, Drug Discovery Today, 7 (17): 912-917 (2002)). Antisense oligonucleotides are directly useful as therapeutic agents, and are also useful for determining and validating gene function (e.g., in gene knock-out or knock-down experiments).

[0259] Antisense technology is further reviewed in: Lavery et al., “Antisense and RNAi: powerful tools in drug target discovery and validation”, Curr Opin Drug Discov Devel. July 2003;6(4):561-9; Stephens et al., “Antisense oligonucleotide therapy in cancer”, Curr Opin Mol Ther. April 2003;5(2): 118-22; Kurreck, “Antisense technologies. Improvement through novel chemical modifications”, Eur J Biochem. April 2003;270(8):1628-44; Dias et al., “Antisense oligonucleotides: basic concepts and mechanisms”, Mol Cancer Ther. March 2002;1(5):347-55; Chen, “Clinical development of antisense oligonucleotides as anti-cancer therapeutics”, Methods Mol Med. 2003;75:621-36; Wang et al., “Antisense anticancer oligonucleotide therapeutics”, Curr Cancer Drug Targets. November 2001;1(3): 177-96; and Bennett, “Efficiency of antisense oligonucleotide drug discovery”, Antisense Nucleic Acid Drug Dev. June 2002;12(3):215-24.

[0260] The SNPs of the present invention are particularly useful for designing antisense reagents that are specific for particular nucleic acid variants. Based on the SNP information disclosed herein, antisense oligonucleotides can be produced that specifically target mRNA molecules that contain one or more particular SNP nucleotides. In this manner, expression of mRNA molecules that contain one or more undesired polymorphisms (e.g., SNP nucleotides that lead to a defective protein such as an amino acid substitution in a catalytic domain) can be inhibited or completely blocked. Thus, antisense oligonucleotides can be used to specifically bind a particular polymorphic form (e.g., a SNP allele that encodes a defective protein), thereby inhibiting translation of this form, but do not bind an alternative polymorphic form (e.g., an alternative SNP nucleotide that encodes a protein having normal function).

[0261] Antisense molecules can be used to inactivate mRNA in order to inhibit gene expression and production of defective proteins. Accordingly, these molecules can be used to treat a disorder, such as Alzheimer's disease, characterized by abnormal or undesired gene expression or expression of certain defective proteins. This technique can involve cleavage by means of ribozymes containing nucleotide sequences complementary to one or more regions in the mRNA that attenuate the ability of the mRNA to be translated. Possible mRNA regions include, for example, protein encoding regions and particularly protein encoding regions corresponding to catalytic activities, substrate/ligand binding, or other functional activities of a protein.

[0262] The SNPs of the present invention are also useful for designing RNA interference reagents that specifically target nucleic acid molecules having particular SNP variants. RNA interference (RNAi), also referred to as gene silencing, is based on using double-stranded RNA (dsRNA) molecules to turn genes off. When introduced into a cell, dsRNAs are processed by the cell into short fragments (generally about 21-22bp in length) known as small interfering RNAs (siRNAs) which the cell uses in a sequence-specific manner to recognize and destroy complementary RNAs (Thompson, Drug Discovery Today, 7 (17): 912-917 (2002)). Thus, because RNAi molecules, including siRNAs, act in a sequence-specific manner, the SNPs of the present invention can be used to design RNAi reagents that recognize and destroy nucleic acid molecules having specific SNP alleles/nucleotides (such as deleterious alleles that lead to the production of defective proteins), while not affecting nucleic acid molecules having alternative SNP alleles (such as alleles that encode proteins having normal function). As with antisense reagents, RNAi reagents may be directly useful as therapeutic agents (e.g., for turning off defective, disease-causing genes), and are also useful for characterizing and validating gene function (e.g., in gene knock-out or knock-down experiments).

[0263] The following references provide a further review of RNAi: Agami, “RNAi and related mechanisms and their potential use for therapy”, Curr Opin Chem Biol. December 2002;6(6):829-34; Lavery et al., “Antisense and RNAi: powerful tools in drug target discovery and validation”, Curr Opin Drug Discov Devel. July 2003;6(4):561-9; Shi, “Mammalian RNAi for the masses”, Trends Genet January 2003;19(1):9-12), Shuey et al., “RNAi: gene-silencing in therapeutic intervention”, Drug Discovery Today October 2002;7(20): 1040-1046; McManus et al., Nat Rev Genet October 2002;3(10):737-47; Xia et al., Nat Biotechnol October 2002;20(10): 1006-10; Plasterk et al., Curr Opin Genet Dev October 2000;10(5):562-7; Bosher et al., Nat Cell Biol February 2000;2(2):E31-6; and Hunter, Curr Biol 1999 Jun. 17;9(12):R440-2).

[0264] A subject suffering from a pathological condition, such as Alzheimer's disease, ascribed to a SNP may be treated so as to correct the genetic defect (see Kren et al., Proc. Natl. Acad. Sci. USA 96:10349-10354 (1999)). Such a subject can be identified by any method that can detect the polymorphism in a biological sample drawn from the subject. Such a genetic defect may be permanently corrected by administering to such a subject a nucleic acid fragment incorporating a repair sequence that supplies the wild-type nucleotide at the position of the SNP. This site-specific repair sequence encompasses an RNA/DNA oligonucleotide that operates to promote endogenous repair of a subject's genomic DNA. The site-specific repair sequence is administered in an appropriate vehicle, such as a complex with polyethylenimine, encapsulated in anionic liposomes, a viral vector such as an adenovirus, or other pharmaceutical composition that promotes intracellular uptake of the administered nucleic acid. A genetic defect leading to an inborn pathology may then be overcome, as the chimeric oligonucleotides induce incorporation of the wild type sequence into the subject's genome. Upon incorporation, the wild type gene product is expressed, and the replacement is propagated, thereby engendering a permanent repair and therapeutic enhancement of the clinical condition of the subject.

[0265] In cases in which a cSNP results in a variant protein that is ascribed to be the cause of, or a contributing factor to, a pathological condition, a method of treating such a condition can include administering to a subject experiencing the pathology the wild type cognate of the variant protein. Once administered in an effective dosing regimen, the wild type cognate provides complementation or remediation of the pathological condition.

[0266] The invention further provides a method for identifying a compound or agent that can be used to treat Alzheimer's disease. Variant gene expression in a Alzheimer's disease patient can include, either expression of a SNP-containing nucleic acid sequence (for instance, a gene that contains a SNP can be transcribed into an mRNA transcript molecule containing the SNP, which can in turn be translated into a variant protein) or altered expression of a wild-type nucleic acid sequence (for instance, a regulatory/control region can contain a SNP that affects the level or pattern of expression of a wild-type transcript). The SNPs disclosed herein are useful as targets for the identification and/or development of therapeutic agents. A method for identifying a therapeutic agent or compound typically includes assaying the ability of the agent or compound to modulate the activity and/or expression of the nucleic acid and thus identifying an agent or a compound that can be used to treat a disorder characterized by undesired activity or expression of the SNP-containing nucleic acid. The assays can be performed in cell-based and cell-free systems. Cell-based assays can include cells naturally expressing the nucleic acid molecules of interest or recombinant cells genetically engineered to express nucleic acid molecules.

[0267] Assays for variant gene expression can involve direct assays of nucleic acid levels (e.g., mRNA levels), expressed protein levels, or of collateral compounds involved in the signal pathway. Further, the expression of genes that are up- or down-regulated in response to the signal pathway can also be assayed. In this embodiment, the regulatory regions of these genes can be operably linked to a reporter gene such as luciferase.

[0268] Modulators of variant gene expression can be identified in a method wherein, for example, a cell is contacted with a candidate compound/agent and the expression of mRNA determined. The level of expression of mRNA in the presence of the candidate compound is compared to the level of expression of mRNA in the absence of the candidate compound. The candidate compound can then be identified as a modulator of variant gene expression based on this comparison and be used to treat a disorder such as Alzheimer's disease that is characterized by abnormal gene expression due to one or more SNPs of the present invention. When expression of mRNA is statistically significantly greater in the presence of the candidate compound than in its absence, the candidate compound is identified as a stimulator of nucleic acid expression. When nucleic acid expression is statistically significantly less in the presence of the candidate compound than in its absence, the candidate compound is identified as an inhibitor of nucleic acid expression.

[0269] The invention further provides methods of treatment, with the SNP or associated nucleic acid domain (e.g., regulatory/control region) or gene, or the encoded mRNA transcript, as a target, using a compound identified through drug screening as a gene modulator to modulate variant nucleic acid expression. Modulation can include either up-regulation (i.e., activation or agonization) or down-regulation (i.e., suppression or antagonization) of nucleic acid expression.

[0270] Expression of mRNA transcripts and encoded proteins, either wild type or variant, may be altered in individuals with a particular SNP allele in a regulatory/control element, such as a promoter or transcription factor binding domain, that regulates expression. In this situation, methods of treatment and compounds are identified, as discussed herein, that regulate or overcome the variant regulatory/control element, thereby generating normal, or healthy, expression levels of either the wild type or variant protein.

[0271] The SNP-containing nucleic acid molecules of the present invention are also useful for monitoring the effectiveness of modulating compounds on the expression or activity of a variant gene in clinical trials or in a treatment regimen. Thus, the gene expression pattern can serve as an indicator for the continuing effectiveness of treatment with the compound, particularly with compounds to which a patient can develop resistance as well as an indicator for toxicities. The gene expression pattern can also serve as a marker indicative of a physiological response of the affected cells to the compound. Accordingly, such monitoring would allow either increased administration of the compound or the administration of alternative compounds to which the patient has not become resistant. Similarly, if the level of nucleic acid expression falls below a desirable level, administration of the compound could be commensurately decreased.

[0272] In another aspect of the present invention, there is provided a pharmaceutical pack comprising a therapeutic agent (e.g., a small molecule drug, an antibody, a peptide, etc.) and a set of instructions for administration of the therapeutic agent to humans diagnostically tested for one or more SNPs or SNP haplotypes provided by the present invention.

[0273] The SNPs/haplotypes of the present invention are also useful for improving many different aspects of the drug development process. For example, individuals can be selected for clinical trials based on their SNP genotype. Individuals with SNP genotypes that indicate that they are most likely to respond to the drug can be included in the trials and those individuals whose SNP genotypes indicate that they are less likely to or would not respond to the drug, or suffer adverse reactions, can be eliminated from the clinical trials. This not only improves the safety of clinical trials, but also will enhance the chances that the trial will demonstrate statistically significant efficacy. Furthermore, the SNPs of the present invention may explain why certain previously developed drugs performed poorly in clinical trials and may help identify a subset of the population that would benefit from a drug that had previously performed poorly in clinical trials, thereby “rescuing” previously developed drugs, and enabling the drug to be made available to a particular Alzheimer's disease patient population that can benefit from it.

[0274] SNPs have many important uses in drug discovery, screening, and development. A high probability exists that, for any gene/protein selected as a potential drug target, variants of that gene/protein will exist in a patient population. Thus, determining the impact of gene/protein variants on the selection and delivery of a therapeutic agent should be an integral aspect of the drug discovery and development process. (Jazwinska, A Trends Guide to Genetic Variation and Genomic Medicine, March 2002; S30-S36).

[0275] Knowledge of variants (e.g., SNPs and any corresponding amino acid polymorphisms) of a particular therapeutic target (e.g., a gene, mRNA transcript, or protein) enables parallel screening of the variants in order to identify therapeutic candidates (e.g., small molecule compounds, antibodies, antisense or RNAi nucleic acid compounds, etc.) that demonstrate efficacy across variants (Rothberg, Nat Biotechnol March 2001;19(3):209-1 1). Such therapeutic candidates would be expected to show equal efficacy across a larger segment of the patient population, thereby leading to a larger potential market for the therapeutic candidate.

[0276] Furthermore, identifying variants of a potential therapeutic target enables the most common form of the target to be used for selection of therapeutic candidates, thereby helping to ensure that the experimental activity that is observed for the selected candidates reflects the real activity expected in the largest proportion of a patient population (Jazwinska, A Trends Guide to Genetic Variation and Genomic Medicine, March 2002; S30-S36).

[0277] Additionally, screening therapeutic candidates against all known variants of a target can enable the early identification of potential toxicities and adverse reactions relating to particular variants. For example, variability in drug absorption, distribution, metabolism and excretion (ADME) caused by, for example, SNPs in therapeutic targets or drug metabolizing genes, can be identified, and this information can be utilized during the drug development process to minimize variability in drug disposition and develop therapeutic agents that are safer across a wider range of a patient population.

[0278] Furthermore, therapeutic agents that target any art-known proteins (or nucleic acid molecules, either RNA or DNA) may cross-react with the variant proteins (or polymorphic nucleic acid molecules) disclosed in Table 1, thereby significantly affecting the pharmacokinetic properties of the drug. Consequently, the protein variants and the SNP-containing nucleic acid molecules disclosed in Tables 1-2 are useful in developing, screening, and evaluating therapeutic agents that target corresponding art-known protein forms (or nucleic acid molecules). Additionally, as discussed above, knowledge of all polymorphic forms of a particular drug target enables the design of therapeutic agents that are effective against most or all such polymorphic forms of the drug target.

[0279] Administration and Pharmaceutical Compositions

[0280] In this section, GAPDH inhibitors are described as an exemplary class of therapeutic compounds that target an Alzheimer's disease-associated protein, or encoding nucleic acid molecule, disclosed herein. However, one of skill in the art will recognize that any of the Alzheimer's disease-associated proteins, and encoding nucleic acid molecules, disclosed herein are useful as therapeutic targets for treating Alzheimer's disease, and that the present disclosure enables therapeutic compounds to be developed that target any of these other therapeutic targets.

[0281] In general, GAPDH inhibitors (or other therapeutic compounds that target an Alzheimer's disease-associated protein, or encoding nucleic acid molecule, disclosed herein) will be administered in a therapeutically effective amount by any of the accepted modes of administration for agents that serve similar utilities. The actual amount of the compound of this invention, i.e., the active ingredient, will depend upon numerous factors such as the severity of the disease to be treated, the age and relative health of the subject, the potency of the compound used, the route and form of administration, and other factors.

[0282] Therapeutically effective amounts of GAPDH inhibitors may range from approximately 0.01-50 mg per kilogram body weight of the recipient per day; preferably about 0. 1-20 mg/kg/day. Thus, for administration to a 70 kg person, the dosage range would most preferably be about 7 mg to 1.4 g per day.

[0283] In general, the GAPDH inhibitors will be administered as pharmaceutical compositions by any one of the following routes: oral, systemic (e.g., transdermal, intranasal, or by suppository), or parenteral (e.g., intramuscular, intravenous, or subcutaneous) administration. The preferred manner of administration is oral or parenteral using a convenient daily dosage regimen, which can be adjusted according to the degree of affliction. Oral compositions can take the form of tablets, pills, capsules, semisolids, powders, sustained release formulations, solutions, suspensions, elixirs, aerosols, or any other appropriate compositions.

[0284] The choice of formulation depends on various factors such as the mode of drug administration (e.g., for oral administration, formulations in the form of tablets, pills, or capsules are preferred) and the bioavailability of the drug substance. Recently, pharmaceutical formulations have been developed especially for drugs that show poor bioavailability based upon the principle that bioavailability can be increased by increasing the surface area, i.e., decreasing particle size. For example, U.S. Pat. No. 4,107,288 describes a pharmaceutical formulation having particles in the size range from 10 to 1,000 nm in which the active material is supported on a cross-linked matrix of macromolecules. U.S. Pat. No. 5,145,684 describes the production of a pharmaceutical formulation in which the drug substance is pulverized to nanoparticles (average particle size of 400 nm) in the presence of a surface modifier and then dispersed in a liquid medium to give a pharmaceutical formulation that exhibits remarkably high bioavailability.

[0285] The compositions are comprised of in general, a GAPDH inhibitor in combination with at least one pharmaceutically acceptable excipient. Acceptable excipients are non-toxic, aid administration, and do not adversely affect the therapeutic benefit of the GAPDH inhibitors. Such excipient may be any solid, liquid, semi-solid or, in the case of an aerosol composition, gaseous excipient that is generally available to one skilled in the art.

[0286] Solid pharmaceutical excipients include starch, cellulose, talc, glucose, lactose, sucrose, gelatin, malt, rice, flour, chalk, silica gel, magnesium stearate, sodium stearate, glycerol monostearate, sodium chloride, dried skim milk and the like. Liquid and semisolid excipients may be selected from glycerol, propylene glycol, water, ethanol and various oils, including those of petroleum, animal, vegetable or synthetic origin, e.g., peanut oil, soybean oil, mineral oil, sesame oil, etc. Preferred liquid carriers, particularly for injectable solutions, include water, saline, aqueous dextrose, and glycols.

[0287] Compressed gases may be used to disperse a compound of this invention in aerosol form. Inert gases suitable for this purpose are nitrogen, carbon dioxide, etc.

[0288] Other suitable pharmaceutical excipients and their formulations are described in Remington's Pharmaceutical Sciences, edited by E. W. Martin (Mack Publishing Company, 18th ed., 1990).

[0289] The amount of the compound in a formulation can vary within the full range employed by those skilled in the art. Typically, the formulation will contain, on a weight percent (wt %) basis, from about 0.01-99.99 wt % of the GAPDH inhibitor based on the total formulation, with the balance being one or more suitable pharmaceutical excipients. Preferably, the compound is present at a level of about 1-80 wt %.

[0290] The GAPDH inhibitors can be administered alone or in combination with other inhibitors or in combination with one or more other active ingredient(s). For example, GAPDH inhibitor can be administered in combination with another neuroprotective agent.

[0291] Human Identification Applications

[0292] In addition to their diagnostic and therapeutic uses in Alzheimer's disease and related pathologies, the SNPs provided by the present invention are also useful as human identification markers for such applications as forensics, paternity testing, and biometrics (see, e.g., Gill, “An assessment of the utility of single nucleotide polymorphisms (SNPs) for forensic purposes”, Int J Legal Med. 2001;1 14(4-5):204-10). Genetic variations in the nucleic acid sequences between individuals can be used as genetic markers to identify individuals and to associate a biological sample with an individual. Determination of which nucleotides occupy a set of SNP positions in an individual identifies a set of SNP markers that distinguishes the individual. The more SNP positions that are analyzed, the lower the probability that the set of SNPs in one individual is the same as that in an unrelated individual. Preferably, if multiple sites are analyzed, the sites are unlinked (i.e., inherited independently). Thus, preferred sets of SNPs can be selected from among the SNPs disclosed herein, which may include SNPs on different chromosomes, SNPs on different chromosome arms, and/or SNPs that are dispersed over substantial distances along the same chromosome arm.

[0293] Furthermore, among the SNPs disclosed herein, preferred SNPs for use in certain forensic/human identification applications include SNPs located at degenerate codon positions (i.e., the third position in certain codons which can be one of two or more alternative nucleotides and still encode the same amino acid), since these SNPs do not affect the encoded protein. SNPs that do not affect the encoded protein are expected to be under less selective pressure and are therefore expected to be more polymorphic in a population, which is typically an advantage for forensic/human identification applications. However, for certain forensics/human identification applications, such as predicting phenotypic characteristics (e.g., inferring ancestry) from a DNA sample, it may be desirable to utilize SNPs that affect the encoded protein.

[0294] For many of the SNPs disclosed in Tables 1-2 (which are identified as “Applera” SNP source), Tables 1-2 provide SNP allele frequencies obtained by re-sequencing the DNA of chromosomes from 39 individuals (Tables 1-2 also provide allele frequency information for “Celera” source SNPs and, where available, public SNPs from dbEST, HGBASE, and/or HGMD). The allele frequencies provided in Tables 1-2 enable these SNPs to be readily used for human identification applications. Although any SNP disclosed in Table 1 and/or Table 2 could be used for human identification, the closer that the frequency of the minor allele at a particular SNP site is to 50%, the greater the ability of that SNP to discriminate between different individuals in a population since it becomes increasingly likely that two randomly selected individuals would have different alleles at that SNP site. Using the SNP allele frequencies provided in Tables 1-2, one of ordinary skill in the art could readily select a subset of SNPs for which the frequency of the minor allele is, for example, at least 1%, 2%, 5%, 10%, 20%, 25%, 30%, 40%, 45%, or 50%, or any other frequency in-between. Thus, since Tables 1-2 provide allele frequencies based on the re-sequencing of the chromosomes from 39 individuals, a subset of SNPs could readily be selected for human identification in which the total allele count of the minor allele at a particular SNP site is, for example, at least 1, 2, 4, 8, 10, 16, 20, 24, 30, 32, 36, 38, 39, 40, or any other number in-between.

[0295] Furthermore, Tables 1-2 also provide population group (interchangeably referred to herein as ethnic or racial groups) information coupled with the extensive allele frequency information. For example, the group of 39 individuals whose DNA was re-sequenced was made-up of 20 Caucasians and 19 African-Americans. This population group information enables further refinement of SNP selection for human identification. For example, preferred SNPs for human identification can be selected from Tables 1-2 that have similar allele frequencies in both the Caucasian and African-American populations; thus, for example, SNPs can be selected that have equally high discriminatory power in both populations. Alternatively, SNPs can be selected for which there is a statistically significant difference in allele frequencies between the Caucasian and African-American populations (as an extreme example, a particular allele may be observed only in either the Caucasian or the African-American population group but not observed in the other population group); such SNPs are useful, for example, for predicting the race/ethnicity of an unknown perpetrator from a biological sample such as a hair or blood stain recovered at a crime scene. For a discussion of using SNPs to predict ancestry from a DNA sample, including statistical methods, see Frudakis et al., “A Classifier for the SNP-Based Inference of Ancestry”, Journal of Forensic Sciences 2003; 48(4):77 1-782.

[0296] SNPs have numerous advantages over other types of polymorphic markers, such as short tandem repeats (STRs). For example, SNPs can be easily scored and are amenable to automation, making SNPs the markers of choice for large-scale forensic databases. SNPs are found in much greater abundance throughout the genome than repeat polymorphisms. Population frequencies of two polymorphic forms can usually be determined with greater accuracy than those of multiple polymorphic forms at multi-allelic loci. SNPs are mutationaly more stable than repeat polymorphisms. SNPs are not susceptible to artefacts such as stutter bands that can hinder analysis. Stutter bands are frequently encountered when analyzing repeat polymorphisms, and are particularly troublesome when analyzing samples such as crime scene samples that may contain mixtures of DNA from multiple sources. Another significant advantage of SNP markers over STR markers is the much shorter length of nucleic acid needed to score a SNP. For example, STR markers are generally several hundred base pairs in length. A SNP, on the other hand, comprises a single nucleotide, and generally a short conserved region on either side of the SNP position for primer and/or probe binding. This makes SNPs more amenable to typing in highly degraded or aged biological samples that are frequently encountered in forensic casework in which DNA may be fragmented into short pieces.

[0297] SNPs also are not subject to microvariant and “off-ladder” alleles frequently encountered when analyzing STR loci. Microvariants are deletions or insertions within a repeat unit that change the size of the amplified DNA product so that the amplified product does not migrate at the same rate as reference alleles with normal sized repeat units. When separated by size, such as by electrophoresis on a polyacrylamide gel, microvariants do not align with a reference allelic ladder of standard sized repeat units, but rather migrate between the reference alleles. The reference allelic ladder is used for precise sizing of alleles for allele classification; therefore alleles that do not align with the reference allelic ladder lead to substantial analysis problems. Furthermore, when analyzing multi-allelic repeat polymorphisms, occasionally an allele is found that consists of more or less repeat units than has been previously seen in the population, or more or less repeat alleles than are included in a reference allelic ladder. These alleles will migrate outside the size range of known alleles in a reference allelic ladder, and therefore are referred to as “off-ladder” alleles. In extreme cases, the allele may contain so few or so many repeats that it migrates well out of the range of the reference allelic ladder. In this situation, the allele may not even be observed, or, with multiplex analysis, it may migrate within or close to the size range for another locus, further confounding analysis.

[0298] SNP analysis avoids the problems of microvariants and off-ladder alleles encountered in STR analysis. Importantly, microvariants and off-ladder alleles may provide significant problems, and may be completely missed, when using analysis methods such as oligonucleotide hybridization arrays, which utilize oligonucleotide probes specific for certain known alleles. Furthermore, off-ladder alleles and microvariants encountered with STR analysis, even when correctly typed, may lead to improper statistical analysis, since their frequencies in the population are generally unknown or poorly characterized, and therefore the statistical significance of a matching genotype may be questionable. All these advantages of SNP analysis are considerable in light of the consequences of most DNA identification cases, which may lead to life imprisonment for an individual, or re-association of remains to the family of a deceased individual.

[0299] DNA can be isolated from biological samples such as blood, bone, hair, saliva, or semen, and compared with the DNA from a reference source at particular SNP positions. Multiple SNP markers can be assayed simultaneously in order to increase the power of discrimination and the statistical significance of a matching genotype. For example, oligonucleotide arrays can be used to genotype a large number of SNPs simultaneously. The SNPs provided by the present invention can be assayed in combination with other polymorphic genetic markers, such as other SNPs known in the art or STRs, in order to identify an individual or to associate an individual with a particular biological sample.

[0300] Furthermore, the SNPs provided by the present invention can be typed for inclusion in a database of DNA genotypes, for example, a criminal DNA databank. A genotype obtained from a biological sample of unknown source can then be queried against the database to find a matching genotype, with the SNPs of the present invention providing nucleotide positions at which to compare the known and unknown DNA sequences for identity.

[0301] The SNPs of the present invention can also be assayed for use in paternity testing. The object of paternity testing is usually to determine whether a male is the father of a child. In most cases, the mother of the child is known and thus, the mother's contribution to the child's genotype can be traced. Paternity testing investigates whether the part of the child's genotype not attributable to the mother is consistent with that of the putative father. Paternity testing can be performed by analyzing sets of polymorphisms in the putative father and the child, with the SNPs of the present invention providing nucleotide positions at which to compare the putative father's and child's DNA sequences for identity. If the set of polymorphisms in the child attributable to the father does not match the set of polymorphisms of the putative father, it can be concluded, barring experimental error, that the putative father is not the father of the child. If the set of polymorphisms in the child attributable to the father match the set of polymorphisms of the putative father, a statistical calculation can be performed to determine the probability of coincidental match.

[0302] The use of the SNPs of the present invention for human identification further extends to various authentication systems, commonly referred to as biometric systems. Biometric systems convert physical characteristics of humans (or other organisms) into digital data for precise quantification. Biometric systems include various technological devices that measure such unique anatomical or physiological characteristics as finger, thumb, or palm prints; hand geometry; vein patterning on the back of the hand; blood vessel patterning of the retina and color and texture of the iris; facial characteristics; voice patterns; signature and typing dynamics; and DNA. Such physiological measurements can be used to verify identity and restrict or allow access based on the identification. Examples of applications for biometrics include physical area security, computer and network security, aircraft passenger check-in and boarding, financial transactions, medical records access, government benefit distribution, voting, law enforcement, passports, visas and immigration, prisons, various military applications, and for restricting access to expensive or dangerous items, such as automobiles or guns (see, for example, O'Connor, Stanford Technology Law Review and U.S. Pat. No. 6,119,096).

[0303] Groups of SNPs, particularly the SNPs provided by the present invention, can be typed to uniquely identify an individual for biometric applications such as those described above. Such SNP typing can readily be accomplished using, for example, DNA chips/arrays. Preferably, a minimally invasive means for obtaining a DNA sample is utilized. For example, PCR amplification enables sufficient quantities of DNA for analysis to be obtained from buccal swabs or fingerprints, which contain DNA-containing skin cells and oils that are naturally transferred during contact.

[0304] Further information regarding techniques for using SNPs in forensic/human identification applications can be found in, for example, Current Protocols in Human Genetics, John Wiley & Sons, N.Y. (2002), 14.1-14.7.

[0305] Variant Proteins, Antibodies, Vectors & Host Cells, & Uses Thereof

[0306] Variant Proteins Encoded by SNP-Containing Nucleic Acid Molecules

[0307] The present invention provides SNP-containing nucleic acid molecules, many of which encode proteins having variant amino acid sequences as compared to the art-known (i.e., wild-type) proteins. Amino acid sequences encoded by the polymorphic nucleic acid molecules of the present invention are provided as SEQ ID NOS:434-866 in Table 1 and the Sequence Listing. These variants will generally be referred to herein as variant proteins/peptides/polypeptides, or polymorphic proteins/peptides/polypeptides of the present invention. The terms “protein”, “peptide”, and “polypeptide” are used herein interchangeably.

[0308] A variant protein of the present invention may be encoded by, for example, a nonsynonymous nucleotide substitution at any one of the cSNP positions disclosed herein. In addition, variant proteins may also include proteins whose expression, structure, and/or function is altered by a SNP disclosed herein, such as a SNP that creates or destroys a stop codon, a SNP that affects splicing, and a SNP in control/regulatory elements, e.g. promoters, enhancers, or transcription factor binding domains.

[0309] As used herein, a protein or peptide is said to be “isolated” or “purified” when it is substantially free of cellular material or chemical precursors or other chemicals. The variant proteins of the present invention can be purified to homogeneity or other lower degrees of purity. The level of purification will be based on the intended use. The key feature is that the preparation allows for the desired function of the variant protein, even if in the presence of considerable amounts of other components.

[0310] As used herein, “substantially free of cellular material” includes preparations of the variant protein having less than about 30% (by dry weight) other proteins (i.e., contaminating protein), less than about 20% other proteins, less than about 10% other proteins, or less than about 5% other proteins. When the variant protein is recombinantly produced, it can also be substantially free of culture medium, i.e., culture medium represents less than about 20% of the volume of the protein preparation.

[0311] The language “substantially free of chemical precursors or other chemicals” includes preparations of the variant protein in which it is separated from chemical precursors or other chemicals that are involved in its synthesis. In one embodiment, the language “substantially free of chemical precursors or other chemicals” includes preparations of the variant protein having less than about 30% (by dry weight) chemical precursors or other chemicals, less than about 20% chemical precursors or other chemicals, less than about 10% chemical precursors or other chemicals, or less than about 5% chemical precursors or other chemicals.

[0312] An isolated variant protein may be purified from cells that naturally express it, purified from cells that have been altered to express it (recombinant host cells), or synthesized using known protein synthesis methods. For example, a nucleic acid molecule containing SNP(s) encoding the variant protein can be cloned into an expression vector, the expression vector introduced into a host cell, and the variant protein expressed in the host cell. The variant protein can then be isolated from the cells by any appropriate purification scheme using standard protein purification techniques. Examples of these techniques are described in detail below (Sambrook and Russell, 2000, Molecular Cloning: A Laboratory Manual, Cold Spring Harbor Laboratory Press, Cold Spring Harbor, NY).

[0313] The present invention provides isolated variant proteins that comprise, consist of or consist essentially of amino acid sequences that contain one or more variant amino acids encoded by one or more codons which contain a SNP of the present invention.

[0314] Accordingly, the present invention provides variant proteins that consist of amino acid sequences that contain one or more amino acid polymorphisms (or truncations or extensions due to creation or destruction of a stop codon, respectively) encoded by the SNPs provided in Table 1 and/or Table 2. A protein consists of an amino acid sequence when the amino acid sequence is the entire amino acid sequence of the protein.

[0315] The present invention further provides variant proteins that consist essentially of amino acid sequences that contain one or more amino acid polymorphisms (or truncations or extensions due to creation or destruction of a stop codon, respectively) encoded by the SNPs provided in Table 1 and/or Table 2. A protein consists essentially of an amino acid sequence when such an amino acid sequence is present with only a few additional amino acid residues in the final protein.

[0316] The present invention further provides variant proteins that comprise amino acid sequences that contain one or more amino acid polymorphisms (or truncations or extensions due to creation or destruction of a stop codon, respectively) encoded by the SNPs provided in Table 1 and/or Table 2. A protein comprises an amino acid sequence when the amino acid sequence is at least part of the final amino acid sequence of the protein. In such a fashion, the protein may contain only the variant amino acid sequence or have additional amino acid residues, such as a contiguous encoded sequence that is naturally associated with it or heterologous amino acid residues. Such a protein can have a few additional amino acid residues or can comprise many more additional amino acids. A brief description of how various types of these proteins can be made and isolated is provided below.

[0317] The variant proteins of the present invention can be attached to heterologous sequences to form chimeric or fusion proteins. Such chimeric and fusion proteins comprise a variant protein operatively linked to a heterologous protein having an amino acid sequence not substantially homologous to the variant protein. “Operatively linked” indicates that the coding sequences for the variant protein and the heterologous protein are ligated in-frame. The heterologous protein can be fused to the N-terminus or C-terminus of the variant protein. In another embodiment, the fusion protein is encoded by a fusion polynucleotide that is synthesized by conventional techniques including automated DNA synthesizers. Alternatively, PCR amplification of gene fragments can be carried out using anchor primers which give rise to complementary overhangs between two consecutive gene fragments which can subsequently be annealed and re-amplified to generate a chimeric gene sequence (see Ausubel et al., Current Protocols in Molecular Biology, 1992). Moreover, many expression vectors are commercially available that already encode a fusion moiety (e.g., a GST protein). A variant protein-encoding nucleic acid can be cloned into such an expression vector such that the fusion moiety is linked in-frame to the variant protein.

[0318] In many uses, the fusion protein does not affect the activity of the variant protein. The fusion protein can include, but is not limited to, enzymatic fusion proteins, for example, beta-galactosidase fusions, yeast two-hybrid GAL fusions, poly-His fusions, MYC-tagged, HI-tagged and Ig fusions. Such fusion proteins, particularly poly-His fusions, can facilitate their purification following recombinant expression. In certain host cells (e.g., mammalian host cells), expression and/or secretion of a protein can be increased by using a heterologous signal sequence.

[0319] The present invention also relates to further obvious variants of the variant polypeptides of the present invention, such as naturally-occurring mature forms (e.g., alleleic variants), non-naturally occurring recombinantly-derived variants, and orthologs and paralogs of such proteins that share sequence homology. Such variants can readily be generated using art-known techniques in the fields of recombinant nucleic acid technology and protein biochemistry. It is understood, however, that variants exclude those known in the prior art prior to the present invention.

[0320] Further variants of the variant polypeptides disclosed in Table 1 can comprise an amino acid sequence that shares at least 70-80%, 80-85%, 85-90%, 91%, 92%, 93%, 94%, 95%, 96%, 97%, 98%, or 99% sequence identity with an amino acid sequence disclosed in Table 1 (or a fragment thereof) and that includes a novel amino acid residue (allele) disclosed in Table 1 (which is encoded by a novel SNP allele). Thus, the present invention specifically contemplates polypeptides that have a certain degree of sequence variation compared with the polypeptide sequences shown in Table 1, but that contain a novel amino acid residue (allele) encoded by a novel SNP allele disclosed herein. In other words, as long as a polypeptide contains a novel amino acid residue disclosed herein, other portions of the polypeptide that flank the novel amino acid residue can vary to some degree from the polypeptide sequences shown in Table 1.

[0321] Full-length pre-processed forms, as well as mature processed forms, of proteins that comprise one of the amino acid sequences disclosed herein can readily be identified as having complete sequence identity to one of the variant proteins of the present invention as well as being encoded by the same genetic locus as the variant proteins provided herein.

[0322] Orthologs of a variant peptide can readily be identified as having some degree of significant sequence homology/identity to at least a portion of a variant peptide as well as being encoded by a gene from another organism. Preferred orthologs will be isolated from non-human mammals, preferably primates, for the development of human therapeutic targets and agents. Such orthologs can be encoded by a nucleic acid sequence that hybridizes to a variant peptide-encoding nucleic acid molecule under moderate to stringent conditions depending on the degree of relatedness of the two organisms yielding the homologous proteins.

[0323] Variant proteins include, but are not limited to, proteins containing deletions, additions and substitutions in the amino acid sequence caused by the SNPs of the present invention. One class of substitutions is conserved amino acid substitutions in which a given amino acid in a polypeptide is substituted for another amino acid of like characteristics. Typical conservative substitutions are replacements, one for another, among the aliphatic amino acids Ala, Val, Leu, and Ile; interchange of the hydroxyl residues Ser and Thr; exchange of the acidic residues Asp and Glu; substitution between the amide residues Asn and Gln; exchange of the basic residues Lys and Arg; and replacements among the aromatic residues Phe and Tyr. Guidance concerning which amino acid changes are likely to be phenotypically silent are found in, for example, Bowie et al., Science 247:1306-1310 (1990).

[0324] Variant proteins can be fully functional or can lack function in one or more activities, e.g. ability to bind another molecule, ability to catalyze a substrate, ability to mediate signaling, etc. Fully functional variants typically contain only conservative variations or variations in non-critical residues or in non-critical regions. Functional variants can also contain substitution of similar amino acids that result in no change or an insignificant change in function. Alternatively, such substitutions may positively or negatively affect function to some degree. Non-functional variants typically contain one or more non-conservative amino acid substitutions, deletions, insertions, inversions, truncations or extensions, or a substitution, insertion, inversion, or deletion of a critical residue or in a critical region.

[0325] Amino acids that are essential for function of a protein can be identified by methods known in the art, such as site-directed mutagenesis or alanine-scanning mutagenesis (Cunningham et al., Science 244:1081-1085 (1989)), particularly using the amino acid sequence and polymorphism information provided in Table 1. The latter procedure introduces single alanine mutations at every residue in the molecule. The resulting mutant molecules are then tested for biological activity such as enzyme activity or in assays such as an in vitro proliferative activity. Sites that are critical for binding partner/substrate binding can also be determined by structural analysis such as crystallization, nuclear magnetic resonance or photoaffinity labeling (Smith et al., J. Mol. Biol. 224:899-904 (1992); de Vos et al. Science 255:306-312 (1992)).

[0326] Polypeptides can contain amino acids other than the 20 amino acids commonly referred to as the 20 naturally occurring amino acids. Further, many amino acids, including the terminal amino acids, may be modified by natural processes, such as processing and other post-translational modifications, or by chemical modification techniques well known in the art. Accordingly, the variant proteins of the present invention also encompass derivatives or analogs in which a substituted amino acid residue is not one encoded by the genetic code, in which a substituent group is included, in which the mature polypeptide is fused with another compound, such as a compound to increase the half-life of the polypeptide (e.g., polyethylene glycol), or in which additional amino acids are fused to the mature polypeptide, such as a leader or secretory sequence or a sequence for purification of the mature polypeptide or a pro-protein sequence.

[0327] Known protein modifications include, but are not limited to, acetylation, acylation, ADP-ribosylation, amidation, covalent attachment of flavin, covalent attachment of a heme moiety, covalent attachment of a nucleotide or nucleotide derivative, covalent attachment of a lipid or lipid derivative, covalent attachment of phosphotidylinositol, cross-linking, cyclization, disulfide bond formation, demethylation, formation of covalent crosslinks, formation of cystine, formation of pyroglutamate, formylation, gamma carboxylation, glycosylation, GPI anchor formation, hydroxylation, iodination, methylation, myristoylation, oxidation, proteolytic processing, phosphorylation, prenylation, racemization, selenoylation, sulfation, transfer-RNA mediated addition of amino acids to proteins such as arginylation, and ubiquitination.

[0328] Such protein modifications are well known to those of skill in the art and have been described in great detail in the scientific literature. Several particularly common modifications, glycosylation, lipid attachment, sulfation, gamma-carboxylation of glutamic acid residues, hydroxylation and ADP-ribosylation, for instance, are described in most basic texts, such as Proteins—Structure and Molecular Properties, 2nd Ed., T. E. Creighton, W. H. Freeman and Company, New York (1993); Wold, F., Posttranslational Covalent Modification of Proteins, B. C. Johnson, Ed., Academic Press, New York 1-12 (1983); Seifter et al., Meth. Enzymol. 182: 626-646 (1990); and Rattan et al., Ann. N.Y Acad. Sci. 663:48-62 (1992).

[0329] The present invention further provides fragments of the variant proteins in which the fragments contain one or more amino acid sequence variations (e.g., substitutions, or truncations or extensions due to creation or destruction of a stop codon) encoded by one or more SNPs disclosed herein. The fragments to which the invention pertains, however, are not to be construed as encompassing fragments that have been disclosed in the prior art prior to the present invention.

[0330] As used herein, a fragment may comprise at least about 4, 8, 10, 12, 14, 16, 18, 20, 25, 30, 50, 100 (or any other number in-between) or more contiguous amino acid residues from a variant protein, wherein at least one amino acid residue is affected by a SNP of the present invention, e.g., a variant amino acid residue encoded by a nonsynonymous nucleotide substitution at a cSNP position provided by the present invention. The variant amino acid encoded by a cSNP may occupy any residue position along the sequence of the fragment. Such fragments can be chosen based on the ability to retain one or more of the biological activities of the variant protein or the ability to perform a function, e.g., act as an immunogen. Particularly important fragments are biologically active fragments. Such fragments will typically comprise a domain or motif of a variant protein of the present invention, e.g., active site, transmembrane domain, or ligand/substrate binding domain. Other fragments include, but are not limited to, domain or motif-containing fragments, soluble peptide fragments, and fragments containing immunogenic structures. Predicted domains and functional sites are readily identifiable by computer programs well known to those of skill in the art (e.g., PROSFIE analysis) (Current Protocols in Protein Science, John Wiley & Sons, N.Y. (2002)).

[0331] Uses of Variant Proteins

[0332] The variant proteins of the present invention can be used in a variety of ways, including but not limited to, in assays to determine the biological activity of a variant protein, such as in a panel of multiple proteins for high-throughput screening; to raise antibodies or to elicit another type of immune response; as a reagent (including the labeled reagent) in assays designed to quantitatively determine levels of the variant protein (or its binding partner) in biological fluids; as a marker for cells or tissues in which it is preferentially expressed (either constitutively or at a particular stage of tissue differentiation or development or in a disease state); as a target for screening for a therapeutic agent; and as a direct therapeutic agent to be administered into a human subject. Any of the variant proteins disclosed herein may be developed into reagent grade or kit format for commercialization as research products. Methods for performing the uses listed above are well known to those skilled in the art (see, e.g., Molecular Cloning: A Laboratory Manual, Cold Spring Harbor Laboratory Press, Sambrook and Russell, 2000, and Methods in Enzymology: Guide to Molecular Cloning Techniques, Academic Press, Berger, S. L. and A. R. Kimmel eds., 1987).

[0333] In a specific embodiment of the invention, the methods of the present invention include detection of one or more variant proteins disclosed herein. Variant proteins are disclosed in Table 1 and in the Sequence Listing as SEQ ID NOS: 434-866. Detection of such proteins can be accomplished using, for example, antibodies, small molecule compounds, aptamers, ligands/substrates, other proteins or protein fragments, or other protein-binding agents. Preferably, protein detection agents are specific for a variant protein of the present invention and can therefore discriminate between a variant protein of the present invention and the wild-type protein or another variant form. This can generally be accomplished by, for example, selecting or designing detection agents that bind to the region of a protein that differs between the variant and wild-type protein, such as a region of a protein that contains one or more amino acid substitutions that is/are encoded by a non-synonymous cSNP of the present invention, or a region of a protein that follows a nonsense mutation-type SNP that creates a stop codon thereby leading to a shorter polypeptide, or a region of a protein that follows a read-through mutation-type SNP that destroys a stop codon thereby leading to a longer polypeptide in which a portion of the polypeptide is present in one version of the polypeptide but not the other.

[0334] In another specific aspect of the invention, the variant proteins of the present invention are used as targets for diagnosing Alzheimer's disease or for determining predisposition to Alzheimer's disease in a human. Accordingly, the invention provides methods for detecting the presence of, or levels of, one or more variant proteins of the present invention in a cell, tissue, or organism. Such methods typically involve contacting a test sample with an agent (e.g., an antibody, small molecule compound, or peptide) capable of interacting with the variant protein such that specific binding of the agent to the variant protein can be detected. Such an assay can be provided in a single detection format or a multi-detection format such as an array, for example, an antibody or aptamer array (arrays for protein detection may also be referred to as “protein chips”). The variant protein of interest can be isolated from a test sample and assayed for the presence of a variant amino acid sequence encoded by one or more SNPs disclosed by the present invention. The SNPs may cause changes to the protein and the corresponding protein function/activity, such as through non-synonymous substitutions in protein coding regions that can lead to amino acid substitutions, deletions, insertions, and/or rearrangements; formation or destruction of stop codons; or alteration of control elements such as promoters. SNPs may also cause inappropriate post-translational modifications.

[0335] One preferred agent for detecting a variant protein in a sample is an antibody capable of selectively binding to a variant form of the protein (antibodies are described in greater detail in the next section). Such samples include, for example, tissues, cells, and biological fluids isolated from a subject, as well as tissues, cells and fluids present within a subject.

[0336] In vitro methods for detection of the variant proteins associated with Alzheimer's disease that are disclosed herein and fragments thereof include, but are not limited to, enzyme linked immunosorbent assays (ELISAs), radioimmunoassays (RIA), Western blots, immunoprecipitations, immunofluorescence, and protein arrays/chips (e.g., arrays of antibodies or aptamers).

[0337] Additional analytic methods of detecting amino acid variants include, but are not limited to, altered electrophoretic mobility, altered tryptic peptide digest, altered protein activity in cell-based or cell-free assay, alteration in ligand or antibody-binding pattern, altered isoelectric point, and direct amino acid sequencing.

[0338] Alternatively, variant proteins can be detected in vivo in a subject by introducing into the subject a labeled antibody (or other type of detection reagent) specific for a variant protein. For example, the antibody can be labeled with a radioactive marker whose presence and location in a subject can be detected by standard imaging techniques.

[0339] Other uses of the variant peptides of the present invention are based on the class or action of the protein. For example, proteins isolated from humans and their mammalian orthologs serve as targets for identifying agents (e.g., small molecule drugs or antibodies) for use in therapeutic applications, particularly for modulating a biological or pathological response in a cell or tissue that expresses the protein. Pharmaceutical agents can be developed that modulate protein activity.

[0340] As an alternative to modulating gene expression, therapeutic compounds can be developed that modulate protein function. For example, many SNPs disclosed herein affect the amino acid sequence of the encoded protein (e.g., non-synonymous cSNPs and nonsense mutation-type SNPs). Such alterations in the encoded amino acid sequence may affect protein function, particularly if such amino acid sequence variations occur in functional protein domains, such as catalytic domains, ATP-binding domains, or ligand/substrate binding domains. It is well established in the art that variant proteins having amino acid sequence variations in functional domains can cause or influence pathological conditions. In such instances, compounds (e.g., small molecule drugs or antibodies) can be developed that target the variant protein and modulate (e.g., up- or down-regulate) protein function/activity.

[0341] The therapeutic methods of the present invention further include methods that target one or more variant proteins of the present invention. Variant proteins can be targeted using, for example, small molecule compounds, antibodies, aptamers, ligands/substrates, other proteins, or other protein-binding agents. Additionally, the skilled artisan will recognize that the novel protein variants (and polymorphic nucleic acid molecules) disclosed in Table 1 may themselves be directly used as therapeutic agents by acting as competitive inhibitors of corresponding art-known proteins (or nucleic acid molecules such as mRNA molecules).

[0342] The variant proteins of the present invention are particularly useful in drug screening assays, in cell-based or cell-free systems. Cell-based systems can utilize cells that naturally express the protein, a biopsy specimen, or cell cultures. In one embodiment, cell-based assays involve recombinant host cells expressing the variant protein. Cell-free assays can be used to detect the ability of a compound to directly bind to a variant protein or to the corresponding SNP-containing nucleic acid fragment that encodes the variant protein.

[0343] A variant protein of the present invention, as well as appropriate fragments thereof, can be used in high-throughput screening assays to test candidate compounds for the ability to bind and/or modulate the activity of the variant protein. These candidate compounds can be further screened against a protein having normal function (e.g., a wild-type/non-variant protein) to further determine the effect of the compound on the protein activity. Furthermore, these compounds can be tested in animal or invertebrate systems to determine in vivo activity/effectiveness. Compounds can be identified that activate (agonists) or inactivate (antagonists) the variant protein, and different compounds can be identified that cause various degrees of activation or inactivation of the variant protein.

[0344] Further, the variant proteins can be used to screen a compound for the ability to stimulate or inhibit interaction between the variant protein and a target molecule that normally interacts with the protein. The target can be a ligand, a substrate or a binding partner that the protein normally interacts with (for example, epinephrine or norepinephrine). Such assays typically include the steps of combining the variant protein with a candidate compound under conditions that allow the variant protein, or fragment thereof, to interact with the target molecule, and to detect the formation of a complex between the protein and the target or to detect the biochemical consequence of the interaction with the variant protein and the target, such as any of the associated effects of signal transduction.

[0345] Candidate compounds include, for example, 1) peptides such as soluble peptides, including Ig-tailed fusion peptides and members of random peptide libraries (see, e.g., Lam et al., Nature 354:82-84 (1991); Houghten et al., Nature 354:84-86 (1991)) and combinatorial chemistry-derived molecular libraries made of D- and/or L-configuration amino acids; 2) phosphopeptides (e.g., members of random and partially degenerate, directed phosphopeptide libraries, see, e.g., Songyang et al., Cell 72:767-778 (1993)); 3) antibodies (e.g., polyclonal, monoclonal, humanized, anti-idiotypic, chimeric, and single chain antibodies as well as Fab, F(ab′)₂, Fab expression library fragments, and epitope-binding fragments of antibodies); and 4) small organic and inorganic molecules (e.g., molecules obtained from combinatorial and natural product libraries).

[0346] One candidate compound is a soluble fragment of the variant protein that competes for ligand binding. Other candidate compounds include mutant proteins or appropriate fragments containing mutations that affect variant protein function and thus compete for ligand. Accordingly, a fragment that competes for ligand, for example with a higher affinity, or a fragment that binds ligand but does not allow release, is encompassed by the invention.

[0347] The invention further includes other end point assays to identify compounds that modulate (stimulate or inhibit) variant protein activity. The assays typically involve an assay of events in the signal transduction pathway that indicate protein activity. Thus, the expression of genes that are up or down-regulated in response to the variant protein dependent signal cascade can be assayed. In one embodiment, the regulatory region of such genes can be operably linked to a marker that is easily detectable, such as luciferase. Alternatively, phosphorylation of the variant protein, or a variant protein target, could also be measured. Any of the biological or biochemical functions mediated by the variant protein can be used as an endpoint assay. These include all of the biochemical or biological events described herein, in the references cited herein, incorporated by reference for these endpoint assay targets, and other functions known to those of ordinary skill in the art.

[0348] Binding and/or activating compounds can also be screened by using chimeric variant proteins in which an amino terminal extracellular domain or parts thereof, an entire transmembrane domain or subregions, and/or the carboxyl terminal intracellular domain or parts thereof, can be replaced by heterologous domains or subregions. For example, a substrate-binding region can be used that interacts with a different substrate than that which is normally recognized by a variant protein. Accordingly, a different set of signal transduction components is available as an end-point assay for activation. This allows for assays to be performed in other than the specific host cell from which the variant protein is derived.

[0349] The variant proteins are also useful in competition binding assays in methods designed to discover compounds that interact with the variant protein. Thus, a compound can be exposed to a variant protein under conditions that allow the compound to bind or to otherwise interact with the variant protein. A binding partner, such as ligand, that normally interacts with the variant protein is also added to the mixture. If the test compound interacts with the variant protein or its binding partner, it decreases the amount of complex formed or activity from the variant protein. This type of assay is particularly useful in screening for compounds that interact with specific regions of the variant protein (Hodgson, Bioltechnology, 1992, Sep. 10(9), 973-80).

[0350] To perform cell-free drug screening assays, it is sometimes desirable to immobilize either the variant protein or a fragment thereof, or its target molecule, to facilitate separation of complexes from uncomplexed forms of one or both of the proteins, as well as to accommodate automation of the assay. Any method for immobilizing proteins on matrices can be used in drug screening assays. In one embodiment, a fusion protein containing an added domain allows the protein to be bound to a matrix. For example, glutathione-S-transferase/¹²⁵I fusion proteins can be adsorbed onto glutathione sepharose beads (Sigma Chemical, St. Louis, Mo.) or glutathione derivatized microtitre plates, which are then combined with the cell lysates (e.g., ³⁵S-labeled) and a candidate compound, such as a drug candidate, and the mixture incubated under conditions conducive to complex formation (e.g., at physiological conditions for salt and pH). Following incubation, the beads can be washed to remove any unbound label, and the matrix immobilized and radiolabel determined directly, or in the supernatant after the complexes are dissociated. Alternatively, the complexes can be dissociated from the matrix, separated by SDS-PAGE, and the level of bound material found in the bead fraction quantitated from the gel using standard electrophoretic techniques.

[0351] Either the variant protein or its target molecule can be immobilized utilizing conjugation of biotin and streptavidin. Alternatively, antibodies reactive with the variant protein but which do not interfere with binding of the variant protein to its target molecule can be derivatized to the wells of the plate, and the variant protein trapped in the wells by antibody conjugation. Preparations of the target molecule and a candidate compound are incubated in the variant protein-presenting wells and the amount of complex trapped in the well can be quantitated. Methods for detecting such complexes, in addition to those described above for the GST-immobilized complexes, include immunodetection of complexes using antibodies reactive with the protein target molecule, or which are reactive with variant protein and compete with the target molecule, and enzyme-linked assays that rely on detecting an enzymatic activity associated with the target molecule.

[0352] Modulators of variant protein activity identified according to these drug screening assays can be used to treat a subject with a disorder mediated by the protein pathway, such as Alzheimer's disease. These methods of treatment typically include the steps of administering the modulators of protein activity in a pharmaceutical composition to a subject in need of such treatment.

[0353] The variant proteins, or fragments thereof, disclosed herein can themselves be directly used to treat a disorder characterized by an absence of, inappropriate, or unwanted expression or activity of the variant protein. Accordingly, methods for treatment include the use of a variant protein disclosed herein or fragments thereof.

[0354] In yet another aspect of the invention, variant proteins can be used as “bait proteins” in a two-hybrid assay or three-hybrid assay (see, e.g., U.S. Pat. No. 5,283,317; Zervos et al. (1993) Cell 72:223-232; Madura et al. (1993) J. Biol. Chem. 268:12046-12054; Bartel et al. (1993) Biotechniques 14:920-924; Iwabuchi et al. (1993) Oncogene 8:1693-1696; and Brent WO94/10300) to identify other proteins that bind to or interact with the variant protein and are involved in variant protein activity. Such variant protein-binding proteins are also likely to be involved in the propagation of signals by the variant proteins or variant protein targets as, for example, elements of a protein-mediated signaling pathway. Alternatively, such variant protein-binding proteins are inhibitors of the variant protein.

[0355] The two-hybrid system is based on the modular nature of most transcription factors, which typically consist of separable DNA-binding and activation domains. Briefly, the assay typically utilizes two different DNA constructs. In one construct, the gene that codes for a variant protein is fused to a gene encoding the DNA binding domain of a known transcription factor (e.g., GAL-4). In the other construct, a DNA sequence, from a library of DNA sequences, that encodes an unidentified protein (“prey” or “sample”) is fused to a gene that codes for the activation domain of the known transcription factor. If the “bait” and the “prey” proteins are able to interact, in vivo, forming a variant protein-dependent complex, the DNA-binding and activation domains of the transcription factor are brought into close proximity. This proximity allows transcription of a reporter gene (e.g., LacZ) that is operably linked to a transcriptional regulatory site responsive to the transcription factor. Expression of the reporter gene can be detected, and cell colonies containing the functional transcription factor can be isolated and used to obtain the cloned gene that encodes the protein that interacts with the variant protein.

[0356] Antibodies Directed to Variant Proteins

[0357] The present invention also provides antibodies that selectively bind to the variant proteins disclosed herein and fragments thereof. Such antibodies may be used to quantitatively or qualitatively detect the variant proteins of the present invention. As used herein, an antibody selectively binds a target variant protein when it binds the variant protein and does not significantly bind to non-variant proteins, i.e., the antibody does not significantly bind to normal, wild-type, or art-known proteins that do not contain a variant amino acid sequence due to one or more SNPs of the present invention (variant amino acid sequences may be due to, for example, nonsynonymous cSNPs, nonsense SNPs that create a stop codon, thereby causing a truncation of a polypeptide or SNPs that cause read-through mutations resulting in an extension of a polypeptide).

[0358] As used herein, an antibody is defined in terms consistent with that recognized in the art: they are multi-subunit proteins produced by an organism in response to an antigen challenge. The antibodies of the present invention include both monoclonal antibodies and polyclonal antibodies, as well as antigen-reactive proteolytic fragments of such antibodies, such as Fab, F(ab)′₂, and Fv fragments. In addition, an antibody of the present invention further includes any of a variety of engineered antigen-binding molecules such as a chimeric antibody (U.S. Pat. Nos. 4,816,567 and 4,816,397; Morrison et al., Proc. Natl. Acad. Sci. USA, 81:6851, 1984; Neuberger et al., Nature 312:604, 1984), a humanized antibody (U.S. Pat. Nos. 5,693,762; 5,585,089; and 5,565,332), a single-chain Fv (U.S. Pat. No. 4,946,778; Ward et al., Nature 334:544, 1989), a bispecific antibody with two binding specificities (Segal et al., J. Immunol. Methods 248:1, 2001; Carter, J. Immunol. Methods 248:7, 2001), a diabody, a triabody, and a tetrabody (Todorovska et al., J. Immunol. Methods, 248:47, 2001), as well as a Fab conjugate (dimer or trimer), and a minibody.

[0359] Many methods are known in the art for generating and/or identifying antibodies to a given target antigen (Harlow, Antibodies, Cold Spring Harbor Press, (1989)). In general, an isolated peptide (e.g., a variant protein of the present invention) is used as an immunogen and is administered to a mammalian organism, such as a rat, rabbit, hamster or mouse. Either a full-length protein, an antigenic peptide fragment (e.g., a peptide fragment containing a region that varies between a variant protein and a corresponding wild-type protein), or a fusion protein can be used. A protein used as an immunogen may be naturally-occurring, synthetic or recombinantly produced, and may be administered in combination with an adjuvant, including but not limited to, Freund's (complete and incomplete), mineral gels such as aluminum hydroxide, surface active substance such as lysolecithin, pluronic polyols, polyanions, peptides, oil emulsions, keyhole limpet hemocyanin, dinitrophenol, and the like.

[0360] Monoclonal antibodies can be produced by hybridoma technology (Kohler and Milstein, Nature, 256:495, 1975), which immortalizes cells secreting a specific monoclonal antibody. The immortalized cell lines can be created in vitro by fusing two different cell types, typically lymphocytes, and tumor cells. The hybridoma cells may be cultivated in vitro or in vivo. Additionally, fully human antibodies can be generated by transgenic animals (He et al., J. Immunol., 169:595, 2002). Fd phage and Fd phagemid technologies may be used to generate and select recombinant antibodies in vitro (Hoogenboom and Chames, Immunol. Today 21:371, 2000; Liu et al., J. Mol. Biol. 315:1063, 2002). The complementarity-determining regions of an antibody can be identified, and synthetic peptides corresponding to such regions may be used to mediate antigen binding (U.S. Pat. No. 5,637,677).

[0361] Antibodies are preferably prepared against regions or discrete fragments of a variant protein containing a variant amino acid sequence as compared to the corresponding wild-type protein (e.g., a region of a variant protein that includes an amino acid encoded by a nonsynonymous cSNP, a region affected by truncation caused by a nonsense SNP that creates a stop codon, or a region resulting from the destruction of a stop codon due to read-through mutation caused by a SNP). Furthermore, preferred regions will include those involved in function/activity and/or protein/binding partner interaction. Such fragments can be selected on a physical property, such as fragments corresponding to regions that are located on the surface of the protein, e.g., hydrophilic regions, or can be selected based on sequence uniqueness, or based on the position of the variant amino acid residue(s) encoded by the SNPs provided by the present invention. An antigenic fragment will typically comprise at least about 8-10 contiguous amino acid residues in which at least one of the amino acid residues is an amino acid affected by a SNP disclosed herein. The antigenic peptide can comprise, however, at least 12, 14, 16, 20, 25, 50, 100 (or any other number in-between) or more amino acid residues, provided that at least one amino acid is affected by a SNP disclosed herein.

[0362] Detection of an antibody of the present invention can be facilitated by coupling (i.e., physically linking) the antibody or an antigen-reactive fragment thereof to a detectable substance. Detectable substances include, but are not limited to, various enzymes, prosthetic groups, fluorescent materials, luminescent materials, bioluminescent materials, and radioactive materials. Examples of suitable enzymes include horseradish peroxidase, alkaline phosphatase, β-galactosidase, or acetylcholinesterase; examples of suitable prosthetic group complexes include streptavidin/biotin and avidin/biotin; examples of suitable fluorescent materials include umbelliferone, fluorescein, fluorescein isothiocyanate, rhodamine, dichlorotriazinylamine fluorescein, dansyl chloride or phycoerythrin; an example of a luminescent material includes luminol; examples of bioluminescent materials include luciferase, luciferin, and aequorin, and examples of suitable radioactive material include ¹²⁵I, ¹³¹I, ³⁵S or ³H.

[0363] Antibodies, particularly the use of antibodies as therapeutic agents, are reviewed in: Morgan, “Antibody therapy for Alzheimer's disease”, Expert Rev Vaccines. February 2003;2(1):53-9; Ross et al., “Anticancer antibodies”, Am J Clin Pathol. April 2003;119(4):472-85; Goldenberg, “Advancing role of radiolabeled antibodies in the therapy of cancer”, Cancer Immunol Immunother. May 2003;52(5):281-96. Epub 2003 Mar. 11; Ross et al., “Antibody-based therapeutics in oncology”, Expert Rev Anticancer Ther. February 2003;3(1): 107-21; Cao et al., “Bispecific antibody conjugates in therapeutics”, Adv Drug Deliv Rev. 2003 Feb. 10;55(2): 171-97; von Mehren et al., “Monoclonal antibody therapy for cancer”, Annu Rev Med. 2003;54:343-69. Epub 2001 Dec. 03; Hudson et al., “Engineered antibodies”, Nat Med. January 2003;9(1): 129-34; Brekke et al., “Therapeutic antibodies for human diseases at the dawn of the twenty-first century”, Nat Rev Drug Discov. January 2003;2(1):52-62 (Erratum in: Nat Rev Drug Discov. March 2003;2(3):240); Houdebine, “Antibody manufacture in transgenic animals and comparisons with other systems”, Curr Opin Biotechnol. December 2002;13(6):625-9; Andreakos et al., “Monoclonal antibodies in immune and inflammatory diseases”, Curr Opin Biotechnol. December 2002;13(6):615-20; Kellermann et al., “Antibody discovery: the use of transgenic mice to generate human monoclonal antibodies for therapeutics”, Curr Opin Biotechnol. December 2002;13(6):593-7; Pini et al., “Phage display and colony filter screening for high-throughput selection of antibody libraries”, Comb Chem High Throughput Screen. November 2002;5(7):503-10; Batra et al., “Pharmacokinetics and biodistribution of genetically engineered antibodies”, Curr Opin Biotechnol. December 2002;13(6):603-8; and Tangri et al., “Rationally engineered proteins or antibodies with absent or reduced immunogenicity”, Curr Med Chem. December 2002;9(24):2191-9.

[0364] Uses of Antibodies

[0365] Antibodies can be used to isolate the variant proteins of the present invention from a natural cell source or from recombinant host cells by standard techniques, such as affinity chromatography or immunoprecipitation. In addition, antibodies are useful for detecting the presence of a variant protein of the present invention in cells or tissues to determine the pattern of expression of the variant protein among various tissues in an organism and over the course of normal development or disease progression. Further, antibodies can be used to detect variant protein in situ, in vitro, in a bodily fluid, or in a cell lysate or supernatant in order to evaluate the amount and pattern of expression. Also, antibodies can be used to assess abnormal tissue distribution, abnormal expression during development, or expression in an abnormal condition, such as Alzheimer's disease. Additionally, antibody detection of circulating fragments of the full-length variant protein can be used to identify turnover.

[0366] Antibodies to the variant proteins of the present invention are also useful in pharmacogenomic analysis. Thus, antibodies against variant proteins encoded by alternative SNP alleles can be used to identify individuals that require modified treatment modalities.

[0367] Further, antibodies can be used to assess expression of the variant protein in disease states such as in active stages of the disease or in an individual with a predisposition to a disease related to the protein's function, particularly Alzheimer's disease. Antibodies specific for a variant protein encoded by a SNP-containing nucleic acid molecule of the present invention can be used to assay for the presence of the variant protein, such as to screen for predisposition to Alzheimer's disease as indicated by the presence of the variant protein.

[0368] Antibodies are also useful as diagnostic tools for evaluating the variant proteins in conjunction with analysis by electrophoretic mobility, isoelectric point, tryptic peptide digest, and other physical assays well known in the art.

[0369] Antibodies are also useful for tissue typing. Thus, where a specific variant protein has been correlated with expression in a specific tissue, antibodies that are specific for this protein can be used to identify a tissue type.

[0370] Antibodies can also be used to assess aberrant subcellular localization of a variant protein in cells in various tissues. The diagnostic uses can be applied, not only in genetic testing, but also in monitoring a treatment modality. Accordingly, where treatment is ultimately aimed at correcting the expression level or the presence of variant protein or aberrant tissue distribution or developmental expression of a variant protein, antibodies directed against the variant protein or relevant fragments can be used to monitor therapeutic efficacy.

[0371] The antibodies are also useful for inhibiting variant protein function, for example, by blocking the binding of a variant protein to a binding partner. These uses can also be applied in a therapeutic context in which treatment involves inhibiting a variant protein's function. An antibody can be used, for example, to block or competitively inhibit binding, thus modulating (agonizing or antagonizing) the activity of a variant protein. Antibodies can be prepared against specific variant protein fragments containing sites required for function or against an intact variant protein that is associated with a cell or cell membrane. For in vivo administration, an antibody may be linked with an additional therapeutic payload such as a radionuclide, an enzyme, an immunogenic epitope, or a cytotoxic agent. Suitable cytotoxic agents include, but are not limited to, bacterial toxin such as diphtheria, and plant toxin such as ricin. The in vivo half-life of an antibody or a fragment thereof may be lengthened by pegylation through conjugation to polyethylene glycol (leong et al., Cytokine 16:106, 2001).

[0372] The invention also encompasses kits for using antibodies, such as kits for detecting the presence of a variant protein in a test sample. An exemplary kit can comprise antibodies such as a labeled or labelable antibody and a compound or agent for detecting variant proteins in a biological sample; means for determining the amount, or presence/absence of variant protein in the sample; means for comparing the amount of variant protein in the sample with a standard; and instructions for use.

[0373] Vectors and Host Cells

[0374] The present invention also provides vectors containing the SNP-containing nucleic acid molecules described herein. The term “vector” refers to a vehicle, preferably a nucleic acid molecule, which can transport a SNP-containing nucleic acid molecule. When the vector is a nucleic acid molecule, the SNP-containing nucleic acid molecule can be covalently linked to the vector nucleic acid. Such vectors include, but are not limited to, a plasmid, single or double stranded phage, a single or double stranded RNA or DNA viral vector, or artificial chromosome, such as a BAC, PAC, YAC, or MAC.

[0375] A vector can be maintained in a host cell as an extrachromosomal element where it replicates and produces additional copies of the SNP-containing nucleic acid molecules. Alternatively, the vector may integrate into the host cell genome and produce additional copies of the SNP-containing nucleic acid molecules when the host cell replicates.

[0376] The invention provides vectors for the maintenance (cloning vectors) or vectors for expression (expression vectors) of the SNP-containing nucleic acid molecules. The vectors can function in prokaryotic or eukaryotic cells or in both (shuttle vectors).

[0377] Expression vectors typically contain cis-acting regulatory regions that are operably linked in the vector to the SNP-containing nucleic acid molecules such that transcription of the SNP-containing nucleic acid molecules is allowed in a host cell. The SNP-containing nucleic acid molecules can also be introduced into the host cell with a separate nucleic acid molecule capable of affecting transcription. Thus, the second nucleic acid molecule may provide a trans-acting factor interacting with the cis-regulatory control region to allow transcription of the SNP-containing nucleic acid molecules from the vector. Alternatively, a trans-acting factor may be supplied by the host cell. Finally, a trans-acting factor can be produced from the vector itself. It is understood, however, that in some embodiments, transcription and/or translation of the nucleic acid molecules can occur in a cell-free system.

[0378] The regulatory sequences to which the SNP-containing nucleic acid molecules described herein can be operably linked include promoters for directing mRNA transcription. These include, but are not limited to, the left promoter from bacteriophage X, the lac, TRP, and TAC promoters from E. coli, the early and late promoters from SV40, the CMV immediate early promoter, the adenovirus early and late promoters, and retrovirus long-terminal repeats.

[0379] In addition to control regions that promote transcription, expression vectors may also include regions that modulate transcription, such as repressor binding sites and enhancers. Examples include the SV40 enhancer, the cytomegalovirus immediate early enhancer, polyoma enhancer, adenovirus enhancers, and retrovirus LTR enhancers.

[0380] In addition to containing sites for transcription initiation and control, expression vectors can also contain sequences necessary for transcription termination and, in the transcribed region, a ribosome-binding site for translation. Other regulatory control elements for expression include initiation and termination codons as well as polyadenylation signals. A person of ordinary skill in the art would be aware of the numerous regulatory sequences that are useful in expression vectors (see, e.g., Sambrook and Russell, 2000, Molecular Cloning: A Laboratory Manual, Cold Spring Harbor Laboratory Press, Cold Spring Harbor, N.Y.).

[0381] A variety of expression vectors can be used to express a SNP-containing nucleic acid molecule. Such vectors include chromosomal, episomal, and virus-derived vectors, for example, vectors derived from bacterial plasmids, from bacteriophage, from yeast episomes, from yeast chromosomal elements, including yeast artificial chromosomes, from viruses such as baculoviruses, papovaviruses such as SV40, Vaccinia viruses, adenoviruses, poxviruses, pseudorabies viruses, and retroviruses. Vectors can also be derived from combinations of these sources such as those derived from plasmid and bacteriophage genetic elements, e.g., cosmids and phagemids. Appropriate cloning and expression vectors for prokaryotic and eukaryotic hosts are described in Sambrook and Russell, 2000, Molecular Cloning: A Laboratory Manual, Cold Spring Harbor Laboratory Press, Cold Spring Harbor, N.Y.

[0382] The regulatory sequence in a vector may provide constitutive expression in one or more host cells (e.g., tissue specific expression) or may provide for inducible expression in one or more cell types such as by temperature, nutrient additive, or exogenous factor, e.g., a hormone or other ligand. A variety of vectors that provide constitutive or inducible expression of a nucleic acid sequence in prokaryotic and eukaryotic host cells are well known to those of ordinary skill in the art.

[0383] A SNP-containing nucleic acid molecule can be inserted into the vector by methodology well-known in the art. Generally, the SNP-containing nucleic acid molecule that will ultimately be expressed is joined to an expression vector by cleaving the SNP-containing nucleic acid molecule and the expression vector with one or more restriction enzymes and then ligating the fragments together. Procedures for restriction enzyme digestion and ligation are well known to those of ordinary skill in the art.

[0384] The vector containing the appropriate nucleic acid molecule can be introduced into an appropriate host cell for propagation or expression using well-known techniques. Bacterial host cells include, but are not limited to, E. coli, Streptomyces, and Salmonella typhimurium. Eukaryotic host cells include, but are not limited to, yeast, insect cells such as Drosophila, animal cells such as COS and CHO cells, and plant cells.

[0385] As described herein, it may be desirable to express the variant peptide as a fusion protein. Accordingly, the invention provides fusion vectors that allow for the production of the variant peptides. Fusion vectors can, for example, increase the expression of a recombinant protein, increase the solubility of the recombinant protein, and aid in the purification of the protein by acting, for example, as a ligand for affinity purification. A proteolytic cleavage site may be introduced at the junction of the fusion moiety so that the desired variant peptide can ultimately be separated from the fusion moiety. Proteolytic enzymes suitable for such use include, but are not limited to, factor Xa, thrombin, and enterokinase. Typical fusion expression vectors include pGEX (Smith et al., Gene 67:31-40 (1988)), pMAL (New England Biolabs, Beverly, Mass.) and pRIT5 (Pharmacia, Piscataway, N.J.) which fuse glutathione S-transferase (GST), maltose E binding protein, or protein A, respectively, to the target recombinant protein. Examples of suitable inducible non-fusion E. coli expression vectors include pTrc (Amann et al., Gene 69:301-315 (1988)) and pET 11d (Studier et al., Gene Expression Technology: Methods in Enzymology 185:60-89 (1990)).

[0386] Recombinant protein expression can be maximized in a bacterial host by providing a genetic background wherein the host cell has an impaired capacity to proteolytically cleave the recombinant protein (Gottesman, S., Gene Expression Technology: Methods in Enzymology 185, Academic Press, San Diego, Calif. (1990) 119-128). Alternatively, the sequence of the SNP-containing nucleic acid molecule of interest can be altered to provide preferential codon usage for a specific host cell, for example, E. coli (Wada et al., Nucleic Acids Res. 20:2111-2118 (1992)).

[0387] The SNP-containing nucleic acid molecules can also be expressed by expression vectors that are operative in yeast. Examples of vectors for expression in yeast (e.g., S. cerevisiae) include pYepSec1 (Baldari, et al., EMBO J. 6:229-234 (1987)), pMFa (Kuijan et al., Cell 30:933-943(1982)), pJRY88 (Schultz et al., Gene 54:113-123 (1987)), and pYES2 (Invitrogen Corporation, San Diego, Calif.).

[0388] The SNP-containing nucleic acid molecules can also be expressed in insect cells using, for example, baculovirus expression vectors. Baculovirus vectors available for expression of proteins in cultured insect cells (e.g., Sf 9 cells) include the pAc series (Smith et al., Mol. Cell Biol. 3:2156-2165 (1983)) and the pVL series (Lucklow et al., Virology 170:31-39 (1989)).

[0389] In certain embodiments of the invention, the SNP-containing nucleic acid molecules described herein are expressed in mammalian cells using mammalian expression vectors.

[0390] Examples of mammalian expression vectors include pCDM8 (Seed, B. Nature 329:840(1987)) and pMT2PC (Kaufman et al., EMBO J. 6:187-195 (1987)).

[0391] The invention also encompasses vectors in which the SNP-containing nucleic acid molecules described herein are cloned into the vector in reverse orientation, but operably linked to a regulatory sequence that permits transcription of antisense RNA. Thus, an antisense transcript can be produced to the SNP-containing nucleic acid sequences described herein, including both coding and non-coding regions. Expression of this antisense RNA is subject to each of the parameters described above in relation to expression of the sense RNA (regulatory sequences, constitutive or inducible expression, tissue-specific expression). The invention also relates to recombinant host cells containing the vectors described herein. Host cells therefore include, for example, prokaryotic cells, lower eukaryotic cells such as yeast, other eukaryotic cells such as insect cells, and higher eukaryotic cells such as mammalian cells.

[0392] The recombinant host cells can be prepared by introducing the vector constructs described herein into the cells by techniques readily available to persons of ordinary skill in the art. These include, but are not limited to, calcium phosphate transfection, DEAE-dextran-mediated transfection, cationic lipid-mediated transfection, electroporation, transduction, infection, lipofection, and other techniques such as those described in Sambrook and Russell, 2000, Molecular Cloning: A Laboratory Manual, Cold Spring Harbor Laboratory, Cold Spring Harbor Laboratory Press, Cold Spring Harbor, N.Y.).

[0393] Host cells can contain more than one vector. Thus, different SNP-containing nucleotide sequences can be introduced in different vectors into the same cell. Similarly, the SNP-containing nucleic acid molecules can be introduced either alone or with other nucleic acid molecules that are not related to the SNP-containing nucleic acid molecules, such as those providing trans-acting factors for expression vectors. When more than one vector is introduced into a cell, the vectors can be introduced independently, co-introduced, or joined to the nucleic acid molecule vector.

[0394] In the case of bacteriophage and viral vectors, these can be introduced into cells as packaged or encapsulated virus by standard procedures for infection and transduction. Viral vectors can be replication-competent or replication-defective. In the case in which viral replication is defective, replication can occur in host cells that provide functions that complement the defects.

[0395] Vectors generally include selectable markers that enable the selection of the subpopulation of cells that contain the recombinant vector constructs. The marker can be inserted in the same vector that contains the SNP-containing nucleic acid molecules described herein or may be in a separate vector. Markers include, for example, tetracycline or ampicillin-resistance genes for prokaryotic host cells, and dihydrofolate reductase or neomycin resistance genes for eukaryotic host cells. However, any marker that provides selection for a phenotypic trait can be effective.

[0396] While the mature variant proteins can be produced in bacteria, yeast, mammalian cells, and other cells under the control of the appropriate regulatory sequences, cell-free transcription and translation systems can also be used to produce these variant proteins using RNA derived from the DNA constructs described herein.

[0397] Where secretion of the variant protein is desired, which is difficult to achieve with multi-transmembrane domain containing proteins such as G-protein-coupled receptors (GPCRs), appropriate secretion signals can be incorporated into the vector. The signal sequence can be endogenous to the peptides or heterologous to these peptides.

[0398] Where the variant protein is not secreted into the medium, the protein can be isolated from the host cell by standard disruption procedures, including freeze/thaw, sonication, mechanical disruption, use of lysing agents, and the like. The variant protein can then be recovered and purified by well-known purification methods including, for example, ammonium sulfate precipitation, acid extraction, anion or cationic exchange chromatography, phosphocellulose chromatography, hydrophobic-interaction chromatography, affinity chromatography, hydroxylapatite chromatography, lectin chromatography, or high performance liquid chromatography.

[0399] It is also understood that, depending upon the host cell in which recombinant production of the variant proteins described herein occurs, they can have various glycosylation patterns, or may be non-glycosylated, as when produced in bacteria. In addition, the variant proteins may include an initial modified methionine in some cases as a result of a host-mediated process.

[0400] Uses of Vectors and Host Cells, and Transgenic Animals

[0401] Recombinant host cells that express the variant proteins described herein have a variety of uses. For example, the cells are useful for producing a variant protein that can be further purified into a preparation of desired amounts of the variant protein or fragments thereof. Thus, host cells containing expression vectors are useful for variant protein production.

[0402] Host cells are also useful for conducting cell-based assays involving the variant protein or variant protein fragments, such as those described above as well as other formats known in the art. Thus, a recombinant host cell expressing a variant protein is useful for assaying compounds that stimulate or inhibit variant protein function. Such an ability of a compound to modulate variant protein function may not be apparent from assays of the compound on the native/wild-type protein, or from cell-free assays of the compound. Recombinant host cells are also useful for assaying functional alterations in the variant proteins as compared with a known function.

[0403] Genetically-engineered host cells can be further used to produce non-human transgenic animals. A transgenic animal is preferably a non-human mammal, for example, a rodent, such as a rat or mouse, in which one or more of the cells of the animal include a transgene. A transgene is exogenous DNA containing a SNP of the present invention which is integrated into the genome of a cell from which a transgenic animal develops and which remains in the genome of the mature animal in one or more of its cell types or tissues. Such animals are useful for studying the function of a variant protein in vivo, and identifying and evaluating modulators of variant protein activity. Other examples of transgenic animals include, but are not limited to, non-human primates, sheep, dogs, cows, goats, chickens, and amphibians. Transgenic non-human mammals such as cows and goats can be used to produce variant proteins which can be secreted in the animal's milk and then recovered.

[0404] A transgenic animal can be produced by introducing a SNP-containing nucleic acid molecule into the male pronuclei of a fertilized oocyte, e.g., by microinjection or retroviral infection, and allowing the oocyte to develop in a pseudopregnant female foster animal.

[0405] Any nucleic acid molecules that contain one or more SNPs of the present invention can potentially be introduced as a transgene into the genome of a non-human animal. Any of the regulatory or other sequences useful in expression vectors can form part of the transgenic sequence. This includes intronic sequences and polyadenylation signals, if not already included. A tissue-specific regulatory sequence(s) can be operably linked to the transgene to direct expression of the variant protein in particular cells or tissues.

[0406] Methods for generating transgenic animals via embryo manipulation and microinjection, particularly animals such as mice, have become conventional in the art and are described in, for example, U.S. Pat. Nos. 4,736,866 and 4,870,009, both by Leder et al., U.S. Pat. No. 4,873,191 by Wagner et al., and in Hogan, B., Manipulating the Mouse Embryo, (Cold Spring Harbor Laboratory Press, Cold Spring Harbor, N.Y., 1986). Similar methods are used for production of other transgenic animals. A transgenic founder animal can be identified based upon the presence of the transgene in its genome and/or expression of transgenic mRNA in tissues or cells of the animals. A transgenic founder animal can then be used to breed additional animals carrying the transgene. Moreover, transgenic animals carrying a transgene can further be bred to other transgenic animals carrying other transgenes. A transgenic animal also includes a non-human animal in which the entire animal or tissues in the animal have been produced using the homologously recombinant host cells described herein.

[0407] In another embodiment, transgenic non-human animals can be produced which contain selected systems that allow for regulated expression of the transgene. One example of such a system is the cre/loxP recombinase system of bacteriophage P1 (Lakso et al. PNAS 89:6232-6236 (1992)). Another example of a recombinase system is the FLP recombinase system of S. cerevisiae (O'Gorman et al. Science 251:1351-1355 (1991)). If a cre/loxP recombinase system is used to regulate expression of the transgene, animals containing transgenes encoding both the Cre recombinase and a selected protein are generally needed. Such animals can be provided through the construction of “double” transgenic animals, e.g., by mating two transgenic animals, one containing a transgene encoding a selected variant protein and the other containing a transgene encoding a recombinase.

[0408] Clones of the non-human transgenic animals described herein can also be produced according to the methods described in, for example, Wilmut, I. et al. Nature 385:810-813 (1997) and PCT International Publication Nos. WO 97/07668 and WO 97/07669. In brief, a cell (e.g., a somatic cell) from the transgenic animal can be isolated and induced to exit the growth cycle and enter Gₒ phase. The quiescent cell can then be fused, e.g., through the use of electrical pulses, to an enucleated oocyte from an animal of the same species from which the quiescent cell is isolated. The reconstructed oocyte is then cultured such that it develops to morula or blastocyst and then transferred to pseudopregnant female foster animal. The offspring born of this female foster animal will be a clone of the animal from which the cell (e.g., a somatic cell) is isolated.

[0409] Transgenic animals containing recombinant cells that express the variant proteins described herein are useful for conducting the assays described herein in an in vivo context. Accordingly, the various physiological factors that are present in vivo and that could influence ligand or substrate binding, variant protein activation, signal transduction, or other processes or interactions, may not be evident from in vitro cell-free or cell-based assays. Thus, non-human transgenic animals of the present invention may be used to assay in vivo variant protein function as well as the activities of a therapeutic agent or compound that modulates variant protein function/activity or expression. Such animals are also suitable for assessing the effects of null mutations (i.e., mutations that substantially or completely eliminate one or more variant protein functions).

### COMPUTER-RELATED EMBODIMENTS

[0410] The SNPs provided in the present invention may be “provided” in a variety of mediums to facilitate use thereof. As used in this section, “provided” refers to a manufacture, other than an isolated nucleic acid molecule, that contains SNP information of the present invention. Such a manufacture provides the SNP information in a form that allows a skilled artisan to examine the manufacture using means not directly applicable to examining the SNPs or a subset thereof as they exist in nature or in purified form. The SNP information that may be provided in such a form includes any of the SNP information provided by the present invention such as, for example, polymorphic nucleic acid and/or amino acid sequence information such as SEQ ID NOS:1-433, SEQ ID NOS:434-866, SEQ ID NOS:6752-7071, SEQ ID NOS:867-6751, and SEQ ID NOS:7072-54,769; information about observed SNP alleles, alternative codons, populations, allele frequencies, SNP types, and/or affected proteins; or any other information provided by the present invention in Tables 1-2 and/or the Sequence Listing.

[0411] In one application of this embodiment, the SNPs of the present invention can be recorded on a computer readable medium. As used herein, “computer readable medium” refers to any medium that can be read and accessed directly by a computer. Such media include, but are not limited to: magnetic storage media, such as floppy discs, hard disc storage medium, and magnetic tape; optical storage media such as CD-ROM; electrical storage media such as RAM and ROM; and hybrids of these categories such as magnetic/optical storage media. A skilled artisan can readily appreciate how any of the presently known computer readable media can be used to create a manufacture comprising computer readable medium having recorded thereon a nucleotide sequence of the present invention. One such medium is provided with the present application, namely, the present application contains computer readable medium (CD-R) that has nucleic acid sequences (and encoded protein sequences) containing SNPs provided/recorded thereon in ASCII text format in a Sequence Listing along with accompanying Tables that contain detailed SNP and sequence information (transcript sequences are provided as SEQ ID NOS:1-433, protein sequences are provided as SEQ ID NOS:434-866, genomic sequences are provided as SEQ ID NOS:6752-7071, transcript-based context sequences are provided as SEQ ID NOS:867-6751, and genomic-based context sequences are provided as SEQ ID NOS:7072-54,769).

[0412] As used herein, “recorded” refers to a process for storing information on computer readable medium. A skilled artisan can readily adopt any of the presently known methods for recording information on computer readable medium to generate manufactures comprising the SNP information of the present invention.

[0413] A variety of data storage structures are available to a skilled artisan for creating a computer readable medium having recorded thereon a nucleotide or amino acid sequence of the present invention. The choice of the data storage structure will generally be based on the means chosen to access the stored information. In addition, a variety of data processor programs and formats can be used to store the nucleotide/amino acid sequence information of the present invention on computer readable medium. For example, the sequence information can be represented in a word processing text file, formatted in commercially-available software such as WordPerfect and Microsoft Word, represented in the form of an ASCII file, or stored in a database application, such as OB2, Sybase, Oracle, or the like. A skilled artisan can readily adapt any number of data processor structuring formats (e.g., text file or database) in order to obtain computer readable medium having recorded thereon the SNP information of the present invention.

[0414] By providing the SNPs of the present invention in computer readable form, a skilled artisan can routinely access the SNP information for a variety of purposes. Computer software is publicly available which allows a skilled artisan to access sequence information provided in a computer readable medium. Examples of publicly available computer software include BLAST (Altschul et at, J. Mol. Biol. 215:403-410 (1990)) and BLAZE (Brutlag et at, Comp. Chem. 17:203-207 (1993)) search algorithms.

[0415] The present invention further provides systems, particularly computer-based systems, which contain the SNP information described herein. Such systems may be designed to store and/or analyze information on, for example, a large number of SNP positions, or information on SNP genotypes from a large number of individuals. The SNP information of the present invention represents a valuable information source. The SNP information of the present invention stored/analyzed in a computer-based system may be used for such computer-intensive applications as determining or analyzing SNP allele frequencies in a population, mapping disease genes, genotype-phenotype association studies, grouping SNPs into haplotypes, correlating SNP haplotypes with response to particular drugs, or for various other bioinformatic, pharmacogenomic, drug development, or human identification/forensic applications.

[0416] As used herein, “a computer-based system” refers to the hardware means, software means, and data storage means used to analyze the SNP information of the present invention. The minimum hardware means of the computer-based systems of the present invention typically comprises a central processing unit (CPU), input means, output means, and data storage means. A skilled artisan can readily appreciate that any one of the currently available computer-based systems are suitable for use in the present invention. Such a system can be changed into a system of the present invention by utilizing the SNP information provided on the CD-R, or a subset thereof, without any experimentation.

[0417] As stated above, the computer-based systems of the present invention comprise a data storage means having stored therein SNPs of the present invention and the necessary hardware means and software means for supporting and implementing a search means. As used herein, “data storage means” refers to memory which can store SNP information of the present invention, or a memory access means which can access manufactures having recorded thereon the SNP information of the present invention.

[0418] As used herein, “search means” refers to one or more programs or algorithms that are implemented on the computer-based system to identify or analyze SNPs in a target sequence based on the SNP information stored within the data storage means. Search means can be used to determine which nucleotide is present at a particular SNP position in the target sequence. As used herein, a “target sequence” can be any DNA sequence containing the SNP position(s) to be searched or queried.

[0419] As used herein, “a target structural motif,” or “target motif,” refers to any rationally selected sequence or combination of sequences containing a SNP position in which the sequence(s) is chosen based on a three-dimensional configuration that is formed upon the folding of the target motif. There are a variety of target motifs known in the art. Protein target motifs include, but are not limited to, enzymatic active sites and signal sequences. Nucleic acid target motifs include, but are not limited to, promoter sequences, hairpin structures, and inducible expression elements (protein binding sequences).

[0420] A variety of structural formats for the input and output means can be used to input and output the information in the computer-based systems of the present invention. An exemplary format for an output means is a display that depicts the presence or absence of specified nucleotides (alleles) at particular SNP positions of interest. Such presentation can provide a rapid, binary scoring system for many SNPs simultaneously.

[0421] One exemplary embodiment of a computer-based system comprising SNP information of the present invention is provided in FIG. 1. FIG. 1 provides a block diagram of a computer system 102 that can be used to implement the present invention. The computer system 102 includes a processor 106 connected to a bus 104. Also connected to the bus 104 are a main memory 108 (preferably implemented as random access memory, RAM) and a variety of secondary storage devices 110, such as a hard drive 112 and a removable medium storage device 114. The removable medium storage device 114 may represent, for example, a floppy disk drive, a CD-ROM drive, a magnetic tape drive, etc. A removable storage medium 116 (such as a floppy disk, a compact disk, a magnetic tape, etc.) containing control logic and/or data recorded therein may be inserted into the removable medium storage device 114. The computer system 102 includes appropriate software for reading the control logic and/or the data from the removable storage medium 116 once inserted in the removable medium storage device 114.

[0422] The SNP information of the present invention may be stored in a well-known manner in the main memory 108, any of the secondary storage devices 110, and/or a removable storage medium 116. Software for accessing and processing the SNP information (such as SNP scoring tools, search tools, comparing tools, etc.) preferably resides in main memory 108 during execution.

### EXAMPLES

### Statistical Analysis of SNP Association with Alzheimer's Disease

[0423] A case-control genetic study to determine the association of SNPs in the human genome with late onset Alzheimer's Disease (LOAD) was carried out using genomic DNA extracted from 3 independently collected case-control sample sets, totaling 2285 samples (1089 cases and 1196 controls). The majority of SNPs analyzed in these samples were located on chromosome 9, chromosome 10, and chromosome 12. All patients (cases) were diagnosed with Alzheimer's disease according to NINCDS-ADRDA or related criteria (McKhann et al. 1984, Neurology 34:939-44). Controls underwent MMSE testing. All individuals who were included into the study had signed a written informed consent form. The study protocol was IRB approved.

[0424] DNA was extracted from blood samples, using conventional DNA extraction methods like the QIA-amp kit from Qiagen. Genotypes were obtained on a PRISM 7900HT sequence detection PCR system (Applied Biosystems) by allele-specific PCR, similar to the method described by Germer et al (Germer S., Holland M. J., Higuchi R. 2000, Genome Res. 10: 258-266). Primers for the allele-specific PCR reactions are described in Table 5.

[0425] Summary statistics for demographic and environmental traits, APOE allelic and genotypic frequencies, and allele frequencies for the tested SNPs were obtained, and compared between cases and controls. No multiple testing corrections were made.

[0426] Significant association was observed between APOE and AD status in all 3 sample sets. For example in sample set 1, the odds ratio for the APOE ε34 genotype vs. ε33 genotype was 3.1 (95% CI 2.22-4.34) while the odds ratio for ε44 vs. ε33 genotype was 9.74 (95% CI 3.74-35.33). P-value for genotypic association test was <0.0001. Allele frequency for APOE ε4 was 31.2% in cases and 13.4% in controls. The odds ratio for APOE ε4 genotypes also compared closely with what has been reported in the literature.

[0427] Several tests of association were calculated for both non-stratified and stratified settings: 1) asymptotic chi-square test of allelic association, 2) asymptotic chi-square test of genotypic association, taking three different modes of inheritance into account (dominant, recessive and additive), 3) Cochran-Mantel-Haenszel test (Categorical Data Analysis by Alan Agresti published by Wiley InterScience, 1990) for stratified analyses. Allelic and genotypic p-values were calculated for the combined samples after stratification for sample-set, gender, age of disease onset, and ApoE4 genotype. 4) exact test of Hardy-Weinberg equilibrium (HWE) for cases and controls.

[0428] As LOAD is a complex disease that is influenced by APOE genotype, age, and gender, the above analyses were adjusted for the effects of these factors, as indicated in Tables 6-7. P-values, adjusted for these covariates, were considered significant at the level of <0.05.

[0429] Effect sizes were estimated through allelic odds ratios and odds ratios for dominant and recessive models, including 95% confidence intervals. Homogeneity of Cochran-Mantel-Haenszel odds ratios was tested across different strata using the Breslow-Day test. The reported allele1 may be under-represented in cases (with a lower allele frequency in cases than in controls, indicating that the minor allele is associated with decreased risk and the major allele is a risk factor for disease) or over-represented in cases (indicating that the minor allele is a risk factor in the development of disease).

[0430] A SNP was considered to be a significant genetic marker if it exhibited a p-value<0.05 in the allelic association test or in any of the 3 genotypic tests (dominant, recessive, additive). SNPs with significant HWE violations in both cases and controls (p<1×10⁻⁴ in both tests) were not considered for further analysis, since significant deviation from HWE in both cases and controls for individual markers can be indicative of genotyping errors. The association of a marker with Alzheimer's disease was considered replicated if the marker exhibits an allelic or genotypic association test p-value<0.05 in one of the sample sets and the same test and strata are significant (p<0.05) in either one or two other independent sample sets, or the Cochran-Mantel-Haenszel p-value was significant (p<0.05) for the combined data of the other two sample sets for the same test and strata. SNPs that fall in this category are listed in Table 6.

[0431] SNP-strata combinations that are not listed in Table 6, but were significant in one sample set (p<0.05) with the allelic or genotypic association test and the Cochran-Mantel-Haenzsel test was significant (p<0.01) with the same test and same strata when all available sample set data were analyzed together, are listed in Table 7.

[0432] An example of a replicated marker, where the minor allele is associated with increased risk for Alzheimer's disease is hCV8227677 (Table 6). hCV8227677 shows significant association with all individuals (strata=“ALL”) of sample set 1 and the “ALL” strata of the jointly analyzed sample sets 2 & 3. In addition, the female (“male=0”), the APOE4 present (“apoe4=1”), and both age of onset substrata (“age_ge75=0”, “age_ge75=1”) are significantly associated for this marker in 2 independent, non overlapping sample sets. The “ALL” strata for sample set 1 shows significant Cochran-Mantel-Haenszel p-values (corrected for APOE4 status, gender, and age of disease onset) in the allelic (p=0.00601), the additive genotypic (p=0.00587), and the recessive genotypic tests (p=0.00001). The dominant genotypic test is not significant (p=0.9775). The “ALL” strata of the combined sample sets 2 and 3 confirm the sample set 1 results with significant Cochran-Mantel-Haenszel test p-values (corrected for sample set, APOE4 status, gender, and age of disease onset) in the allelic (p=0.00016), additive genotypic (p=0.00017), and the recessive genotypic test (p=0.00324). The allelic and recessive odds ratios for hCV8227677 show similar effects in these sample sets, indicating the C-allele as risk factor, and thereby further strengthening the association of this marker with Alzheimer's disease (sample set 1: OR allelic=1.37 (95% CI=1.09-1.71), OR recessive=2.35 (95% CI=1.61-3.43); sample sets 2 and 3 combined: OR allelic=1.41 (95% CI=1.18-1.69), OR recessive=1.59 (95% CI=1.17-2.16)). The odds ratios are based on the minor allele as observed in the control samples (i.e. C-allele for hCV8227677).

[0433] The association of reduced risk with Alzheimer's disease for the G-allele of marker hCV286937 has been replicated in the “ALL” strata and the “male=1” substratum analysis (Table 6). In the male substratum analysis, the significant Cochran-Mantel-Haenszel test p-values (p<0.05) for sample set 1 are replicated in the combined sample sets 2 and 3 for the allelic, additive genotypic, and dominant genotypic tests (p<0.05). The G-allele confers reduced disease risk, based on similar allelic and dominant odds ratios (OR allelic=0.4/0.46; OR dominant=0.34/0.44; sample set 1/sample sets 2 and 3) in the male substratum of sample set 1 and the combined sample sets 2 and 3.

[0434] All publications and patents cited in this specification are herein incorporated by reference in their entirety. Various modifications and variations of the described compositions, methods and systems of the invention will be apparent to those skilled in the art without departing from the scope and spirit of the invention. Although the invention has been described in connection with specific preferred embodiments and certain working examples, it should be understood that the invention as claimed should not be unduly limited to such specific embodiments. Indeed, various modifications of the above-described modes for carrying out the invention that are obvious to those skilled in the field of molecular biology, genetics and related fields are intended to be within the scope of the following claims.

TABLE 5

| | Allele | | | |
|---|---|---|---|---|
| hCV | 1 | Sequence A | Sequence B | Sequence C |
| hCV1027219 | A | ACCCAGTGCTTGTATCAGAA | TACCCAGTGCTTGTATCAGAT | CAGACTCTGGGTCACAGTGA |
| | | (SEQ ID NO: 54770) | (SEQ ID NO: 54771) | (SEQ ID NO: 54772) |
| hCV1054616 | G | ACAGAGTAATCTAGAATGCAAAGG | ACAGAGTAATCTAGAATGCAAAGC | TGCAGTACCCATCGTGTATTT |
| | | (SEQ ID NO: 54773) | (SEQ ID NO: 54774) | (SEQ ID NO: 54775) |
| hCV11192460 | A | AACAACATTGCTTCCCAA | AACAACATTGCTTCCCAG | TGCCCTTTTTCAGAATC |
| | | (SEQ ID NO: 54776) | (SEQ ID NO: 54777) | (SEQ ID NO: 54778) |
| hCV11193939 | G | CAGAAACTCCGAGGAGACA | AGAAACTCCGAGGAGACG | CCCTGGGTGCAGACATT |
| | | (SEQ ID NO: 54779) | (SEQ ID NO: 54780) | (SEQ ID NO: 54781) |
| hCV11200217 | T | AAGGCACTGAGAGATTCAGTAAC | AAGGCACTGAGAGATTCAGTAAT | AAACAGGAGCTGAGAGAGAATACTA |
| | | (SEQ ID NO: 54782) | (SEQ ID NO: 54783) | (SEQ ID NO: 54784) |
| hCV11214738 | C | ATTGATGGCACAACTCTGA | TGATGGCACAACTCTGC | TCAGAGGGCTTCCTCTTCT |
| | | (SEQ ID NO: 54785) | (SEQ ID NO: 54786) | (SEQ ID NO: 54787) |
| hCV11214795 | A | CCATTCCCACTCTAGACTTGA | CATTCCCACTCTAGACTTGG | GACACTTCCATCAAAGCAGTATTA |
| | | (SEQ ID NO: 54788) | (SEQ ID NO: 54789) | (SEQ ID NO: 54790) |
| hCV11278562 | T | CCAAATGCCACTGAACG | ACCAAATGCCACTGAACA | TTTGCTAAACAATTCCTCACTACT |
| | | (SEQ ID NO: 54791) | (SEQ ID NO: 54792) | (SEQ ID NO: 54793) |
| hCV11396215 | G | TTTTAGTAGGCCTATAACTTAAGGG | AATTTTAGTAGGCCTATAACTTAAGGT | CAGCAGGGACAAATCTCTAATC |
| | | (SEQ ID NO: 54794) | (SEQ ID NO: 54795) | (SEQ ID NO: 54796) |
| hCV11566355 | G | CTGTTGCTTCTTTTTGTCTTG | TCTGTTGCTTCTTTTTGTCTTC | CAAATGATGACCTCTCAGTCTATT |
| | | (SEQ ID NO: 54797) | (SEQ ID NO: 54798) | (SEQ ID NO: 54799) |
| hCV11568644 | G | ACAGTTTCCTCAATCTTTTCC | TAACAGTTTCCTCAATCTTTTCA | CATGTTGCCAAAATATGATTATAA |
| | | (SEQ ID NO: 54800) | (SEQ ID NO: 54801) | (SEQ ID NO: 54802) |
| hCV11574282 | A | GCTGGACACGAACCAT | GCTGGACACGAACCAC | GCACCCCCTGGAACAG |
| | | (SEQ ID NO: 54803) | (SEQ ID NO: 54804) | (SEQ ID NO: 54805) |
| hCV11595547 | C | AGAAGAAGCCCTGTACTCAAC | AGAAGAAGCCCTGTACTCAAG | TTGTGGAATGCATTTCTAATTATAT |
| | | (SEQ ID NO: 54806) | (SEQ ID NO: 54807) | (SEQ ID NO: 54808) |
| hCV11597077 | A | GAAGTTCTTACCACACTGACTACA | GAAGTTCTTACCACACTGACTACC | AATAACTGTGGGAAAATACTTAACAC |
| | | (SEQ ID NO: 54809) | (SEQ ID NO: 54810) | (SEQ ID NO: 54811) |
| hCV11597077 | A | GAAGTTCTTACCACACTGACTACA | GAAGTTCTTACCACACTGACTACC | AGAAACCCTGTGACCATAATA |
| | | (SEQ ID NO: 54812) | (SEQ ID NO: 54813) | (SEQ ID NO: 54814) |
| hCV11597236 | T | CAACATTGCAAGATGCC | GCAACATTGCAAGATGCT | TTTTGACAAACAAAGTCACTTAGAC |
| | | (SEQ ID NO: 54815) | (SEQ ID NO: 54816) | (SEQ ID NO: 54817) |
| hCV11720402 | T | TGGGAAATTCAAGGCG | CTGGGAAATTCAAGGCA | TTTAAGTCCTGGGTAAACTAAATAGA |
| | | (SEQ ID NO: 54818) | (SEQ ID NO: 54819) | (SEQ ID NO: 54820) |
| hCV11720789 | T | GGCATGGCAGGACTACG | GGCATGGCAGGACTACA | GGACTCCAAAGGAAGGTCAA |
| | | (SEQ ID NO: 54821) | (SEQ ID NO: 54822) | (SEQ ID NO: 54823) |
| hCV11840248 | T | ACAATATGCCTAAGATCCCG | AACAATATGCCTAAGATCCCA | CAGATGAAGAAACTGAGTCATAGAG |
| | | (SEQ ID NO: 54824) | (SEQ ID NO: 54825) | (SEQ ID NO: 54826) |
| hCV11841396 | A | ATAAGTCTTTTATCACCTTTAGGCTA | AGTCTTTTATCACCTTTAGGCTG | AATCAATTGGCAAATAAGAATGTA |
| | | (SEQ ID NO: 54827) | (SEQ ID NO: 54828) | (SEQ ID NO: 54829) |
| hCV11842860 | T | GGGATTCCAAGCTGACG | AAGGGATTCCAAGCTGACT | GGGAAGGCCAGGTTCTAC |
| | | (SEQ ID NO: 54830) | (SEQ ID NO: 54831) | (SEQ ID NO: 54832) |
| hCV11855743 | A | GATGTCCCATCTATTAGATGAGT | ATGTCCCATCTATTAGATGAGC | CGCAAACCTTTCTGAAGATATTA |
| | | (SEQ ID NO: 54833) | (SEQ ID NO: 54834) | (SEQ ID NO: 54835) |
| hCV11861096 | C | TAAATTAGCACAAGGGAACTTC | TAAATTAGCACAAGGGAACTTT | AATGGCATGCACAGATCTTA |
| | | (SEQ ID NO: 54836) | (SEQ ID NO: 54837) | (SEQ ID NO: 54838) |
| hCV1191260 | G | GGAGCCGGCAAGCA | GAGCCGGCAAGCG | GGCCTGGTCTGGTTTCAG |
| | | (SEQ ID NO: 54839) | (SEQ ID NO: 54840) | (SEQ ID NO: 54841) |
| hCV12029086 | T | GCACCGTCCTTCG | CGCACCGTCCTTCA | GCAAGTGTGGAGTAGCTTTCTG |
| | | (SEQ ID NO: 54842) | (SEQ ID NO: 54843) | (SEQ ID NO: 54844) |
| hCV12123244 | C | TCATCAGGTAACTGATTTCCTC | TCATCAGGTAACTGATTTCCTT | TGGCACTGCTGTGTGTCT |
| | | (SEQ ID NO: 54845) | (SEQ ID NO: 54846) | (SEQ ID NO: 54847) |
| hCV1212623 | C | AACAGTTGTTCTTGTGAATCATC | ACAGTTGTTCTTGTGAATCATG | CCATTGCCAGAAAATGACT |
| | | (SEQ ID NO: 54848) | (SEQ ID NO: 54849) | (SEQ ID NO: 54850) |
| hCV1212684 | T | CTTTCCGAACAATCTGGG | TACTTTCCGAACAATCTGGA | AGCTCTGGGAAACAAATGTC |
| | | (SEQ ID NO: 54851) | (SEQ ID NO: 54852) | (SEQ ID NO: 54853) |
| hCV12126867 | A | CAGGTCCATGACCAACAA | CAGGTCCATGACCAACAC | GGACATCATCCCTACATCTACTAGT |
| | | (SEQ ID NO: 54854) | (SEQ ID NO: 54855) | (SEQ ID NO: 54856) |
| hCV1229667 | C | AGGTGAGTGTCAGGTGC | CAGGTGAGTGTCAGGTGT | GACCTTGAGTTTCTGTTCACATAC |
| | | (SEQ ID NO: 54857) | (SEQ ID NO: 54858) | (SEQ ID NO: 54859) |
| hCV1229682 | A | CAAAGGAATTTCAGGAGGAA | CAAAGGAATTTCAGGAGGAG | GCCATAGCCAGCAATCAC |
| | | (SEQ ID NO: 54860) | (SEQ ID NO: 54861) | (SEQ ID NO: 54862) |
| hCV1229777 | A | GGGGATACAGTGCCTGA | GGGGATACAGTGCCTGC | ACCTCCTGAGGACAAGTCAC |
| | | (SEQ ID NO: 54863) | (SEQ ID NO: 54864) | (SEQ ID NO: 54865) |
| hCV1244849 | C | CGGGAGTACTGAGGGAGAC | CGGGAGTACTGAGGGAGAG | CAGGGTGAGGATTTCATCAG |
| | | (SEQ ID NO: 54866) | (SEQ ID NO: 54867) | (SEQ ID NO: 54868) |
| hCV1305685 | A | GAGATAAAGGCAAGGAGTCT | AGATAAAGGCAAGGAGTCA | TCCTGAATGCTGCTCTTCT |
| | | (SEQ ID NO: 54869) | (SEQ ID NO: 54870) | (SEQ ID NO: 54871) |
| hCV1322419 | A | GCCTCTGGGATGAAAAAGA | CCTCTGGGATGAAAAAGC | GCAGGAGCCTGGGTTCT |
| | | (SEQ ID NO: 54872) | (SEQ ID NO: 54873) | (SEQ ID NO: 54874) |
| hCV1345818 | T | GAGAGTCTCCTCTCCTCTAAGG | GGAGAGTCTCCTCTCCTCTAAGT | TGCATCCCAAGATTTGTTG |
| | | (SEQ ID NO: 54875) | (SEQ ID NO: 54876) | (SEQ ID NO: 54877) |
| hCV1345858 | C | TAAAGATTTACCTATTTGGTGGAG | AAAGATTTACCTATTTGGTGGAA | CAGTCAGGGAGAAGAGAAGATC |
| | | (SEQ ID NO: 54878) | (SEQ ID NO: 54879) | (SEQ ID NO: 54880) |
| hCV1345864 | A | GGTTTTCAGTGACATCCA | GTTTTCAGTGACATCCG | TGTTCTTTTTCTCTAAAGTATCTTT |
| | | (SEQ ID NO: 54881) | (SEQ ID NO: 54882) | (SEQ ID NO: 54883) |
| hCV1348542 | G | CCTTTTAAATGGTAGGGAGAGTAT | CCTTTTAAATGGTAGGGAGAGTAC | CAAAGCTTGGGAATGTTTTC |
| | | (SEQ ID NO: 54884) | (SEQ ID NO: 54885) | (SEQ ID NO: 54886) |
| hCV1406876 | C | CTACTGTACCTTTCCAACTTATCC | GCTACTGTACCTTTCCAACTTATCT | TTAACTTGTTTTTGCTGTCTTACAG |
| | | (SEQ ID NO: 54887) | (SEQ ID NO: 54888) | (SEQ ID NO: 54889) |
| hCV1413258 | A | TAGGAGGGTGAAAAGTGGA | GGAGGGTGAAAAGTGGG | GGCAGCGTGCTCAGAC |
| | | (SEQ ID NO: 54890) | (SEQ ID NO: 54891) | (SEQ ID NO: 54892) |
| hCV1419932 | G | CTAGGCAGTCTGCCTCAAC | CTAGGCAGTCTGCCTCAAG | AATTAAAGAATTTGTGATCAATGTACT |
| | | (SEQ ID NO: 54893) | (SEQ ID NO: 54894) | (SEQ ID NO: 54895) |
| hCV1489917 | C | ACTTCCTGAGGCTGTAGATG | CACTTCCTGAGGCTGTAGATA | GCCAACTTACCATTTGATTTTAG |
| | | (SEQ ID NO: 54896) | (SEQ ID NO: 54897) | (SEQ ID NO: 54898) |
| hCV1507426 | G | CAGCTACATTGCTTCTCTTACTTA | AGCTACATTGCTTCTCTTACTTG | TGTCTTACCCAACAAAAAGTTAGT |
| | | (SEQ ID NO: 54899) | (SEQ ID NO: 54900) | (SEQ ID NO: 54901) |
| hCV1558518 | G | AAAGCCACTTTGAAATCCTC | AAGCCACTTTGAAATCCTG | AGTTCCTGCTTTGCTTTACAG |
| | | (SEQ ID NO: 54902) | (SEQ ID NO: 54903) | (SEQ ID NO: 54904) |
| hCV1558531 | C | CCATGGTGATTGCCTC | CCATGGTGATTGCCTT | ATTCCTCGAGCTGTGAGATT |
| | | (SEQ ID NO: 54905) | (SEQ ID NO: 54906) | (SEQ ID NO: 54907) |
| hCV15806020 | C | CTATCAAACCGTATGCTCTTAAG | CTATCAAACCGTATGCTCTTAAC | AATCGTAAATGGGAGATAGATACTC |
| | | (SEQ ID NO: 54908) | (SEQ ID NO: 54909) | (SEQ ID NO: 54910) |
| hCV15811970 | T | TGGCAGCGTGTGTGG | TTTGGCAGCGTGTGTGT | TCTAGTCCCCCTGACTCTGTT |
| | | (SEQ ID NO: 54911) | (SEQ ID NO: 54912) | (SEQ ID NO: 54913) |
| hCV15870743 | T | CGCAATTCCATTCCTAGC | CCGCAATTCCATTCCTAGT | GCCAGGGCAGCAATCT |
| | | (SEQ ID NO: 54914) | (SEQ ID NO: 54915) | (SEQ ID NO: 54916) |
| hCV15873426 | T | TTGCAGGTCCTTATCCAA | CTTGCAGGTCCTTATCCAT | GAGGGACAAATTCCTTCTTG |
| | | (SEQ ID NO: 54917) | (SEQ ID NO: 54918) | (SEQ ID NO: 54919) |
| hCV15887512 | A | AAGCAGTCCAGGATGGTA | AGCAGTCCAGGATGGTG | TCTACGTGGGATGAACAGAAG |
| | | (SEQ ID NO: 54920) | (SEQ ID NO: 54921) | (SEQ ID NO: 54922) |
| hCV15887521 | T | CCAATACTTCCTCTTTAGCTTG | ACCAATACTTCCTCTTTAGCTTT | TCAGGTGGTGGACATCATAC |
| | | (SEQ ID NO: 54923) | (SEQ ID NO: 54924) | (SEQ ID NO: 54925) |
| hCV15887528 | T | GGGCACTTAACAATGGAG | GGGCACTTAACAATGGAA | GGGTGGTACATTCTCAAGTAAAA |
| | | (SEQ ID NO: 54926) | (SEQ ID NO: 54927) | (SEQ ID NO: 54928) |
| hCV15919456 | A | ATGGCTCACTTTTTATTCCAT | ATGGCTCACTTTTTATTCCAC | CTGCAGACGCTGAGAACTATAG |
| | | (SEQ ID NO: 54929) | (SEQ ID NO: 54930) | (SEQ ID NO: 54931) |
| hCV15961334 | C | GCTTACTTGTTGGTCTGTGAC | GCTTACTTGTTGGTCTGTGAT | CCTGAACCTGGTTTCAAATATA |
| | | (SEQ ID NO: 54932) | (SEQ ID NO: 54933) | (SEQ ID NO: 54934) |
| hCV15965240 | G | TACACTACACTTTCTGTTTCAACTTA | ACTACACTTTCTGTTTCAACTTG | CTTGAGGTTCATGAGAATGTAATC |
| | | (SEQ ID NO: 54935) | (SEQ ID NO: 54936) | (SEQ ID NO: 54937) |
| hCV16111152 | C | TCCCTTCTGGGTTGTTTATC | TCCCTTCTGGGTTGTTTATT | TCCTCCAAACAGAACAGGTT |
| | | (SEQ ID NO: 54938) | (SEQ ID NO: 54939) | (SEQ ID NO: 54940) |
| hCV16113167 | A | GGGTTTTGGTCTGAGCA | GGGTTTTGGTCTGAGCG | TCAACGTCCAAATCTGACTTTA |
| | | (SEQ ID NO: 54941) | (SEQ ID NO: 54942) | (SEQ ID NO: 54943) |
| hCV16190971 | A | AGCGACTCCTGAGTGACTT | AGCGACTCCTGAGTGACTC | ACATAGCCTGGGAGTAATGAA |
| | | (SEQ ID NO: 54944) | (SEQ ID NO: 54945) | (SEQ ID NO: 54946) |
| hCV16221181 | T | TTTATTCTTCATCTGGCATTC | ATTTTATTCTTCATCTGGCATTA | TGAACACAGGGCTTTATACTAGATA |
| | | (SEQ ID NO: 54947) | (SEQ ID NO: 54948) | (SEQ ID NO: 54949) |
| hCV16248263 | T | ATCTTGAAAGGTTACGTGATG | CAATCTTGAAAGGTTACGTGATA | AACCTTAGCAACACTAATTTGTTCT |
| | | (SEQ ID NO: 54950) | (SEQ ID NO: 54951) | (SEQ ID NO: 54952) |
| hCV16248299 | G | CCCTGGGCTTTATTTCC | CCCTGGGCTTTATTTCG | TGCTGAGTCCCAAAGACTATTT |
| | | (SEQ ID NO: 54953) | (SEQ ID NO: 54954) | SEQ ID NO: 54955) |
| hCV16289132 | C | AATTGTGGAAATGCTGTCG | AAATTGTGGAAATGCTGTCA | CTTTGAGGTGCTCAATGTCA |
| | | (SEQ ID NO: 54956) | (SEQ ID NO: 54957) | (SEQ ID NO: 54958) |
| hCV1651379 | A | GACCCTACAGAGCAGCAGA | ACCCTACAGAGCAGCAGG | CATTGCTACTATTCCTTGATGTG |
| | | (SEQ ID NO: 54959) | (SEQ ID NO: 54960) | (SEQ ID NO: 54961) |
| hCV1665140 | C | AACTCAGACGAAATTGACCC | GAACTCAGACGAAATTGACCT | AATAGGTACTCCATGAAAATATGTTG |
| | | (SEQ ID NO: 54962) | (SEQ ID NO: 54963) | (SEQ ID NO: 54964) |
| hCV1665253 | T | CCACATTCCCTTGTTTAGTC | CCACATTCCCTTGTTTAGTT | CCTTACTCTGGCTTTCAATCAC |
| | | (SEQ ID NO: 54965) | (SEQ ID NO: 54966) | (SEQ ID NO: 54967) |
| hCV1687563 | G | CATCAGAGCTTTTTCCTTTG | CATCAGAGCTTTTTCCTTTC | CCACTTCCCCTCTTCTTTC |
| | | (SEQ ID NO: 54968) | (SEQ ID NO: 54969) | (SEQ ID NO: 54970) |
| hCV1780695 | A | CGTAAGGTTTTTCTTCTGTTACCT | GTAAGGTTTTTCTTCTGTTACCC | TGTTTCCCTTCCTCTAGAGATATACT |
| | | (SEQ ID NO: 54971) | (SEQ ID NO: 54972) | (SEQ ID NO: 54973) |
| hCV1791780 | G | AAGAAAACCTATTACCAAGTATTTAC | AGAAAACCTATTACCAAGTATTTACTATAC | CCTGAGGTTGTTTCACAATTAAC |
| | | TATAT (SEQ ID NO: 54974) | (SEQ ID NO: 54975) | (SEQ ID NO: 54976) |
| hCV1792842 | C | GGTCATAATCTGGTCATCAG | GGTCATAATCTGGTCATCAA | GAAGCTAGAATAAACGATCAGAACTAT |
| | | (SEQ ID NO: 54977) | (SEQ ID NO: 54978) | (SEQ ID NO: 54979) |
| hCV1792848 | T | GGAGATTCCCAGAATG | GGGAGATTCCCAGAATA | GCTCCATAGCATCTTGTAC |
| | | (SEQ ID NO: 54980) | (SEQ ID NO: 54981) | (SEQ ID NO: 54982) |
| hCV1792856 | G | ATGCTAGACAGTTTAATTATCTGGT | GCTAGACAGTTTAATTATCTGGC | CATACACAGGCAGATGATTTACA |
| | | (SEQ ID NO: 54983) | (SEQ ID NO: 54984) | (SEQ ID NO: 54985) |
| hCV1801156 | G | CCTGAGATGCCTCTTTGG | GTCCTGAGATGCCTCTTTGT | TCACAGAGCTCTCTGAAACATC |
| | | (SEQ ID NO: 54986) | (SEQ ID NO: 54987) | (SEQ ID NO: 54988) |
| hCV1822206 | C | GATTTTAAAGCCAGGAACATT | ATTTTAAAGCCAGGAACATG | GCCCATTTTGTTTCTCTACATT |
| | | (SEQ ID NO: 54989) | (SEQ ID NO: 54990) | (SEQ ID NO: 54991) |
| hCV1822261 | A | CGGAGCTCCTTAAGAATTACAT | CGGAGCTCCTTAAGAATTACAA | TCCAGATGCAGGCATGTAC |
| | | (SEQ ID NO: 54992) | (SEQ ID NO: 54993) | (SEQ ID NO: 54994) |
| hCV1824909 | C | TGGCTTCTTTGATTTCAGGT | GGCTTCTGATTTCAGGG | CAATCACCAGCATTCCTCTT |
| | | (SEQ ID NO: 54995) | (SEQ ID NO: 54996) | (SEQ ID NO: 54997) |
| hCV1839324 | C | ACATACACAACCCGCATTA | CATACACAACCCGCATTC | GATGTCATTCTTTTGGAGTGTTACTA |
| | | (SEQ ID NO: 54998) | (SEQ ID NO: 54999) | (SEQ ID NO: 55000) |
| hCV1839328 | C | AAATTCTGTGGAGAATCTTCAG | AAATTCTGTGGAGAATCTTCAA | CCTCGATGATTCACAATACAA |
| | | (SEQ ID NO: 55001) | (SEQ ID NO: 55002) | (SEQ ID NO: 55003) |
| hCV1839329 | G | AGGGTTTCTCCTCTGTATGAC | AGGGTTTCTCCTCTGTATGAG | GAATGGCCAGTTAAAAGAATCT |
| | | (SEQ ID NO: 55004) | (SEQ ID NO: 55005) | (SEQ ID NO: 55006) |
| hCV1841875 | A | CCCTTCCTGAATTTGTCTAAA | CCCTTCCTGAATTTGTCTAAG | GGCTTGCCCTTCTTTAAAAC |
| | | (SEQ ID NO: 55007) | (SEQ ID NO: 55008) | (SEQ ID NO: 55009) |
| hCV1845232 | C | CTTCAGCGGCTCACG | CCTTCAGCGGCTCACA | TCCACATCCTCTTGTGTCTATCT |
| | | (SEQ ID NO: 55010) | (SEQ ID NO: 55011) | (SEQ ID NO: 55012) |
| hCV1847915 | G | CATGACTAATGACTCTTCCACAT | CATGACTAATGACTCTTTCCACAC | TCTTTTTCCAGCAGATCAATG |
| | | (SEQ ID NO: 55013) | (SEQ ID NO: 55014) | (SEQ ID NO: 55015) |
| hCV1853469 | G | GCTTAGACGCTGCTGGATAT | GCTTAGACGCTGCTGGATAC | CTACCTTAGTGCATCAAACATTAAT |
| | | (SEQ ID NO: 55016) | (SEQ ID NO: 55017) | (SEQ ID NO: 55018) |
| hCV1873996 | A | ACCATTATAGAAAGACTCACTTTAAG | CCATTATAGAAAGACTCACTTTTAAGG | TCTTGCATTCAATCAATTTTGTAT |
| | | A (SEQ ID NO: 55019) | (SEQ ID NO: 55020) | (SEQ ID NO: 55021) |
| hCV1911230 | C | CCAGCTCATTGTAATCCAGAC | CCAGCTCATTGTAATCCAGAT | CGGATGCCTCCCACAGT |
| | | (SEQ ID NO: 55022) | (SEQ ID NO: 55023) | (SEQ ID NO: 55024) |
| hCV1911230 | C | CCAGCTCATTGTAATCCAGAC | CCAGCTCATTGTAATCCAGAT | CGGTGCCTTTGGTGAAG |
| | | (SEQ ID NO: 55025) | (SEQ ID NO: 55026) | (SEQ ID NO: 55027) |
| hCV1911256 | T | AGTGGGCTGTGAAACTACAG | AGTGGGCTGTGAAACTACAA | AAGTGTGGTGGCTGATACTG |
| | | (SEQ ID NO: 55028) | (SEQ ID NO: 55029) | (SEQ ID NO: 55030) |
| hCV1913066 | A | GCCATCAGCCGAACA | GCCATCAGCCGAACC | CCATCTGGGCCTGACTTATA |
| | | (SEQ ID NO: 55031) | (SEQ ID NO: 55032) | (SEQ ID NO: 55033) |
| hCV1920609 | A | CTGCTCTTGGTGGACA | TGCTCTTGGTGGACG | GCTATATAAGCTGCTTCTCTCTT |
| | | (SEQ ID NO: 55034) | (SEQ ID NO: 55035) | (SEQ ID NO: 55036) |
| hCV1946182 | G | CAGCCAGATTTCCTCTGTT | CAGCCAGATTTCCTCTGTC | TCGGGATGCACTGTTCTT |
| | | (SEQ ID NO: 55037) | (SEQ ID NO: 55038) | (SEQ ID NO: 55039) |
| hCV199172 | A | CCCACAGGTGGAACCA | CCACAGGTGGAACCG | CAGCGCTGGACTCAAAA |
| | | (SEQ ID NO: 55040) | (SEQ ID NO: 55041) | (SEQ ID NO: 55042) |
| hCV2027467 | A | GAGCTGCCTGCCAATAGT | GCTGCCTGCCAATAGC | GGGCCATCGTCTTGTAGA |
| | | (SEQ ID NO: 55043) | (SEQ ID NO: 55044) | (SEQ ID NO: 55045) |
| hCV2028275 | T | CAAGATGCATACAGTGCTG | CCAAGATGCATACAGTGCTA | CCAAGCTAACAGTTCCATACAAAC |
| | | (SEQ ID NO: 55046) | (SEQ ID NO: 55047) | (SEQ ID NO: 55048) |
| hCV2028376 | C | TGGATGATTACTGATATGTGTGTC | TGGATGATTACTGATATGTGTGTT | GAAGGATTGCCTTCAATAAAGA |
| | | (SEQ ID NO: 55049) | (SEQ ID NO: 55050) | (SEQ ID NO: 55051) |
| hCV2116087 | A | GGCCACGTGGTTAGT | GCCACGTGGTTAGC | GCTAGGCTGCACATTTAT |
| | | (SEQ ID NO: 55052) | (SEQ ID NO: 55053) | (SEQ ID NO: 55054) |
| hCV2116434 | C | CCAAGCAAACCTAATGACAC | CCAAGCAAACCTAATGACAT | GGCTCACCTTTTTCTTAAATATCT |
| | | (SEQ ID NO: 55055) | (SEQ ID NO: 55056) | (SEQ ID NO: 55057) |
| hCV2131920 | A | TCTCTAAAGTCCATCTATTFTCACT | CTCTAAAGTCCATCTATTTTCACC | GAAAGGAAGCCAGGAGTAAA |
| | | (SEQ ID NO: 55058) | (SEQ ID NO: 55059) | (SEQ ID NO: 55060) |
| hCV2144148 | C | CCACTTCAGTCCTGAAGAGC | CCACTTTCAGTCCTGAAGAGG | TCGTAGTGCTGGGAGTTTCT |
| | | (SEQ ID NO: 55061) | (SEQ ID NO: 55062) | (SEQ ID NO: 55063) |
| hCV2144148 | C | GACTTTGTGTTCTCATCCAG | GACTTGTGTTCTCATCCAC | AAGAAGCAAGCTGAGAAA |
| | | (SEQ ID NO: 55064) | (SEQ ID NO: 55065) | (SEQ ID NO: 55066) |
| hCV2153267 | C | AGTGGGTGCAAAGTTCC | AGAGTGGGTGCAAAGTTCT | CAAGGATGAAGTAGAATTTGTTTT |
| | | (SEQ ID NO: 55067) | (SEQ ID NO: 55068) | (SEQ ID NO: 55069) |
| hCV2170733 | C | CCAAGAAAAAGTGCACAGAC | CCAAGAAAAAGTGCACAGAG | TCAGGCAAAGAAAGGTAACTAGT |
| | | (SEQ ID NO: 55070) | (SEQ ID NO: 55071) | (SEQ ID NO: 55072) |
| hCV2264708 | T | CTTAGATTCCATCTCTACAAAGAAC | CTTAGATTCCATCTCTACAAAGAAT | GCCAGGGACCAAACTGA |
| | | (SEQ ID NO: 55073) | (SEQ ID NO: 55074) | (SEQ ID NO: 55075) |
| hCV2302732 | C | ATAAACACCTTTTATCAGGAATTG | ATAAACACCTTTTATCAGGAATTC | CGATTTCCACGGGTTAGATC |
| | | (SEQ ID NO: 55076) | (SEQ ID NO: 55077) | (SEQ ID NO: 55078) |
| hCV2302737 | T | GTATCATCAGCCTCAAAAGAAG | TATCATCAGCCTCAAAAGAAA | GGGCACATTTTCCACATAG |
| | | (SEQ ID NO: 55079) | (SEQ ID NO: 55080) | (SEQ ID NO: 55081) |
| hCV2539346 | T | GGACGGGGTATCACTCTC | GGACGGGGTATCACTCTT | GCTGGTGCCCACTACTTG |
| | | (SEQ ID NO: 55082) | (SEQ ID NO: 55083) | (SEQ ID NO: 55084) |
| hCV25596081 | T | CCCCAGATTCCCAAAC | CCCCAGATTCCCAAAA | CCCGCCCATCAGAGA |
| | | (SEQ ID NO: 55085) | (SEQ ID NO: 55086) | (SEQ ID NO: 55087) |
| hCV25602413 | A | TGTAGCTCTTTGTGATGTATAGAGA | CTGTAGCTCTTTGTGATGTATAGAGT | TCACTGGCCCGATTTTAC |
| | | (SEQ ID NO: 55088) | (SEQ ID NO: 55089) | (SEQ ID NO: 55090) |
| hCV25603905 | C | AATATCCAGAGGCATTTTATCG | CAATATCCAGAGGCATTTATCA | TGCAGCACTTTGATACTATCTACA |
| | | (SEQ ID NO: 55091) | (SEQ ID NO: 55092) | (SEQ ID NO: 55093) |
| hCV25603906 | T | ATGGTCCTTTGAAAGAGCTAG | ATGGTCCTTTGAAAGAGCTAA | CATTATCCCCAGAGGAGTTTGT |
| | | (SEQ ID NO: 55094) | (SEQ ID NO: 55095) | (SEQ ID NO: 55096) |
| hCV25606645 | T | GGCCTATGAGAGATGATTCC | GAGGCCTATGAGAGATGATTCT | TCTGAATTGGCTCAATGATG |
| | | (SEQ ID NO: 55097) | (SEQ ID NO: 55098) | (SEQ ID NO: 55099) |
| hCV25625639 | A | AGCTGAGAAGGTGAGCACTA | CTGAGAAGGTGAGCACTG | CATACCTGATGTTCCAAAAACTAC |
| | | (SEQ ID NO: 55100) | (SEQ ID NO: 55101) | (SEQ ID NO: 55102) |
| hCV25636732 | G | CCTCGGCTTTCTCAAAGT | CTCGGCTTTCTCAAAGC | GCACGCCAGCAAGTTG |
| | | (SEQ ID NO: 55103) | (SEQ ID NO: 55104) | (SEQ ID NO: 55105) |
| hCV25637868 | C | CTCACACCTTACTTTTCCAG | CTCACACCTTACTTTTCCAA | CCTGCCGACCCTCTCTT |
| | | (SEQ ID NO: 55106) | (SEQ ID NO: 55107) | (SEQ ID NO: 55108) |
| hCV25744917 | A | CACAAAGGTGACTTCCA | CACAAAGGTGACTTCCG | TGCCCCTGTTTTTGACA |
| | | (SEQ ID NO: 55109) | (SEQ ID NO: 55110) | (SEQ ID NO: 55111) |
| hCV25752440 | A | AGGCCTTGGGCAGAA | AAGGCCTTGGGCAGAT | GTCACTGCCACCTCTTTGA |
| | | (SEQ ID NO: 55112) | (SEQ ID NO: 55113) | (SEQ ID NO: 55114) |
| hCV25766586 | T | CAGTGGATGCCTTCACAC | CAGTGGATGCCTTCACAT | GAGTGCAGCTTCCAAGAAAC |
| | | (SEQ ID NO: 55115) | (SEQ ID NO: 55116) | (SEQ ID NO: 55117) |
| hCV25923332 | G | AACCCAGATACCAAGAGGAC | AACCCAGATACCAAGAGGAA | GCTGTGTGAGCACACACTTCT |
| | | (SEQ ID NO: 55118) | (SEQ ID NO: 55119) | (SEQ ID NO: 55120) |
| hCV25938519 | T | GGAAAAGAAGAGGCAACATG | GGAAAAGAAGAGGCAACATT | AACTCGCCAGCATCACA |
| | | (SEQ ID NO: 55121) | (SEQ ID NO: 55122) | (SEQ ID NO: 55123) |
| hCV25970515 | T | GCCATGGTTTTGGAAGAGT | GCCATGGTTTTGGAAGAGA | TTCCTTTAACTTTCATGATCACTAA |
| | | (SEQ ID NO: 55124) | (SEQ ID NO: 55125) | (SEQ ID NO: 55126) |
| hCV25992569 | G | CAATAATTTTTTCCAGGTTGTC | CAATAATTTTTTCCAGGTTGTG | CACACTATGATTGTCAGAAACATG |
| | | (SEQ ID NO: 55127) | (SEQ ID NO: 55128) | (SEQ ID NO: 55129) |
| hCV2655148 | C | CATATGAATGGTAGAGATGGG | CATATGAATGGTAGAGATGGC | AGATGCCCTAGACTCAACTCA |
| | | (SEQ ID NO: 55130) | (SEQ ID NO: 55131) | (SEQ ID NO: 55132) |
| hCV2655158 | T | TCGAAGATTAATTGTAGACATACATA | TCGAAGATTAATTGTAGACATACATAT | TGGTGGAATCCTGGCTATTA |
| | | G (SEQ ID NO: 55133) | (SEQ ID NO: 55134) | (SEQ ID NO: 55135) |
| hCV2655167 | G | CGAGCCACATCGCTC | CGAGCCACATCGCTG | CCGCAAGGCTCGTAGAC |
| | | (SEQ ID NO: 55136) | (SEQ ID NO: 55137) | (SEQ ID NO: 55138) |
| hCV2682758 | T | CATTTACCTTCCCAGATGTTC | CATTTACCTTTCCCAGATGTTT | TTFTCTTTCAGCTTGAAAGATCTAA |
| | | (SEQ ID NO: 55139) | (SEQ ID NO: 55140) | (SEQ ID NO: 55141) |
| hCV2685860 | A | GTGAAGCCTGCCACACT | TGAAGCCTGCCACACC | GCCAGTGGCAATGGTAAC |
| | | (SEQ ID NO: 55142) | (SEQ ID NO: 55143) | (SEQ ID NO: 55144) |
| hCV2734178 | G | ATAAAACTGGGCTGCATATC | GATAAAACTGGGCTGCATATA | AAAGATGCACACATTAAGGTTATC |
| | | (SEQ ID NO: 55145) | (SEQ ID NO: 55146) | (SEQ ID NO: 55147) |
| hCV2757618 | G | GGCAGCTAGGCCGTCT | GCAGCTAGGCCGTCC | GACCCCCACAGGAAGAAG |
| | | (SEQ ID NO: 55148) | (SEQ ID NO: 55149) | (SEQ ID NO: 55150) |
| hCV2757616 | G | GGCAGCTAGGCCGTCT | GGCAGCTAGGCCGTCC | ACCCCCACAGGAAGAAG |
| | | (SEQ ID NO: 55151) | (SEQ ID NO: 55152) | (SEQ ID NO: 55153) |
| hCV2760432 | C | GAAGGTAGGGAGAGGAATGAC | GAAGGTAGGGAGAGGAATGAG | CACTCTGTCTGGCAGAATAATTATA |
| | | (SEQ ID NO: 55154) | (SEQ ID NO: 55155) | (SEQ ID NO: 55156) |
| hCV286937 | G | AAACAATGTTTCCAGTAAACTAGTAG | AAACAATGTTTCCAGTAAACTAGTAC | GATCACCCCTGAAAGACTATTT |
| | | (SEQ ID NO: 55157) | (SEQ ID NO: 55158) | (SEQ ID NO: 55159) |
| hCV2875671 | G | CCGTCTGCACTGAATCTG | ACCGTCTGCACTGAATCTC | CGAACTGGCCTAGAGTCAA |
| | | (SEQ ID NO: 55160) | (SEQ ID NO: 55161) | (SEQ ID NO: 55162) |
| hCV2945715 | T | CTTTCCAGTGGCTATGGAC | TTTCCAGTGGCTATGGAA | TGCTGGTGGCACTGAAT |
| | | (SEQ ID NO: 55163) | (SEQ ID NO: 55164) | (SEQ ID NO: 55165) |
| hCV2950452 | A | ACCCTTTTGGCTCCCT | CCTTTTGGCTCCCC | TGCTGGTGCTGAGTATATCATG |
| | | (SEQ ID NO: 55166) | (SEQ ID NO: 55167) | (SEQ ID NO: 55168) |
| hCV29522 | T | CAGATCTTTAATTTTGTCACGATG | ACAGATCTTAATTTTGTCACGATT | CCTTCCAAGCTGATGATTCT |
| | | (SEQ ID NO: 55169) | (SEQ ID NO: 55170) | (SEQ ID NO: 55171) |
| hCV2981213 | T | ATAAACTCTGGATTTTGCTAATGT | AAAGTCTGGATTTTTGCTAATGA | CAGTTCCCCCAACAGTAACA |
| | | (SEQ ID NO: 55172) | (SEQ ID NO: 55173) | (SEQ ID NO: 55174) |
| hCV2981216 | T | CAGCATGAATGCCTATTTATC | CAGCATGAATGCCTATTTATT | CCCAAAATGCTGGGATTATA |
| | | (SEQ ID NO: 55175) | (SEQ ID NO: 55176) | (SEQ ID NO: 55177) |
| hCV299325 | T | GTGGTAGGGGAGGAAGTG | GGTGGTAGGGGAGGAAGTA | ACAGCTTACTGTCTTTATCATTATCAC |
| | | (SEQ ID NO: 55178) | (SEQ ID NO: 55179) | (SEQ ID NO: 55180) |
| hCV3027361 | T | CGGGGGATACAAGGG | CCGGGGGATACAAGGA | CGCCTCGCTGGATAGAC |
| | | (SEQ ID NO: 55181) | (SEQ ID NO: 55182) | (SEQ ID NO: 55183) |
| hCV3039499 | A | CGTTTGCAAGCTGGAA | CGTTTGCAAGCTGGAG | CCTCAAATGCTCATTTCTTCT |
| | | (SEQ ID NO: 55184) | (SEQ ID NO: 55185) | (SEQ ID NO: 55186) |
| hCV3046185 | A | TTTCTACAATGTCTGAAGAAGTGAA | TTCTACAATGTCTGAAGAAGTGAC | CTGAACTCCTACCTCTTTTTCTTAG |
| | | (SEQ ID NO: 55187) | (SEQ ID NO: 55188) | (SEQ ID NO: 55189) |
| hCV3052366 | T | TGCCATGATGCCTACG | TTGCCATGATGCCTACA | ACTGCACTAGCATCAGATGTCT |
| | | (SEQ ID NO: 55190) | (SEQ ID NO: 55191) | (SEQ ID NO: 55192) |
| hCV3088744 | A | AGAAATGACTTGTAAGATCATTCA | GAGAAATGACTTGTAAGATCATTCT | GCTTTGTGGAAAACATTCTGTA |
| | | (SEQ ID NO: 55193) | (SEQ ID NO: 55194) | (SEQ ID NO: 55195) |
| hCV3091316 | C | AATCCAGGGAAACCTCTAGTTT | ATCCAGGGAAACCTCTAGTG | GGATGGGAGCAAAGATGA |
| | | (SEQ ID NO: 55196) | (SEQ ID NO: 55197) | (SEQ ID NO: 55198) |
| hCV3132900 | A | ACAGGTACAGCAGTGCTTTT | ACAGGTACAGCAGTGCTTTC | ATAAGGTCCTGATCAGAATCATC |
| | | (SEQ ID NO: 55199) | (SEQ ID NO: 55200) | (SEQ ID NO: 55201) |
| hCV3137872 | C | TCCTCATTATTGGCAGGTG | TCCTCATTATTGGCAGGTC | GGCATCTGCAGTTTACAATTATT |
| | | (SEQ ID NO: 55202) | (SEQ ID NO: 55203) | (SEQ ID NO: 55204) |
| hCV3159528 | C | AATAATTCCGAATCTAGTTTGAC | AATAATTCCGAATCTAGTTTTGAT | ATCTCAACCTTCTGTCTTGATCT |
| | | (SEQ ID NO: 55205) | (SEQ ID NO: 55206) | (SEQ ID NO: 55207) |
| hCV3159529 | G | GGATAGTTCCATCTGCCT | GATAGTTCCATCTGCCC | GGTGTTGCTGTTAAGAGAAA |
| | | (SEQ ID NO: 55208) | (SEQ ID NO: 55209) | (SEQ ID NO: 55210) |
| hCV3159576 | T | CAGAATGGCCTAAAGTCTGA | CAGAATGGCCTAAAGTCTGT | CAGGTGTTTGGGAATFAAAG |
| | | (SEQ ID NO: 55211) | (SEQ ID NO: 55212) | (SEQ ID NO: 55213) |
| hCV3178540 | G | CGGGAGTACCAGAAAGGGT | GGGAGTACCAGAAAGGGC | GCATTAGCACTGCACATTACATT |
| | | (SEQ ID NO: 55214) | (SEQ ID NO: 55215) | (SEQ ID NO: 55216) |
| hCV3178541 | T | GAAGACATGGTTTCTCTGTTTC | GAAGACATGGTTTCTCTGTTTT | ACATTTGGCGGAAGTACTCT |
| | | (SEQ ID NO: 55217) | (SEQ ID NO: 55218) | (SEQ ID NO: 55219) |
| hCV3188402 | C | GACGATTCTGGAATGGTTAC | GACGATTCTGGAATGGTTTAT | CCTAGTCCCTAGACTCCTCTGTT |
| | | (SEQ ID NO: 55220) | (SEQ ID NO: 55221) | (SEQ ID NO: 55222) |
| hCV3215842 | T | TGGTTCTAGGGAGGTAAC | ATGGTTCTAGGGAGGTAAT | TCCAAAGAGCAGTGTTCT |
| | | (SEQ ID NO: 55223) | (SEQ ID NO: 55224) | (SEQ ID NO: 55225) |
| hCV3234889 | G | TGCAGTCCCCCATCCT | GCAGTCCCCCATCCC | TGGAATATGGAATACTCCTTTTATCTA |
| | | (SEQ ID NO: 55226) | (SEQ ID NO: 55227) | (SEQ ID NO: 55228) |
| hCV3268994 | C | GGCGACTGGGTGACAG | GGCGACTGGGTGACAA | GGCTGCCAGGAACAAGT |
| | | (SEQ ID NO: 55229) | (SEQ ID NO: 55230) | (SEQ ID NO: 55231) |
| hCV337151 | G | CCCCGGCAAGGTTG | CCCCGGCAAGGTTC | TGCTGGGCTTCCATGTA |
| | | (SEQ ID NO: 55232) | (SEQ ID NO: 55233) | (SEQ ID NO: 55234) |
| hCV368390 | C | ATTGTTGAGTGTTGGCAATAC | ATTGTTGAGTGTTGGCAATAT | CAAACACAGCAATCAAGTGTATG |
| | | (SEQ ID NO: 55235) | (SEQ ID NO: 55236) | (SEQ ID NO: 55237) |
| hCV369380 | C | CAGGAAGCTTTCGTGATTTG | CCAGGAAGCTTCGTGATTTA | TTGAGGACAATAATTTTCTTTACAC |
| | | (SEQ ID NO: 55238) | (SEQ ID NO: 55239) | (SEQ ID NO: 55240) |
| hCV472673 | C | CACCAAACGGGGTTACTAG | CACCAAACGGGGTTACTAC | CAGAGGGTTGATTTTCTTTCTAT |
| | | (SEQ ID NO: 55241) | (SEQ ID NO: 55242) | (SEQ ID NO: 55243) |
| hCV52509 | T | CGGCCTCGGTCTCG | CGGCCTCGGTCTCA | TGCATCTCGCTCAACAGAC |
| | | (SEQ ID NO: 55244) | (SEQ ID NO: 55245) | (SEQ ID NO: 55246) |
| hCV5478 | T | CGGCTTTCTGGTGGG | ACGGCTTTCTGGTGGA | GGCTCCGAGGACGAGA |
| | | (SEQ ID NO: 55247) | (SEQ ID NO: 55248) | (SEQ ID NO: 55249) |
| hCV589703 | G | CGGCTGATGTTGTTAAATAT | CGGCTGATGTTTGTTAAATAC | GCACACTAGTTGACACCATACT |
| | | (SEQ ID NO: 55250) | (SEQ ID NO: 55251) | (SEQ ID NO: 55252) |
| hCV7432717 | A | ATACCTACCAAGAACATAATCCTT | ATACCTACCAAGAACATAATCCTC | ACCAACAGCCTCTGAACAA |
| | | (SEQ ID NO: 55253) | (SEQ ID NO: 55254) | (SEQ ID NO: 55255) |
| hCV7547730 | A | TTTTTCGCTCAAGTTGTTTGTAA | ATTTTCGCTCAAGTTGTTGTAC | AGGTGCCCTTGATAGTCTGTAT |
| | | (SEQ ID NO: 55256) | (SEQ ID NO: 55257) | (SEQ ID NO: 55258) |
| hCV7582334 | G | GTGAAGGTCCGCTTCTTC | TGAAGGTCCGCTTCTTG | CCCACCAGAGCTGAAGATC |
| | | (SEQ ID NO: 55259) | (SEQ ID NO: 55260) | (SEQ ID NO: 55261) |
| hCV7584409 | T | CCCCAGGCTGCACAC | CCCCAGGCTGCACAT | CATCACAACCAACCCTACTG |
| | | (SEQ ID NO: 55262) | (SEQ ID NO: 55263) | (SEQ ID NO: 55264) |
| hCV7611203 | T | CGCCCTCGCACAG | CGCCCTCGCACAA | AGGATCCCAAGGGAAATACT |
| | | (SEQ ID NO: 55265) | (SEQ ID NO: 55266) | (SEQ ID NO: 55267) |
| hCV799520 | G | CAGATTCTCATAACTAGCACCAT | CAGATTCTCATAACTAGCACCAC | TGAAAAGCTGGATGACATGA |
| | | (SEQ ID NO: 55268) | (SEQ ID NO: 55269) | (SEQ ID NO: 55270) |
| hCV811329 | A | CCTATACTCTAGTCCCAGAGACAA | CCTATACTCTAGTCCCAGAGACAC | TTTCCACTTGGCATGAGTATAGA |
| | | (SEQ ID NO: 55271) | (SEQ ID NO: 55272) | (SEQ ID NO: 55273) |
| hCV8161028 | C | GCAAACCTGGGACTCAG | GCAAACCTGGGACTCAA | GCTCCATACTTGCTACCTCTTACTA |
| | | (SEQ ID NO: 55274) | (SEQ ID NO: 55275) | (SEQ ID NO: 55276) |
| hCV8227677 | C | AGTGGTCAATAAATTGATTCTAGAC | AGTGGTCAATAAATTGATTCTAGAT | GTTTTCCCAATTCAAACTTGA |
| | | (SEQ ID NO: 55277) | (SEQ ID NO: 55278) | (SEQ ID NO: 55279) |
| hCV848829 | C | TCAATCTCCGGAACCTG | GTTCAATCTCCGGAACCTA | CTGCTGGGTTAGAGAAGACTTAC |
| | | (SEQ ID NO: 55280) | (SEQ ID NO: 55281) | (SEQ ID NO: 55282) |
| hCV855979 | T | AAAACACCCTCGCTTAGC | CAAAACACCCTCGCTTTAGT | AACTGCAGTGGAGAGTATATAAGGT |
| | | (SEQ ID NO: 55283) | (SEQ ID NO: 55284) | (SEQ ID NO: 55285) |
| hCV8715115 | A | CACAATGTCTAGAGGTGGGTA | ACAATGTCTAGAGGTGGGTG | TGGACGTAGAAGAACAGTAAGTACA |
| | | (SEQ ID NO: 55286) | (SEQ ID NO: 55287) | (SEQ ID NO: 55288) |
| hCV8725171 | G | GTTCATGTCGTCGAAGTCTTT | GTTCATGTCGTCGAAGTCTC | GGAGCAAATGGCTCAATGTA |
| | | (SEQ ID NO: 55289) | (SEQ ID NO: 55290) | (SEQ ID NO: 55291) |
| hCV8780618 | C | CACATTCCCTCTCTCCG | CCACATTCCCTCTCTCCA | TTCAGAGGCACACAACTATGA |
| | | (SEQ ID NO: 55292) | (SEQ ID NO: 55293) | (SEQ ID NO: 55294) |
| hCV8782652 | T | CACCTCAGTTCAACAGTTTATATTTA | ACCTCAGTTTCAACAGTTTATATTTTT | AAAGAAAGAAAGTGTTAGGATGTCT |
| | | (SEQ ID NO: 55295) | (SEQ ID NO: 55296) | (SEQ ID NO: 55297) |
| hCV8856240 | G | GGAAGGTAGCCCCTAAGAC | GGAAGGTAGCCCCTAAGAG | CGTGTTTTCGCTGTTCAGTG |
| | | (SEQ ID NO: 55298) | (SEQ ID NO: 55299) | (SEQ ID NO: 55300) |
| hCV8885200 | A | CACACGTTGTCTCAAAATGAGTA | CACGTTGTCTCAAAATGAGTG | GATATGGGCAGGTTTCACTG |
| | | (SEQ ID NO: 55301) | (SEQ ID NO: 55302) | (SEQ ID NO: 55303) |
| hCV8921255 | G | CTTCTCATTGCTTFTCTCCTAT | CTTCTCATTGCTTTTCTCCTAC | GCTGACCGAGAATATAATCATCT |
| | | (SEQ ID NO: 55304) | (SEQ ID NO: 55305) | (SEQ ID NO: 55306) |
| hCV8921255 | G | TTCTCATTGCTTTTCTCCTAT | TTTCTCATTGCTTTTTCTCCTAC | GCTGACCGAGAATATAATCATCT |
| | | (SEQ ID NO: 55307) | (SEQ ID NO: 55308) | (SEQ ID NO: 55309) |
| hCV8984582 | C | GGCTTTTAAAACTTCAAATGC | AAGGCTTTTAAAACTTCAAATGT | GCCACTGAGATTATCAAACTAACT |
| | | (SEQ ID NO: 55310) | (SEQ ID NO: 55311) | (SEQ ID NO: 55312) |
| hCV9579537 | C | ATGACGCTGACCACAGG | CATGACGCTGACCACAGA | GCCGCTTACCCAAAGTAATT |
| | | (SEQ ID NO: 55313) | (SEQ ID NO: 55314) | (SEQ ID NO: 55315) |
| hCV9605432 | G | CGCAGCTCCCACCA | CGCAGCTCCCACCG | CCTGCCCACGTTCTCTAT |
| | | (SEQ ID NO: 55316) | (SEQ ID NO: 55317) | (SEQ ID NO: 55318) |
| hCV9632133 | G | AGACCAAGTGGAGACAGACA | GACCAAGTGGAGACAGACG | CCTTTTCTCCCTTCTTTTTCTAAC |
| | | (SEQ ID NO: 55319) | (SEQ ID NO: 55320) | (SEQ ID NO: 55321) |
| hCV97656 | T | TGGTCAGGTGATAGATCTGC | TGTGGTCAGGTGATAGATCTGT | CCTCATTGGACAATGAGAGAC |
| | | (SEQ ID NO: 55322) | (SEQ ID NO: 55323) | (SEQ ID NO: 55324) |
| hDT68530963 | C | GGCAGGGCTCTGATACAG | GGCAGGGCTCTGATACAA | GCGGTTTCTTCTGGTGATTTA |
| | | (SEQ ID NO: 55325) | (SEQ ID NO: 55326) | (SEQ ID NO: 55327) |
| hDT68530976 | G | CAACGAGTGATTCTTTCACAC | CAACGAGTGATTCTTTCACAG | AATTCCCTTCACTCTTTCTTFTC |
| | | (SEQ ID NO: 55328) | (SEQ ID NO: 55329) | (SEQ ID NO: 55330) |
| hDT68530985 | C | ACAGGCTGTGTCTAGTTCTCAC | ACAGGCTGTGTCTAGTTCTCAT | CTCAGAGGCCGGAAGTC |
| | | (SEQ ID NO: 55331) | (SEQ ID NO: 55332) | (SEQ ID NO: 55333) |
| hDT68530994 | T | CGGGGAGGGAGACC | CCGGGGAGGGAGACT | TAAAAGCCATTTTCAGACACTAA |
| | | (SEQ ID NO: 55334) | (SEQ ID NO: 55335) | (SEQ ID NO: 55336) |
| hDT68530995 | A | CGTGTGACATTTCTGAAATCAA | CGTGTGACATTTCTGAAATCAG | ACCATTCTCTCCTTATCACTTTATT |
| | | (SEQ ID NO: 55337) | (SEQ ID NO: 55338) | (SEQ ID NO: 55339) |
| hDT68531036 | G | TTAAGAAACAGCCTTTCAACA | TAAGAAACAGCCTTTCAACG | GCAGCATTCCTGACAGAACTA |
| | | (SEQ ID NO: 55340) | (SEQ ID NO: 55341) | (SEQ ID NO: 55342) |

[0435] TABLE 6

| | Sam- | | | Allelic | Addi- | Domi- | Reces- | | | OR- | OR- | OR- | OR- | Al- | Case | Control | Case | |
|---|---|---|---|---|---|---|---|---|---|---|---|---|---|---|---|---|---|---|
| | ple | | | p- | tive | nant | sive | OR- | OR-allelic | domi- | dominant | reces- | recessive | lele | Allele 1 | Allele 1 | Sam- | Control |
| Marker | set | Strata | Adjust | value | p-value | p-value | p-value | allelic | 95% Cl | nant | 95% Cl | sive | 95% Cl | 1 | Freq | Freq | ples | Samples |
| hCV11200217 | 1 | age_ge75 = 1 | NONE | 0.01787 | 0.01951 | 0.03656 | 0.0911 | 1.39 | 1.06:1.82 | 1.5 | 1.02:2.20 | 1.58 | 0.93:2.69 | T | 41.4 | 33.7 | 227 | 218 |
| hCV11200217 | 3 | age_ge75 = 1 | NONE | 0.11846 | 0.12574 | 0.03444 | 0.90777 | 1.23 | 0.95:1.61 | 1.5 | 1.03:2.18 | 1.03 | 0.62:1.70 | T | 41.0 | 36.0 | 221 | 246 |
| hCV11214795 | 1 | apoe4 = 1 | NONE | 0.04774 | 0.04598 | 0.07839 | 0.13579 | 1.75 | 1.00:3.05 | 1.71 | 0.94:3.10 | | | A | 15.9 | 9.8 | 239 | 87 |
| hCV11214795 | 2 | apoe4 = 1 | NONE | 0.03857 | 0.03731 | 0.01631 | 0.74697 | 1.82 | 1.03:3.23 | 2.17 | 1.14:4.11 | 0.72 | 0.10:5.23 | A | 16.7 | 9.9 | 132 | 96 |
| hCV11396215 | 2 | male = 0 | NONE | 0.06459 | 0.04482 | 0.08886 | 0.12316 | 0.71 | 0.49:1.02 | 0.68 | 0.44:1.06 | 0.32 | 0.07:1.46 | G | 21.7 | 28.1 | 122 | 244 |
| hCV11396215 | 1 + 3 | male = 0 | source | 0.03301 | 0.03168 | 0.0858 | 0.05674 | 0.81 | 0.67:0.98 | 0.81 | 0.64:1.03 | 0.62 | 0.37:1.02 | G | 23.4 | 27.3 | 559 | 533 |
| hCV11566355 | 2 | apoe4 = 1 | male, age_ge75 | 0.05462 | 0.04901 | 0.01789 | 0.77701 | 0.61 | 0.37:1.01 | 0.48 | 0.26:0.88 | 1.23 | 0.27:5.70 | G | 18.1 | 24.5 | 119 | 92 |
| hCV11566355 | 1 + 3 | apoe4 = 1 | source, male, age_ge75 | 0.03231 | 0.03561 | 0.1035 | 0.04351 | 0.74 | 0.56:0.98 | 0.75 | 0.53:1.06 | 0.52 | 0.27:1.01 | G | 21.4 | 27.1 | 459 | 181 |
| hCV11566355 | 3 | male = 1 | NONE | 0.01572 | 0.01935 | 0.05005 | 0.05163 | 0.53 | 0.32:0.89 | 0.54 | 0.29:1.00 | 0.24 | 0.05:1.13 | G | 17.3 | 28.2 | 78 | 101 |
| hCV11566355 | 1 + 2 | male = 1 | source | 0.02664 | 0.02918 | 0.15309 | 0.00951 | 0.73 | 0.55:0.96 | 0.78 | 0.55:1.10 | 0.36 | 0.17:0.80 | G | 21.2 | 27.1 | 257 | 282 |
| hCV11595547 | 1 | apoe4 = 0 | male, age_ge75 | 0.04368 | 0.04634 | 0.04799 | 0.21518 | 0.75 | 0.56:0.99 | 0.65 | 0.43:1.00 | 0.73 | 0.44:1.20 | C | 40.1 | 48.1 | 162 | 270 |
| hCV11595547 | 2 + 3 | apoe4 = 0 | source, male, age_ge75 | 0.0115 | 0.01362 | 0.00886 | 0.17476 | 0.73 | 0.57:0.93 | 0.63 | 0.44:0.89 | 0.74 | 0.48:1.14 | C | 39.4 | 45.8 | 199 | 559 |
| hCV11597236 | 2 | ALL | NONE | 0.01998 | 0.01986 | 0.0562 | 0.04172 | 1.4 | 1.05:1.86 | 1.39 | 0.99:1.95 | 2.29 | 1.01:5.19 | T | 23.9 | 18.3 | 241 | 355 |
| hCV11597236 | 3 | ALL | NONE | 0.03178 | 0.03659 | 0.02195 | 0.63163 | 1.33 | 1.02:1.73 | 1.43 | 1.05:1.93 | 1.2 | 0.58:2.48 | T | 19.5 | 15.4 | 384 | 399 |
| hCV11597236 | 3 | male = 0 | NONE | 0.01124 | 0.01331 | 0.00886 | 0.43995 | 1.49 | 1.09:2.03 | 1.61 | 1.13:2.30 | 1.41 | 0.59:3.41 | T | 20.0 | 14.4 | 282 | 295 |
| hCV11597236 | 1 + 2 | male = 0 | source | 0.16377 | 0.16648 | 0.04545 | 0.36623 | 1.2 | 0.93:1.55 | 1.36 | 1.00:1.85 | 0.72 | 0.34:1.52 | T | 21.0 | 17.9 | 336 | 435 |
| hCV11840248 | 1 | age_ge75 = 1 | apoe4, male | 0.05662 | 0.04824 | 0.01857 | 0.43982 | 1.32 | 0.99:1.75 | 1.75 | 1.10:2.79 | 1.21 | 0.74:1.98 | T | 49.5 | 44.3 | 212 | 203 |
| hCV11840248 | 3 | age_ge75 = 1 | apoe4, male | 0.10798 | 0.09389 | 0.0497 | 0.48773 | 1.25 | 0.95:1.63 | 1.55 | 0.99:2.41 | 1.18 | 0.74:1.89 | T | 49.8 | 45.9 | 221 | 246 |
| hCV11841396 | 3 | apoe4 = 1 | NONE | 0.02574 | 0.02598 | 0.07844 | 0.02886 | 0.62 | 0.41:0.95 | 0.64 | 0.39:1.05 | 0.26 | 0.07:0.95 | A | 15.2 | 22.4 | 234 | 96 |
| hCV11841396 | 1 + 2 | apoe4 = 1 | source | 0.03978 | 0.04694 | 0.04915 | 0.31877 | 0.71 | 0.51:0.99 | 0.67 | 0.46:1.00 | 0.65 | 0.27:1.54 | A | 16.4 | 21.6 | 375 | 160 |
| hCV11861096 | 1 | ALL | apoe4, male, age_ge75 | 0.00123 | 0.00174 | 0.00332 | 0.05935 | 1.76 | 1.24:2.49 | 1.78 | 1.21:2.63 | 2.64 | 0.88:7.95 | C | 14.8 | 10.0 | 386 | 350 |
| hCV11861096 | 2 + 3 | ALL | source, apoe4, male, age_ge75 | 0.04405 | 0.04369 | 0.04073 | 0.56687 | 1.33 | 1.01:1.75 | 1.37 | 1.01:1.85 | 1.44 | 0.45:4.56 | C | 12.8 | 11.3 | 529 | 746 |
| hCV11861096 | 1 | male = 0 | apoe4, age_ge75 | 0.02222 | 0.02324 | 0.06387 | 0.02973 | 1.66 | 1.07:2.58 | 1.57 | 0.97:2.55 | 13.1 | 0.97:176.56 | C | 14.6 | 10.5 | 250 | 215 |
| hCV11861096 | 2 + 3 | male = 0 | source, apoe4, age_ge75 | 0.01138 | 0.01039 | 0.00995 | 0.45452 | 1.55 | 1.11:2.17 | 1.63 | 1.13:2.36 | 1.8 | 0.41:7.83 | C | 13.7 | 11.1 | 362 | 520 |
| hCV1191260 | 1 | ALL | apoe4, male, age_ge75 | 0.03485 | 0.03382 | 0.09486 | 0.07243 | 1.26 | 1.02:1.55 | 1.34 | 0.95:1.88 | 1.39 | 0.97:2.00 | G | 51.3 | 44.9 | 418 | 375 |
| hCV1191260 | 2 | ALL | apoe4, male, age_ge75 | 0.04533 | 0.04221 | 0.02756 | 0.29859 | 1.33 | 1.01:1.76 | 1.65 | 1.05:2.59 | 1.29 | 0.80:2.08 | G | 49.0 | 45.7 | 191 | 396 |
| hCV12029086 | 1 | ALL | NONE | 0.00107 | 0.00134 | 0.00472 | 0.01774 | 0.69 | 0.56:0.86 | 0.67 | 0.50:0.88 | 0.54 | 0.32:0.90 | T | 24.2 | 31.5 | 418 | 376 |
| hCV12029086 | 2 | ALL | NONE | 0.2155 | 0.20584 | 0.73943 | 0.01952 | 0.86 | 0.68:1.09 | 0.95 | 0.70:1.29 | 0.48 | 0.26:0.90 | T | 28.0 | 31.1 | 275 | 408 |
| hCV1212623 | 1 | age_ge75 = 1 | NONE | 0.09859 | 0.10056 | 0.31965 | 0.0307 | 1.3 | 0.95:1.78 | 1.21 | 0.83:1.77 | 2.6 | 1.06:6.35 | C | 25.6 | 20.9 | 227 | 218 |
| hCV1212623 | 2 | age_ge75 = 1 | NONE | 0.05989 | 0.06079 | 0.20055 | 0.03059 | 1.48 | 0.98:2.23 | 1.4 | 0.84:2.35 | 2.8 | 1.06:7.37 | C | 28.9 | 21.6 | 76 | 248 |
| hCV1212623 | 2 | ALL | NONE | 0.00509 | 0.00513 | 0.01534 | 0.03412 | 1.46 | 1.12:1.90 | 1.5 | 1.08:2.07 | 2.08 | 1.04:4.15 | C | 27.9 | 21.0 | 247 | 369 |
| hCV1212623 | 1 + 3 | ALL | source | 0.33223 | 0.33643 | 0.79856 | 0.04993 | 1.09 | 0.92:1.28 | 1.03 | 0.84:1.26 | 1.55 | 1.00:2.40 | C | 23.8 | 22.4 | 802 | 775 |
| hCV1212623 | 1 | male = 1 | apoe4, age_ge75 | 0.5698 | 0.57217 | 0.78969 | 0.02666 | 1.13 | 0.74:1.74 | 0.93 | 0.56:1.55 | 4.77 | 1.01:22.58 | C | 21.6 | 19.3 | 153 | 140 |
| hCV1212623 | 2 + 3 | male = 1 | source, apoe4, age_ge75 | 0.00543 | 0.00739 | 0.05348 | 0.00474 | 1.66 | 1.16:2.38 | 1.55 | 0.99:2.43 | 3.54 | 1.45:8.66 | C | 29.5 | 21.1 | 168 | 228 |
| hCV1212684 | 1 | age_ge75 = 0 | NONE | 0.04437 | 0.04212 | 0.29962 | 0.01367 | 1.39 | 1.01:1.91 | 1.28 | 0.80:2.02 | 2.23 | 1.17:4.26 | T | 44.0 | 36.2 | 176 | 145 |
| hCV1212684 | 2 + 3 | age_ge75 = 0 | source | 0.01819 | 0.02146 | 0.05864 | 0.05682 | 1.36 | 1.05:1.74 | 1.42 | 0.99:2.05 | 1.56 | 0.99:2.48 | T | 44.5 | 37.2 | 245 | 258 |
| hCV1229667 | 1 | apoe4 = 1 | male, age_ge75 | 0.01063 | 0.01004 | 0.00587 | 0.5827 | 0.43 | 0.23:0.83 | 0.39 | 0.20:0.77 | | | C | 5.0 | 10.5 | 239 | 86 |
| hCV1229667 | 2 + 3 | apoe4 = 1 | source, male, age_ge75 | 0.04767 | 0.05058 | 0.019 | 0.26075 | 0.58 | 0.34:0.99 | 0.5 | 0.29:0.89 | | | C | 5.4 | 8.6 | 335 | 180 |
| hCV1229667 | 1 | male = 1 | apoe4, age_ge75 | 0.03556 | 0.03547 | 0.02286 | 0.5827 | 0.41 | 0.18:0.94 | 0.37 | 0.16:0.87 | | | C | 3.9 | 7.6 | 153 | 139 |
| hCV1229667 | 3 | male = 1 | apoe4, age_ge75 | 0.04405 | 0.03729 | 0.03729 | | 0.39 | 0.15:1.03 | 0.37 | 0.14:1.00 | | | C | 4.5 | 8.6 | 78 | 99 |
| hCV1229682 | 1 | apoe4 = 1 | male, age_ge75 | 0.0061 | 0.00465 | 0.00465 | | 0.39 | 0.19:0.77 | 0.36 | 0.17:0.74 | | | A | 4.6 | 10.5 | 227 | 81 |
| hCV1229682 | 3 | apoe4 = 1 | male, age_ge75 | 0.04361 | 0.05127 | 0.14203 | 0.01055 | 0.47 | 0.22:0.98 | 0.55 | 0.25:1.22 | 0 | | A | 4.1 | 7.3 | 234 | 96 |
| hCV1229777 | 1 | male = 1 | apoe4, age_ge75 | 0.05847 | 0.0635 | 0.03184 | 0.6469 | 1.47 | 0.99:2.17 | 1.74 | 1.05:2.87 | 1.24 | 0.51:3.01 | A | 29.4 | 25.2 | 153 | 139 |
| hCV1229777 | 3 | male = 1 | apoe4, age_ge75 | 0.04272 | 0.04947 | 0.02225 | 0.5904 | 1.62 | 1.00:2.62 | 2.14 | 1.11:4.11 | 1.27 | 0.49:3.28 | A | 33.3 | 26.7 | 78 | 101 |
| hCV1244849 | 1 | age_ge75 = 1 | apoe4, male | 0.0471 | 0.0474 | 0.02372 | 0.97131 | 1.5 | 1.01:2.22 | 1.68 | 1.07:2.64 | 0.98 | 0.27:3.59 | C | 17.4 | 13.3 | 210 | 206 |
| hCV1244849 | 3 | age_ge75 = 1 | apoe4, male | 0.01156 | 0.0113 | 0.0056 | 0.73422 | 1.6 | 1.11:2.29 | 1.79 | 1.19:2.72 | 1.24 | 0.37:4.14 | C | 20.0 | 14.4 | 222 | 246 |
| hCV1322419 | 3 | male = 1 | apoe4, age_ge75 | 0.01627 | 0.01732 | 0.05447 | 0.04811 | 1.68 | 1.10:2.57 | 2.13 | 0.99:4.57 | 1.95 | 1.00:3.80 | A | 59.4 | 47.1 | 90 | 102 |
| hCV1322419 | 1 + 2 | male = 1 | source, apoe4, age_ge75 | 0.0106 | 0.01174 | 0.0206 | 0.07163 | 1.41 | 1.08:1.83 | 1.64 | 1.08:2.51 | 1.5 | 0.97:2.32 | A | 51.3 | 45.7 | 269 | 268 |
| hCV1413258 | 1 | apoe4 = 1 | male, age_ge75 | 0.01691 | 0.01813 | 0.00986 | 0.49333 | 0.61 | 0.41:0.92 | 0.51 | 0.30:0.85 | 0.7 | 0.25:1.95 | A | 21.5 | 30.2 | 226 | 81 |
| hCV1413258 | 3 | apoe4 = 1 | male, age_ge75 | 0.21242 | 0.20787 | 0.04843 | 0.31005 | 0.78 | 0.52:1.16 | 0.61 | 0.37:1.00 | 1.87 | 0.53:6.57 | A | 22.0 | 26.3 | 218 | 95 |
| hCV1419932 | 1 | age_ge75 = 0 | apoe4, male | 0.0112 | 0.01334 | 0.0122 | 0.4965 | 3.23 | 1.33:7.84 | 3.37 | 1.32:8.56 | | | G | 6.5 | 3.7 | 176 | 147 |
| hCV1419932 | 2 + 3 | age_ge75 = 0 | source, apoe4, male | 0.03275 | 0.03365 | 0.02488 | 0.93432 | 1.95 | 1.04:3.65 | 2.07 | 1.07:3.98 | 0.79 | 0.01:61.32 | G | 7.4 | 4.1 | 244 | 257 |
| hCV1419932 | 1 | ALL | apoe4, male, age_ge75 | 0.00558 | 0.00572 | 0.00677 | 0.31365 | 2.02 | 1.22:3.32 | 2.04 | 1.21:3.42 | | | G | 7.0 | 4.3 | 387 | 352 |
| hCV1419932 | 2 + 3 | ALL | source, apoe4, male, age_ge75 | 0.04602 | 0.05048 | 0.04077 | 0.81821 | 1.49 | 1.01:2.20 | 1.54 | 1.02:2.31 | 1.24 | 0.21:7.38 | G | 6.6 | 5.0 | 527 | 743 |
| hCV1419932 | 3 | apoe4 = 1 | male, age_ge75 | 0.04844 | 0.04974 | 0.05469 | 0.45939 | 2.54 | 0.97:6.67 | 2.55 | 0.95:6.84 | | | G | 6.8 | 2.6 | 219 | 95 |
| hCV1419932 | 1 + 2 | apoe4 = 1 | source, male, age_ge75 | 0.03084 | 0.04417 | 0.02238 | 0.88519 | 2.22 | 1.09:4.54 | 2.47 | 1.14:5.38 | 1.2 | 0.14:10.47 | G | 6.8 | 3.8 | 333 | 158 |
| hCV1419932 | 2 | male = 0 | apoe4, age_ge75 | 0.02702 | 0.02448 | 0.01952 | 0.77816 | 2.44 | 1.05:5.67 | 2.7 | 1.11:6.58 | 0 | | G | 8.8 | 4.9 | 80 | 224 |
| hCV1419932 | 1 + 3 | male = 0 | source, apoe4, age_ge75 | 0.01693 | 0.01753 | 0.01728 | 0.55359 | 1.7 | 1.10:2.62 | 1.73 | 1.10:2.71 | 3.17 | 0.12:84.72 | G | 6.4 | 4.3 | 531 | 511 |
| hCV1507426 | 2 | age_ge75 = 1 | NONE | 0.03209 | 0.02476 | 0.04709 | 0.11127 | 0.58 | 0.35:0.96 | 0.57 | 0.32:1.00 | | | G | 13.6 | 21.5 | 77 | 249 |
| hCV1507426 | 1 + 3 | age_ge75 = 1 | source | 0.1043 | 0.09487 | 0.04002 | 0.74122 | 0.83 | 0.66:1.04 | 0.76 | 0.58:0.99 | 1.12 | 0.56:2.26 | G | 19.6 | 22.8 | 448 | 464 |
| hCV1558518 | 1 | age_ge75 = 0 | apoe4, male | 0.00195 | 0.00316 | 0.00146 | 0.11326 | 0.56 | 0.38:0.81 | 0.41 | 0.23:0.72 | 0.58 | 0.30:1.13 | G | 36.4 | 47.6 | 176 | 147 |
| hCV1558518 | 2 + 3 | age_ge75 = 0 | source, apoe4, male | 0.03783 | 0.03144 | 0.80296 | 0.0005 | 0.74 | 0.55:0.98 | 0.94 | 0.60:1.48 | 0.36 | 0.20:0.64 | G | 39.6 | 48.3 | 245 | 258 |
| hCV15870743 | 1 | apoe4 = 0 | NONE | 0.00234 | 0.00297 | 0.00316 | 0.09552 | 0.62 | 0.46:0.84 | 0.55 | 0.37:0.82 | 0.56 | 0.28:1.12 | T | 24.7 | 34.6 | 162 | 272 |
| hCV15870743 | 2 + 3 | apoe4 = 0 | source | 0.06426 | 0.06633 | 0.04312 | 0.53516 | 0.8 | 0.63:1.01 | 0.73 | 0.55:0.99 | 0.84 | 0.49:1.45 | T | 25.6 | 30.4 | 248 | 606 |
| hCV15887512 | 1 | age_ge75 = 0 | apoe4, male | 0.5706 | 0.57672 | 0.84215 | 0.03684 | 1.15 | 0.72:1.85 | 0.94 | 0.55:1.63 | 7.59 | 1.10:52.43 | A | 19.7 | 17.8 | 178 | 146 |
| hCV15887512 | 3 | age_ge75 = 0 | apoe4, male | 0.50643 | 0.51427 | 0.9785 | 0.02628 | 1.19 | 0.71:1.98 | 0.99 | 0.56:1.77 | 12.5 | 1.00:155.39 | A | 15.1 | 13.4 | 162 | 153 |
| hCV15919456 | 3 | age_ge75 = 0 | apoe4, male | 0.04461 | 0.04202 | 0.12163 | 0.07863 | 1.45 | 1.01:2.08 | 1.57 | 0.87:2.82 | 1.71 | 0.94:3.13 | A | 52.2 | 47.4 | 162 | 153 |
| hCV15919456 | 1 + 2 | age_ge75 = 0 | source, apoe4, male | 0.01767 | 0.01772 | 0.02401 | 0.10461 | 1.36 | 1.05:1.75 | 1.59 | 1.06:2.40 | 1.42 | 0.93:2.17 | A | 52.8 | 46.8 | 353 | 285 |
| hCV15919456 | 2 | apoe4 = 1 | male, age_ge75 | 0.00095 | 0.00111 | 0.00224 | 0.0216 | 2.1 | 1.35:3.26 | 3.04 | 1.46:6.35 | 2.35 | 1.14:4.83 | A | 57.7 | 45.9 | 117 | 86 |
| hCV15919456 | 1 + 3 | apoe4 = 1 | source, male, age_ge75 | 0.1118 | 0.11352 | 0.03504 | 0.63862 | 1.22 | 0.95:1.56 | 1.52 | 1.03:2.23 | 1.1 | 0.74:1.64 | A | 50.7 | 45.6 | 459 | 181 |
| hCV15965240 | 1 | ALL | apoe4, male, age_ge75 | 0.2343 | 0.23343 | 0.02872 | 0.76594 | 1.14 | 0.92:1.43 | 1.49 | 1.04:2.13 | 0.94 | 0.65:1.37 | G | 49.5 | 46.9 | 390 | 352 |
| hCV15965240 | 3 | ALL | apoe4, male, age_ge75 | 0.14962 | 0.14311 | 0.02503 | 0.98192 | 1.18 | 0.94:1.47 | 1.5 | 1.05:2.14 | 1 | 0.68:1.48 | G | 48.6 | 44.9 | 359 | 395 |
| hCV16111152 | 1 | apoe4 = 0 | male, age_ge75 | 0.04186 | 0.03962 | 0.06465 | 0.15809 | 1.44 | 1.01:2.06 | 1.47 | 0.97:2.21 | 2.4 | 0.67:8.58 | C | 18.8 | 13.9 | 178 | 287 |
| hCV16111152 | 2 | apoe4 = 0 | male, age_ge75 | 0.02527 | 0.02544 | 0.01328 | 0.79966 | 1.79 | 1.07:3.00 | 2.18 | 1.17:4.05 | 1.28 | 0.22:7.37 | C | 23.7 | 17.6 | 59 | 273 |
| hCV16289132 | 1 | age_ge75 = 1 | NONE | 0.05208 | 0.05788 | 0.34336 | 0.01353 | 1.33 | 1.00:1.76 | 1.21 | 0.82:1.78 | 2.08 | 1.15:3.76 | C | 38.2 | 31.8 | 212 | 206 |
| hCV16289132 | 2 + 3 | age_ge75 = 1 | source | 0.00882 | 0.0086 | 0.07092 | 0.00634 | 1.36 | 1.08:1.71 | 1.32 | 0.98:1.80 | 2 | 1.22:3.27 | C | 35.8 | 31.9 | 286 | 494 |
| hCV16289132 | 1 | ALL | NONE | 0.01265 | 0.01696 | 0.06148 | 0.0317 | 1.31 | 1.06:1.63 | 1.32 | 0.99:1.77 | 1.58 | 1.04:2.40 | C | 38.3 | 32.1 | 389 | 352 |
| hCV16289132 | 2 + 3 | ALL | source | 0.17209 | 0.1784 | 0.66038 | 0.03093 | 1.12 | 0.95:1.33 | 1.05 | 0.84:1.31 | 1.47 | 1.04:2.08 | C | 33.8 | 32.4 | 547 | 756 |
| hCV16289132 | 3 | male = 0 | apoe4, age_ge75 | 0.0914 | 0.08258 | 0.27686 | 0.03958 | 1.27 | 0.96:1.67 | 1.22 | 0.85:1.75 | 2.2 | 1.06:4.56 | C | 31.7 | 27.6 | 282 | 295 |
| hCV16289132 | 1 + 2 | male = 0 | source, apoe4, age_ge75 | 0.02878 | 0.03565 | 0.13057 | 0.0395 | 1.31 | 1.03:1.68 | 1.29 | 0.92:1.80 | 1.64 | 1.03:2.63 | C | 39.3 | 34.9 | 331 | 446 |
| hCV1665140 | 3 | age_ge75 = 1 | apoe4, male | 0.58527 | 0.59007 | 0.04038 | 0.18962 | 1.08 | 0.82:1.41 | 1.55 | 1.02:2.37 | 0.74 | 0.47:1.17 | C | 47.7 | 45.1 | 222 | 246 |
| hCV1665140 | 1 + 2 | age_ge75 = 1 | source, apoe4, male | 0.02654 | 0.02936 | 0.01354 | 0.28865 | 1.29 | 1.03:1.61 | 1.54 | 1.09:2.19 | 1.23 | 0.84:1.79 | C | 50.7 | 44.4 | 301 | 486 |
| hCV1665140 | 3 | ALL | NONE | 0.37159 | 0.36916 | 0.01051 | 0.22525 | 1.1 | 0.90:1.34 | 1.53 | 1.10:2.12 | 0.81 | 0.57:1.14 | C | 48.9 | 46.6 | 360 | 396 |
| hCV1665140 | 1 + 2 | ALL | source | 0.05726 | 0.05881 | 0.0455 | 0.28048 | 1.16 | 1.00:1.35 | 1.28 | 1.01:1.64 | 1.15 | 0.89:1.47 | C | 50.9 | 47.4 | 627 | 777 |
| hCV1665140 | 1 | apoe4 = 1 | male, age_ge75 | 0.01172 | 0.01353 | 0.0123 | 0.11826 | 1.57 | 1.10:2.24 | 1.98 | 1.16:3.39 | 1.62 | 0.88:2.97 | C | 51.7 | 40.7 | 240 | 86 |
| hCV1665140 | 2 + 3 | apoe4 = 1 | source, male, age_ge75 | 0.61265 | 0.61109 | 0.03077 | 0.18548 | 1.07 | 0.82:1.38 | 1.59 | 1.04:2.41 | 0.76 | 0.51:1.15 | C | 51.3 | 47.9 | 343 | 191 |
| hCV1665140 | 1 | male = 0 | apoe4, age_ge75 | 0.27213 | 0.27118 | 0.04834 | 0.81447 | 1.16 | 0.89:1.53 | 1.54 | 1.00:2.37 | 0.95 | 0.60:1.50 | C | 49.1 | 46.4 | 264 | 234 |
| hCV1665140 | 2 + 3 | male = 0 | source, apoe4, age_ge75 | 0.21357 | 0.21441 | 0.00624 | 0.48379 | 1.14 | 0.93:1.41 | 1.61 | 1.14:2.28 | 0.88 | 0.62:1.25 | C | 52.0 | 48.4 | 374 | 548 |
| hCV1665253 | 1 | ALL | apoe4, male, age_ge75 | 0.03464 | 0.03372 | 0.04058 | 0.25936 | 0.76 | 0.59:0.98 | 0.72 | 0.53:0.99 | 0.67 | 0.33:1.36 | T | 20.4 | 25.3 | 417 | 375 |
| hCV1665253 | 2 | ALL | apoe4, male, age_ge75 | 0.0258 | 0.02641 | 0.02276 | 0.34636 | 0.7 | 0.52:0.96 | 0.65 | 0.44:0.94 | 0.69 | 0.31:1.51 | T | 20.8 | 26.8 | 250 | 399 |
| hCV1665253 | 1 | apoe4 = 0 | male, age_ge75 | 0.01393 | 0.01425 | 0.02172 | 0.13829 | 0.66 | 0.48:0.92 | 0.63 | 0.43:0.93 | 0.52 | 0.21:1.29 | T | 18.6 | 26.4 | 177 | 288 |
| hCV1665253 | 2 | apoe4 = 0 | male, age_ge75 | 0.01119 | 0.01232 | 0.0232 | 0.09029 | 0.57 | 0.37:0.88 | 0.55 | 0.33:0.92 | 0.39 | 0.12:1.28 | T | 18.3 | 27.8 | 93 | 302 |
| hCV1665253 | 1 | male = 1 | apoe4, age_ge75 | 0.03446 | 0.03229 | 0.01484 | 0.78366 | 0.64 | 0.43:0.97 | 0.54 | 0.33:0.89 | 0.84 | 0.26:2.74 | T | 19.8 | 27.1 | 154 | 140 |
| hCV1665253 | 2 | male = 1 | apoe4, age_ge75 | 0.02516 | 0.02703 | 0.0477 | 0.12263 | 0.61 | 0.40:0.94 | 0.59 | 0.35:0.99 | 0.4 | 0.13:1.27 | T | 20.7 | 31.5 | 138 | 146 |
| hCV1791780 | 2 | apoe4 = 0 | NONE | 0.51927 | 0.49736 | 0.90966 | 0.00895 | 1.14 | 0.76:1.71 | 0.97 | 0.60:1.58 | 4.8 | 1.32:17.41 | G | 22.5 | 20.3 | 91 | 276 |
| hCV1791780 | 3 | apoe4 = 0 | NONE | 0.03172 | 0.02663 | 0.07792 | 0.04618 | 1.41 | 1.03:1.92 | 1.42 | 0.96:2.11 | 2.31 | 0.99:5.36 | G | 29.3 | 22.8 | 150 | 303 |
| hCV1792842 | 2 | apoe4 = 0 | NONE | 0.49889 | 0.47693 | 0.93946 | 0.00915 | 1.15 | 0.77:1.72 | 0.98 | 0.60:1.60 | 4.78 | 1.32:17.35 | C | 22.5 | 20.2 | 91 | 275 |
| hCV1792842 | 3 | apoe4 = 0 | NONE | 0.03172 | 0.02663 | 0.07792 | 0.04618 | 1.41 | 1.03:1.92 | 1.42 | 0.96:2.11 | 2.31 | 0.99:5.36 | C | 29.3 | 22.8 | 150 | 303 |
| hCV1792848 | 3 | male = 1 | NONE | 0.16787 | 0.15475 | 0.53822 | 0.02859 | 1.38 | 0.87:2.16 | 1.2 | 0.67:2.18 | 3.57 | 1.07:11.84 | T | 34.0 | 27.2 | 78 | 101 |
| hCV1792848 | 1 + 2 | male = 1 | source | 0.09947 | 0.08782 | 0.43623 | 0.01044 | 1.26 | 0.96:1.66 | 1.15 | 0.81:1.65 | 2.46 | 1.21:5.01 | T | 32.8 | 27.5 | 229 | 260 |
| hCV1792856 | 1 | apoe4 = 1 | NONE | 0.03186 | 0.02924 | 0.04099 | 0.21475 | 0.62 | 0.40:0.96 | 0.58 | 0.34:0.98 | 0.44 | 0.11:1.67 | G | 16.4 | 24.1 | 225 | 81 |
| hCV1792856 | 3 | apoe4 = 1 | NONE | 0.03103 | 0.03278 | 0.07844 | 0.05868 | 0.63 | 0.41:0.96 | 0.64 | 0.39:1.05 | 0.33 | 0.10:1.10 | G | 15.4 | 22.4 | 234 | 96 |
| hCV1824909 | 1 | ALL | apoe4, male, age_ge75 | 0.19091 | 0.19667 | 0.03041 | 0.51764 | 0.86 | 0.68:1.08 | 0.7 | 0.51:0.97 | 1.17 | 0.72:1.91 | C | 31.4 | 34.4 | 390 | 350 |
| hCV1824909 | 2 + 3 | ALL | source, apoe4, male, age_ge75 | 0.00181 | 0.00211 | 0.01442 | 0.00784 | 0.74 | 0.61:0.89 | 0.73 | 0.57:0.94 | 0.58 | 0.39:0.86 | C | 31.7 | 37.5 | 526 | 742 |
| hCV1824909 | 1 | apoe4 = 1 | male, age_ge75 | 0.03211 | 0.02906 | 0.02321 | 0.3263 | 0.66 | 0.45:0.96 | 0.54 | 0.31:0.92 | 0.66 | 0.29:1.51 | C | 29.5 | 39.4 | 227 | 80 |
| hCV1824909 | 2 + 3 | apoe4 = 1 | source, male, age_ge75 | 0.00796 | 0.00796 | 0.00707 | 0.15844 | 0.68 | 0.51:0.90 | 0.58 | 0.39:0.86 | 0.66 | 0.37:1.17 | C | 32.2 | 41.6 | 325 | 172 |
| hCV1824909 | 1 | male = 0 | apoe4, age_ge75 | 0.26421 | 0.25986 | 0.041 | 0.35324 | 0.84 | 0.62:1.14 | 0.65 | 0.44:0.98 | 1.37 | 0.70:2.70 | C | 30.4 | 33.6 | 250 | 216 |
| hCV1824909 | 2 + 3 | male = 0 | source, apoe4, age_ge75 | 0.00252 | 0.00339 | 0.00817 | 0.03473 | 0.7 | 0.56:0.88 | 0.66 | 0.48:0.90 | 0.6 | 0.37:0.96 | C | 31.0 | 37.4 | 360 | 517 |
| hCV1841875 | 1 | apoe4 = 1 | male, age_ge75 | 0.03102 | 0.03013 | 0.0322 | 0.34162 | 0.63 | 0.41:0.96 | 0.58 | 0.35:0.96 | 0.54 | 0.15:1.96 | A | 15.8 | 23.6 | 240 | 87 |
| hCV1841875 | 2 + 3 | apoe4 = 1 | source, male, age_ge75 | 0.00187 | 0.00149 | 0.00174 | 0.20065 | 0.57 | 0.40:0.81 | 0.52 | 0.35:0.79 | 0.4 | 0.10:1.51 | A | 14.4 | 21.6 | 329 | 176 |
| hCV1873996 | 1 | apoe4 = 0 | male, age_ge75 | 0.69193 | 0.69995 | 0.72005 | 0.02805 | 1.08 | 0.73:1.60 | 0.92 | 0.59:1.44 | 4.01 | 1.11:14.53 | A | 14.3 | 12.8 | 178 | 288 |
| hCV1873996 | 2 + 3 | apoe4 = 0 | source, male, age_ge75 | 0.44511 | 0.45785 | 0.97161 | 0.01535 | 1.15 | 0.81:1.64 | 1.01 | 0.68:1.50 | 3.87 | 1.23:12.13 | A | 12.7 | 11.3 | 204 | 598 |
| hCV1911256 | 1 | ALL | apoe4, male, age_ge75 | 0.00875 | 0.0093 | 0.02001 | 0.06841 | 0.72 | 0.56:0.92 | 0.7 | 0.51:0.95 | 0.58 | 0.31:1.06 | T | 22.5 | 26.8 | 414 | 373 |
| hCV1911256 | 2 | ALL | apoe4, male, age_ge75 | 0.05082 | 0.05921 | 0.04337 | 0.45252 | 0.71 | 0.51:1.00 | 0.65 | 0.43:0.99 | 0.73 | 0.33:1.63 | T | 22.2 | 26.4 | 185 | 388 |
| hCV1920609 | 1 | age_ge75 = 1 | NONE | 0.07824 | 0.07682 | 0.03378 | 0.45855 | 1.27 | 0.97:1.65 | 1.59 | 1.03:2.44 | 1.18 | 0.76:1.83 | A | 51.8 | 45.9 | 227 | 217 |
| hCV1920609 | 2 + 3 | age_ge75 = 1 | source | 0.06587 | 0.05746 | 0.03108 | 0.37966 | 1.22 | 0.99:1.51 | 1.47 | 1.03:2.09 | 1.17 | 0.82:1.68 | A | 50.9 | 46.9 | 293 | 503 |
| hCV1920609 | 1 | ALL | NONE | 0.03777 | 0.03595 | 0.10875 | 0.07056 | 1.23 | 1.01:1.50 | 1.31 | 0.94:1.81 | 1.35 | 0.97:1.86 | A | 53.2 | 48.0 | 419 | 376 |
| hCV1920609 | 2 + 3 | ALL | source | 0.05288 | 0.04738 | 0.05624 | 0.1968 | 1.17 | 1.00:1.36 | 1.28 | 0.99:1.65 | 1.19 | 0.91:1.54 | A | 50.6 | 47.1 | 560 | 772 |
| hCV199172 | 1 | apoe4 = 1 | male, age_ge75 | 0.02832 | 0.03477 | 0.02744 | 0.4443 | 1.86 | 1.06:3.25 | 2.03 | 1.08:3.81 | 1.83 | 0.38:8.81 | A | 17.8 | 11.1 | 227 | 81 |
| hCV199172 | 2 | apoe4 = 1 | male, age_ge75 | 0.06086 | 0.04997 | 0.07921 | 0.15775 | 1.88 | 0.98:3.62 | 1.9 | 0.94:3.86 | | | A | 18.2 | 11.1 | 110 | 81 |
| hCV2144148 | 1 | age_ge75 = 0 | NONE | 0.01113 | 0.01236 | 0.03874 | 0.02532 | 0.59 | 0.39:0.89 | 0.61 | 0.38:0.98 | 0.2 | 0.04:0.95 | C | 12.5 | 19.5 | 192 | 159 |
| hCV2144148 | 3 | age_ge75 = 0 | NONE | 0.04399 | 0.04136 | 0.01381 | 0.62083 | 0.63 | 0.40:0.99 | 0.53 | 0.32:0.88 | 1.46 | 0.32:6.66 | C | 13.4 | 19.7 | 138 | 150 |
| hCV2170733 | 1 | male = 0 | apoe4, age_ge75 | 0.02417 | 0.02827 | 0.02807 | 0.45693 | 2.03 | 1.08:3.78 | 2.06 | 1.07:3.97 | 3.36 | 0.18:64.45 | C | 7.6 | 4.0 | 264 | 235 |
| hCV2170733 | 2 | male = 0 | apoe4, age_ge75 | 0.00074 | 0.00061 | 0.00208 | 0.00053 | 3.91 | 1.71:8.94 | 3.91 | 1.60:9.57 | | | C | 10.1 | 5.0 | 89 | 238 |
| hCV2539346 | 3 | age_ge75 = 0 | apoe4, male | 0.00029 | 0.0003 | 0.0006 | 0.02122 | 0.47 | 0.31:0.70 | 0.38 | 0.22:0.67 | 0.32 | 0.13:0.82 | T | 27.7 | 45.0 | 137 | 150 |
| hCV2539346 | 1 + 2 | age_ge75 = 0 | source, apoe4, male | 0.01327 | 0.01091 | 0.09506 | 0.00842 | 0.7 | 0.52:0.93 | 0.7 | 0.46:1.06 | 0.48 | 0.27:0.85 | T | 35.2 | 40.9 | 281 | 253 |
| hCV25596081 | 1 | male = 1 | apoe4, age_ge75 | 0.04988 | 0.04739 | 0.04739 | | 2.92 | 0.91:9.39 | 2.97 | 0.92:9.61 | | | T | 3.6 | 1.4 | 154 | 140 |
| hCV25596081 | 2 + 3 | male = 1 | source, apoe4, age_ge75 | 0.03199 | 0.02901 | 0.02901 | | 2.56 | 1.09:6.05 | 2.65 | 1.10:6.35 | | | T | 5.3 | 2.1 | 171 | 237 |
| hCV25602413 | 1 | age_ge75 = 0 | apoe4, male | 0.05507 | 0.05588 | 0.23901 | 0.0159 | 1.46 | 0.99:2.17 | 1.34 | 0.82:2.18 | 3.97 | 1.21:13.06 | A | 27.5 | 22.5 | 191 | 158 |
| hCV25602413 | 2 + 3 | age_ge75 = 0 | source, apoe4, male | 0.12785 | 0.12028 | 0.354 | 0.03456 | 1.29 | 0.93:1.80 | 1.21 | 0.81:1.82 | 2.66 | 1.06:6.67 | A | 24.7 | 22.2 | 251 | 273 |
| hCV25602413 | 1 | ALL | apoe4, male, age_ge75 | 0.01717 | 0.01753 | 0.10483 | 0.00747 | 1.35 | 1.05:1.72 | 1.29 | 0.95:1.75 | 2.42 | 1.24:4.70 | A | 27.0 | 22.7 | 418 | 374 |
| hCV25602413 | 2 + 3 | ALL | source, apoe4, male, age_ge75 | 0.08936 | 0.0867 | 0.31005 | 0.01959 | 1.18 | 0.97:1.44 | 1.13 | 0.89:1.43 | 1.92 | 1.12:3.29 | A | 24.5 | 23.1 | 634 | 796 |
| hCV25603905 | 1 | apoe4 = 0 | male, age_ge75 | 0.00229 | 0.00475 | 0.02762 | 0.00955 | 1.56 | 1.17:2.07 | 1.58 | 1.05:2.38 | 1.87 | 1.15:3.05 | C | 45.0 | 34.3 | 161 | 270 |
| hCV25603905 | 2 + 3 | apoe4 = 0 | source, male, age_ge75 | 0.33631 | 0.33 | 0.81503 | 0.04772 | 1.12 | 0.89:1.42 | 0.96 | 0.67:1.38 | 1.5 | 1.00:2.25 | C | 47.0 | 42.8 | 200 | 572 |
| hCV25606645 | 1 | apoe4 = 1 | NONE | 0.01606 | 0.0227 | 0.04067 | 0.09661 | 0.57 | 0.36:0.91 | 0.57 | 0.33:0.98 | 0.4 | 0.13:1.22 | T | 14.1 | 22.2 | 227 | 81 |
| hCV25606645 | 3 | apoe4 = 1 | NONE | 0.04485 | 0.05674 | 0.12293 | 0.0742 | 0.63 | 0.40:0.99 | 0.66 | 0.39:1.12 | 0.35 | 0.10:1.16 | T | 12.8 | 18.9 | 219 | 95 |
| hCV25625639 | 1 | apoe4 = 0 | NONE | 0.03831 | 0.03792 | 0.01501 | 0.63551 | 0.73 | 0.54:0.98 | 0.62 | 0.42:0.91 | 0.85 | 0.43:1.67 | A | 26.7 | 33.4 | 163 | 271 |
| hCV25625639 | 2 | apoe4 = 0 | NONE | 0.03854 | 0.03664 | 0.17389 | 0.01421 | 0.61 | 0.38:0.98 | 0.68 | 0.40:1.18 | | | A | 19.7 | 28.6 | 66 | 271 |
| hCV25625639 | 1 | male = 1 | apoe4, age_ge75 | 0.00037 | 0.00035 | 0.00012 | 0.19228 | 0.48 | 0.32:0.72 | 0.36 | 0.21:0.61 | 0.53 | 0.20:1.37 | A | 22.5 | 35.9 | 140 | 135 |
| hCV25625639 | 2 + 3 | male = 1 | source, apoe4, age_ge75 | 0.03542 | 0.03212 | 0.0506 | 0.16505 | 0.68 | 0.48:0.98 | 0.64 | 0.41:1.00 | 0.45 | 0.15:1.30 | A | 23.4 | 29.6 | 167 | 226 |
| hCV25636732 | 2 | apoe4 = 1 | NONE | 0.01865 | 0.02175 | 0.14219 | 0.0126 | 0.61 | 0.40:0.92 | 0.65 | 0.36:1.16 | 0.37 | 0.16:0.82 | G | 31.8 | 43.3 | 118 | 82 |
| hCV25636732 | 3 | apoe4 = 1 | NONE | 0.31529 | 0.30405 | 0.80071 | 0.01618 | 0.84 | 0.59:1.19 | 1.07 | 0.65:1.75 | 0.45 | 0.23:0.87 | G | 36.3 | 40.5 | 219 | 95 |
| hCV25636732 | 2 | male = 0 | apoe4, age_ge75 | 0.01011 | 0.01105 | 0.07719 | 0.01048 | 0.55 | 0.35:0.87 | 0.58 | 0.32:1.06 | 0.19 | 0.05:0.73 | G | 26.3 | 39.8 | 80 | 230 |
| hCV25636732 | 3 | male = 0 | apoe4, age_ge75 | 0.62704 | 0.62629 | 0.4583 | 0.02779 | 0.94 | 0.72:1.22 | 1.15 | 0.80:1.65 | 0.52 | 0.29:0.94 | G | 33.5 | 33.7 | 281 | 294 |
| hCV25970515 | 1 | age_ge75 = 1 | apoe4, male | 0.02682 | 0.03136 | 0.05852 | 0.10623 | 1.49 | 1.04:2.13 | 1.5 | 0.98:2.28 | 2.13 | 0.80:5.64 | T | 22.4 | 16.2 | 210 | 204 |
| hCV25970515 | 2 + 3 | age_ge75 = 1 | source, apoe4, male | 0.02472 | 0.02861 | 0.01337 | 0.79582 | 1.42 | 1.05:1.93 | 1.56 | 1.10:2.22 | 1.14 | 0.45:2.88 | T | 18.9 | 14.3 | 283 | 492 |
| hCV2655167 | 1 | ALL | NONE | 0.00414 | 0.00458 | 0.0209 | 0.01498 | 1.39 | 1.11:1.74 | 1.39 | 1.05:1.84 | 1.99 | 1.13:3.51 | G | 29.4 | 23.1 | 418 | 377 |
| hCV2655167 | 2 | ALL | NONE | 0.0531 | 0.05345 | 0.01774 | 0.98329 | 1.28 | 1.00:1.64 | 1.45 | 1.07:1.98 | 1.01 | 0.53:1.90 | G | 27.5 | 22.9 | 275 | 407 |
| hCV2655167 | 1 | apoe4 = 0 | NONE | 0.00032 | 0.00047 | 0.01604 | 0.00011 | 1.73 | 1.28:2.33 | 1.59 | 1.09:2.32 | 3.95 | 1.88:8.28 | G | 31.9 | 21.4 | 177 | 288 |
| hCV2655167 | 2 | apoe4 = 0 | NONE | 0.1053 | 0.11197 | 0.03437 | 0.77083 | 1.4 | 0.93:2.10 | 1.73 | 1.04:2.89 | 0.85 | 0.28:2.57 | G | 28.4 | 22.1 | 74 | 301 |
| hCV2682758 | 1 | age_ge75 = 1 | apoe4, male | 0.16039 | 0.16029 | 0.03641 | 0.77879 | 0.81 | 0.60:1.09 | 0.65 | 0.44:0.97 | 1.09 | 0.60:1.98 | T | 32.3 | 37.2 | 212 | 207 |
| hCV2682758 | 3 | age_ge75 = 1 | apoe4, male | 0.04328 | 0.03996 | 0.03198 | 0.32844 | 0.75 | 0.56:0.99 | 0.66 | 0.45:0.97 | 0.75 | 0.42:1.35 | T | 32.5 | 38.0 | 220 | 245 |
| hCV2685860 | 1 | apoe4 = 0 | male, age_ge75 | 0.01901 | 0.022 | 0.04667 | 0.05753 | 1.74 | 1.09:2.79 | 1.67 | 1.01:2.79 | 5.53 | 0.68:44.70 | A | 11.2 | 6.8 | 178 | 288 |
| hCV2685860 | 3 | apoe4 = 0 | male, age_ge75 | 0.03561 | 0.02852 | 0.02852 | | 1.69 | 1.03:2.78 | 1.78 | 1.06:3.00 | | | A | 10.3 | 6.3 | 150 | 303 |
| hCV2734178 | 1 | age_ge75 = 0 | apoe4, male | 0.04048 | 0.03635 | 0.22904 | 0.02856 | 1.43 | 1.01:2.03 | 1.43 | 0.80:2.55 | 1.79 | 1.03:3.12 | G | 52.9 | 46.2 | 188 | 158 |
| hCV2734178 | 2 + 3 | age_ge75 = 0 | source, apoe4, male | 0.1012 | 0.10581 | 0.54141 | 0.03622 | 1.24 | 0.96:1.59 | 1.14 | 0.76:1.70 | 1.55 | 1.02:2.37 | G | 49.4 | 45.0 | 331 | 290 |
| hCV2734178 | 1 | ALL | NONE | 0.11122 | 0.11686 | 0.58041 | 0.04652 | 1.17 | 0.96:1.43 | 1.1 | 0.79:1.52 | 1.38 | 1.00:1.89 | G | 53.6 | 49.6 | 416 | 376 |
| hCV2734178 | 2 + 3 | ALL | source | 0.17761 | 0.17805 | 0.78398 | 0.04741 | 1.11 | 0.96:1.28 | 1.03 | 0.82:1.30 | 1.28 | 1.00:1.64 | G | 48.8 | 46.5 | 659 | 806 |
| hCV2757616 | 1 | ALL | apoe4, male, age_ge75 | 0.01489 | 0.01664 | 0.02481 | 0.14616 | 1.39 | 1.06:1.81 | 1.43 | 1.04:1.95 | 1.7 | 0.81:3.58 | G | 22.4 | 16.5 | 418 | 375 |
| hCV2757616 | 2 | ALL | apoe4, male, age_ge75 | 0.05283 | 0.05457 | 0.02257 | 0.8909 | 1.43 | 0.99:2.06 | 1.65 | 1.07:2.53 | 0.93 | 0.32:2.75 | G | 20.7 | 15.8 | 181 | 380 |
| hCV2757616 | 1 | apoe4 = 0 | male, age_ge75 | 0.00174 | 0.00254 | 0.00279 | 0.13011 | 1.72 | 1.22:2.43 | 1.85 | 1.23:2.77 | 1.93 | 0.80:4.70 | G | 23.0 | 14.9 | 178 | 288 |
| hCV2757616 | 2 + 3 | apoe4 = 0 | source, male, age_ge75 | 0.00296 | 0.00284 | 0.00423 | 0.12593 | 1.57 | 1.16:2.12 | 1.66 | 1.17:2.35 | 2.15 | 0.80:5.79 | G | 20.7 | 15.0 | 205 | 590 |
| hCV286937 | 1 | ALL | apoe4, male, age_ge75 | 0.02842 | 0.03091 | 0.02459 | 0.47352 | 0.71 | 0.53:0.96 | 0.67 | 0.47:0.95 | 0.71 | 0.29:1.77 | G | 13.9 | 20.1 | 389 | 350 |
| hCV286937 | 2 + 3 | ALL | source, apoe4, male, age_ge75 | 0.02821 | 0.02784 | 0.05702 | 0.08088 | 0.75 | 0.59:0.97 | 0.76 | 0.57:1.01 | 0.41 | 0.15:1.14 | G | 12.7 | 16.7 | 526 | 739 |
| hCV286937 | 1 | male = 1 | apoe4, age_ge75 | 0.00079 | 0.0009 | 0.00042 | 0.44728 | 0.4 | 0.23:0.68 | 0.34 | 0.18:0.62 | 0.54 | 0.10:2.83 | G | 10.0 | 20.1 | 140 | 134 |
| hCV286937 | 2 + 3 | male = 1 | source, apoe4, age_ge75 | 0.00062 | 0.00063 | 0.00154 | 0.03681 | 0.46 | 0.29:0.72 | 0.44 | 0.27:0.74 | 0.06 | 0.00:1.15 | G | 11.8 | 20.6 | 165 | 223 |
| hCV2875671 | 2 | ALL | NONE | 0.27614 | 0.27371 | 0.64956 | 0.0463 | 0.85 | 0.64:1.13 | 0.93 | 0.66:1.29 | 0.4 | 0.16:1.01 | G | 20.0 | 22.6 | 245 | 358 |
| hCV2875671 | 1 + 3 | ALL | source | 0.0111 | 0.0126 | 0.05572 | 0.01331 | 0.8 | 0.67:0.95 | 0.82 | 0.67:1.00 | 0.56 | 0.35:0.89 | G | 19.1 | 22.7 | 803 | 776 |
| hCV2875671 | 3 | apoe4 = 0 | NONE | 0.02749 | 0.03649 | 0.03705 | 0.26549 | 0.66 | 0.46:0.96 | 0.63 | 0.41:0.97 | 0.59 | 0.23:1.50 | G | 16.3 | 22.8 | 141 | 301 |
| hCV2875671 | 1 + 2 | apoe4 = 0 | source | 0.03863 | 0.04484 | 0.08435 | 0.11331 | 0.75 | 0.57:0.99 | 0.75 | 0.55:1.04 | 0.55 | 0.26:1.17 | G | 18.2 | 23.1 | 244 | 558 |
| hCV2875671 | 3 | male = 0 | NONE | 0.1101 | 0.11158 | 0.31754 | 0.03876 | 0.8 | 0.61:1.05 | 0.84 | 0.61:1.18 | 0.44 | 0.20:0.98 | G | 19.9 | 23.7 | 294 | 297 |
| hCV2875671 | 1 + 2 | male = 0 | source | 0.07553 | 0.07808 | 0.22225 | 0.04312 | 0.8 | 0.63:1.02 | 0.84 | 0.63:1.11 | 0.49 | 0.25:0.98 | G | 19.9 | 23.7 | 377 | 466 |
| hCV2950452 | 1 | age_ge75 = 1 | NONE | 0.03882 | 0.04667 | 0.0063 | 0.922 | 0.74 | 0.56:0.99 | 0.58 | 0.39:0.86 | 0.97 | 0.56:1.69 | A | 31.4 | 38.2 | 212 | 207 |
| hCV2950452 | 3 | age_ge75 = 1 | NONE | 0.04709 | 0.05163 | 0.03405 | 0.42308 | 0.76 | 0.57:1.00 | 0.67 | 0.47:0.97 | 0.79 | 0.44:1.41 | A | 28.8 | 34.9 | 222 | 245 |
| hCV2950452 | 1 | apoe4 = 0 | male, age_ge75 | 0.08524 | 0.09445 | 0.04098 | 0.6852 | 0.77 | 0.57:1.04 | 0.66 | 0.45:0.98 | 0.89 | 0.49:1.60 | A | 30.7 | 36.0 | 163 | 272 |
| hCV2950452 | 3 | apoe4 = 0 | male, age_ge75 | 0.04211 | 0.03847 | 0.04505 | 0.2332 | 0.73 | 0.54:0.99 | 0.67 | 0.45:0.99 | 0.67 | 0.34:1.30 | A | 30.0 | 36.3 | 150 | 302 |
| hCV299325 | 1 | ALL | NONE | 0.02899 | 0.02787 | 0.03925 | 0.17922 | 1.62 | 1.05:2.52 | 1.61 | 1.02:2.53 | | | T | 6.9 | 4.4 | 419 | 377 |
| hCV299325 | 2 + 3 | ALL | source | 0.05412 | 0.05997 | 0.03719 | 0.83573 | 1.37 | 0.99:1.90 | 1.44 | 1.02:2.03 | 0.86 | 0.21:3.54 | T | 6.7 | 5.1 | 566 | 789 |
| hCV299325 | 1 | male = 0 | apoe4, age_ge75 | 0.04895 | 0.04503 | 0.04729 | 0.60505 | 1.77 | 1.00:3.16 | 1.83 | 1.00:3.33 | | | T | 7.0 | 4.9 | 264 | 235 |
| hCV299325 | 2 + 3 | male = 0 | source, apoe4, age_ge75 | 0.04607 | 0.0468 | 0.0392 | 0.94225 | 1.62 | 1.00:2.62 | 1.68 | 1.02:2.76 | 1.16 | 0.04:34.66 | T | 6.5 | 4.4 | 372 | 542 |
| hCV3039499 | 1 | male = 0 | apoe4, age_ge75 | 0.15215 | 0.14695 | 0.0273 | 0.88903 | 1.23 | 0.93:1.64 | 1.6 | 1.05:2.45 | 0.96 | 0.56:1.66 | A | 42.8 | 39.0 | 251 | 219 |
| hCV3039499 | 2 | male = 0 | apoe4, age_ge75 | 0.26232 | 0.23079 | 0.02013 | 0.31435 | 1.27 | 0.83:1.94 | 2.23 | 1.14:4.40 | 0.62 | 0.24:1.61 | A | 42.6 | 37.8 | 81 | 229 |
| hCV3046185 | 1 | ALL | apoe4, male, age_ge75 | 0.01403 | 0.01596 | 0.04611 | 0.04934 | 0.76 | 0.61:0.95 | 0.73 | 0.53:1.00 | 0.68 | 0.46:1.00 | A | 38.8 | 44.7 | 418 | 375 |
| hCV3046185 | 2 + 3 | ALL | source, apoe4, male, age_ge75 | 0.1948 | 0.18907 | 0.75707 | 0.03164 | 0.89 | 0.74:1.06 | 0.96 | 0.75:1.24 | 0.67 | 0.46:0.96 | A | 36.1 | 38.7 | 550 | 794 |
| hCV3046185 | 1 | apoe4 = 1 | male, age_ge75 | 0.07265 | 0.07619 | 0.44312 | 0.02109 | 0.72 | 0.51:1.03 | 0.82 | 0.48:1.38 | 0.49 | 0.27:0.90 | A | 39.2 | 47.7 | 240 | 87 |
| hCV3046185 | 2 + 3 | apoe4 = 1 | source, male, age_ge75 | 0.04999 | 0.04976 | 0.17959 | 0.04783 | 0.76 | 0.59:1.00 | 0.77 | 0.52:1.13 | 0.59 | 0.35:0.99 | A | 35.2 | 41.9 | 341 | 191 |
| hCV3088744 | 1 | age_ge75 = 0 | apoe4, male | 0.01268 | 0.01078 | 0.05961 | 0.02135 | 1.56 | 1.10:2.21 | 1.62 | 0.97:2.70 | 2.19 | 1.10:4.36 | A | 48.4 | 36.6 | 191 | 157 |
| hCV3088744 | 3 | age_ge75 = 0 | apoe4, male | 0.11248 | 0.10833 | 0.55893 | 0.03335 | 1.37 | 0.93:2.02 | 1.2 | 0.66:2.18 | 2.07 | 1.04:4.10 | A | 46.4 | 42.6 | 137 | 149 |
| hCV3091316 | 1 | apoe4 = 1 | male, age_ge75 | 0.49187 | 0.50675 | 0.8485 | 0.00697 | 0.83 | 0.49:1.41 | 1.06 | 0.57:1.96 | 0.13 | 0.02:0.72 | C | 11.6 | 13.2 | 238 | 87 |
| hCV3091316 | 2 | apoe4 = 1 | male, age_ge75 | 0.65341 | 0.63806 | 0.42881 | 0.03151 | 1.16 | 0.59:2.27 | 1.34 | 0.64:2.81 | 0 | | C | 11.4 | 11.1 | 110 | 81 |
| hCV3137872 | 1 | male = 0 | apoe4, age_ge75 | 0.00529 | 0.00659 | 0.01752 | 0.03618 | 1.47 | 1.12:1.93 | 1.68 | 1.10:2.56 | 1.64 | 1.02:2.63 | C | 47.9 | 40.8 | 263 | 234 |
| hCV3137872 | 2 | male = 0 | apoe4, age_ge75 | 0.41721 | 0.43866 | 0.59366 | 0.04199 | 1.18 | 0.80:1.74 | 0.86 | 0.49:1.51 | 1.97 | 1.02:3.82 | C | 45.1 | 41.3 | 92 | 254 |
| hCV3159528 | 3 | age_ge75 = 0 | apoe4, male | 0.02004 | 0.02111 | 0.15371 | 0.00961 | 1.62 | 1.08:2.43 | 1.49 | 0.86:2.59 | 3.47 | 1.41:8.57 | C | 40.2 | 32.0 | 138 | 150 |
| hCV3159528 | 1 + 2 | age_ge75 = 0 | source, apoe4, male | 0.29309 | 0.2992 | 0.91247 | 0.03286 | 1.16 | 0.88:1.51 | 0.98 | 0.67:1.43 | 1.83 | 1.07:3.14 | C | 40.2 | 37.4 | 306 | 282 |
| hCV3159528 | 1 | age_ge75 = 1 | apoe4, male | 0.03855 | 0.04276 | 0.66946 | 0.00132 | 1.34 | 1.02:1.77 | 1.09 | 0.73:1.64 | 2.32 | 1.37:3.91 | C | 44.9 | 37.7 | 225 | 216 |
| hCV3159528 | 2 + 3 | age_ge75 = 1 | source, apoe4, male | 0.0103 | 0.00897 | 0.00364 | 0.31462 | 1.35 | 1.07:1.70 | 1.64 | 1.17:2.28 | 1.26 | 0.80:2.00 | C | 39.8 | 35.6 | 293 | 513 |
| hCV3159528 | 1 | ALL | apoe4, male, age_ge75 | 0.02921 | 0.03162 | 0.79558 | 0.00022 | 1.28 | 1.03:1.59 | 1.04 | 0.76:1.43 | 2.21 | 1.45:3.38 | C | 42.7 | 37.8 | 416 | 374 |
| hCV3159528 | 2 + 3 | ALL | source, apoe4, male, age_ge75 | 0.00097 | 0.00092 | 0.00371 | 0.01452 | 1.35 | 1.13:1.62 | 1.46 | 1.13:1.88 | 1.58 | 1.10:2.27 | C | 40.0 | 35.1 | 546 | 787 |
| hCV3159528 | 1 | apoe4 = 1 | male, age_ge75 | 0.27797 | 0.28061 | 0.80507 | 0.02059 | 1.22 | 0.85:1.76 | 0.94 | 0.55:1.59 | 2.55 | 1.14:5.71 | C | 42.0 | 37.8 | 238 | 86 |
| hCV3159528 | 2 + 3 | apoe4 = 1 | source, male, age_ge75 | 0.00215 | 0.00259 | 0.00535 | 0.03973 | 1.56 | 1.17:2.07 | 1.72 | 1.18:2.53 | 1.92 | 1.05:3.52 | C | 39.3 | 31.3 | 338 | 187 |
| hCV3159528 | 1 | male = 0 | apoe4, age_ge75 | 0.14074 | 0.14883 | 0.77361 | 0.02131 | 1.23 | 0.93:1.62 | 1.06 | 0.71:1.59 | 1.86 | 1.10:3.13 | C | 43.7 | 39.5 | 263 | 234 |
| hCV3159528 | 2 + 3 | male = 0 | source, apoe4, age_ge75 | 0.00904 | 0.01072 | 0.05293 | 0.0189 | 1.35 | 1.08:1.68 | 1.35 | 1.00:1.84 | 1.71 | 1.10:2.65 | C | 39.5 | 34.6 | 372 | 544 |
| hCV3159529 | 3 | age_ge75 = 0 | apoe4, male | 0.02704 | 0.02999 | 0.10386 | 0.03262 | 1.66 | 1.07:2.58 | 1.58 | 0.91:2.73 | 4.21 | 1.21:14.57 | G | 32.2 | 23.3 | 138 | 150 |
| hCV3159529 | 1 + 2 | age_ge75 = 0 | source, apoe4, male | 0.82632 | 0.8278 | 0.3508 | 0.04419 | 1.03 | 0.77:1.40 | 0.83 | 0.56:1.23 | 2.11 | 1.04:4.25 | G | 31.4 | 31.0 | 285 | 255 |
| hCV3159529 | 1 | age_ge75 = 1 | NONE | 0.14153 | 0.14165 | 0.60157 | 0.01966 | 1.24 | 0.93:1.67 | 1.11 | 0.75:1.63 | 2.19 | 1.12:4.27 | G | 34.5 | 29.8 | 210 | 205 |
| hCV3159529 | 2 + 3 | age_ge75 = 1 | source | 0.00124 | 0.00089 | 0.00204 | 0.04062 | 1.46 | 1.16:1.83 | 1.6 | 1.19:2.16 | 1.8 | 1.03:3.17 | G | 33.6 | 26.8 | 298 | 487 |
| hCV3159529 | 1 | ALL | apoe4, male, age_ge75 | 0.1259 | 0.12997 | 0.88282 | 0.00043 | 1.2 | 0.95:1.53 | 0.98 | 0.71:1.34 | 2.62 | 1.51:4.54 | G | 33.1 | 30.1 | 388 | 352 |
| hCV3159529 | 2 + 3 | ALL | source, apoe4, male, age_ge75 | 0.00039 | 0.00031 | 0.00103 | 0.0173 | 1.43 | 1.17:1.74 | 1.53 | 1.19:1.97 | 1.85 | 1.13:3.02 | G | 32.7 | 26.8 | 529 | 745 |
| hCV3159529 | 1 | apoe4 = 1 | male, age_ge75 | 0.95704 | 0.95693 | 0.17523 | 0.03108 | 0.99 | 0.67:1.47 | 0.69 | 0.41:1.17 | 3.64 | 1.05:12.54 | G | 31.3 | 31.9 | 225 | 80 |
| hCV3159529 | 2 + 3 | apoe4 = 1 | source, male, age_ge75 | 0.00006 | 0.00009 | 0.00029 | 0.00915 | 1.91 | 1.39:2.62 | 2.07 | 1.39:3.06 | 3.09 | 1.34:7.17 | G | 33.4 | 22.0 | 328 | 173 |
| hCV3159529 | 3 | male = 0 | apoe4, age_ge75 | 0.00196 | 0.0019 | 0.00878 | 0.01336 | 1.58 | 1.19:2.11 | 1.63 | 1.13:2.34 | 2.72 | 1.25:5.90 | G | 32.3 | 24.0 | 282 | 294 |
| hCV3159529 | 1 + 2 | male = 0 | source, apoe4, age_ge75 | 0.21647 | 0.22307 | 0.75888 | 0.03446 | 1.17 | 0.91:1.50 | 1.05 | 0.76:1.47 | 1.85 | 1.07:3.21 | G | 34.0 | 30.5 | 329 | 442 |
| hCV3178541 | 1 | apoe4 = 0 | male, age_ge75 | 0.04232 | 0.04917 | 0.01333 | 0.79712 | 1.35 | 1.01:1.80 | 1.62 | 1.10:2.37 | 1.09 | 0.58:2.03 | T | 33.7 | 27.5 | 178 | 287 |
| hCV3178541 | 2 + 3 | apoe4 = 0 | source, male, age_ge75 | 0.0071 | 0.00946 | 0.02062 | 0.05695 | 1.4 | 1.10:1.80 | 1.47 | 1.06:2.05 | 1.61 | 0.98:2.64 | T | 35.0 | 28.4 | 207 | 596 |
| hCV3215842 | 1 | apoe4 = 1 | male, age_ge75 | 0.01644 | 0.01796 | 0.04044 | 0.07128 | 1.61 | 1.09:2.39 | 1.68 | 1.02:2.76 | 2.38 | 0.90:6.29 | T | 34.8 | 25.0 | 240 | 86 |
| hCV3215842 | 2 | apoe4 = 1 | male, age_ge75 | 0.0503 | 0.03623 | 0.03729 | 0.31284 | 1.61 | 1.00:2.58 | 1.95 | 1.04:3.68 | 1.9 | 0.57:6.34 | T | 38.6 | 28.4 | 110 | 81 |
| hCV3268994 | 1 | male = 1 | NONE | 0.0448 | 0.04232 | 0.1405 | 0.04512 | 0.69 | 0.48:0.99 | 0.7 | 0.43:1.13 | 0.42 | 0.17:1.00 | C | 27.1 | 35.1 | 140 | 134 |
| hCV3268994 | 2 + 3 | male = 1 | source | 0.03918 | 0.03145 | 0.02366 | 0.44352 | 0.74 | 0.56:0.99 | 0.65 | 0.45:0.94 | 0.75 | 0.36:1.57 | C | 25.9 | 32.1 | 224 | 235 |
| hCV337151 | 1 | age_ge75 = 0 | NONE | 0.05433 | 0.04451 | 0.03856 | 0.33213 | 0.73 | 0.53:1.01 | 0.61 | 0.39:0.98 | 0.72 | 0.36:1.41 | G | 33.9 | 41.3 | 174 | 144 |
| hCV337151 | 2 + 3 | age_ge75 = 0 | source | 0.00005 | 0.00004 | 0.00093 | 0.00064 | 0.59 | 0.45:0.76 | 0.55 | 0.38:0.78 | 0.39 | 0.22:0.68 | G | 31.1 | 43.4 | 246 | 259 |
| hCV337151 | 1 | ALL | NONE | 0.0314 | 0.03172 | 0.0511 | 0.13221 | 0.79 | 0.64:0.98 | 0.74 | 0.55:1.00 | 0.74 | 0.49:1.10 | G | 36.9 | 42.4 | 385 | 348 |
| hCV337151 | 2 + 3 | ALL | source | 0.00799 | 0.00768 | 0.0413 | 0.01801 | 0.8 | 0.68:0.94 | 0.79 | 0.62:0.99 | 0.68 | 0.49:0.94 | G | 36.1 | 41.4 | 545 | 746 |
| hCV472673 | 1 | age_ge75 = 1 | apoe4, male | 0.05433 | 0.04497 | 0.01482 | 0.47051 | 1.32 | 099:1.75 | 1.79 | 1.12:2.84 | 1.2 | 0.73:1.96 | C | 49.5 | 44.2 | 212 | 206 |
| hCV472673 | 2 + 3 | age_ge75 = 1 | source, apoe4, male | 0.05434 | 0.04665 | 0.07595 | 0.1519 | 1.24 | 0.99:1.55 | 1.39 | 0.96:2.00 | 1.31 | 0.90:1.90 | C | 50.9 | 46.9 | 293 | 514 |
| hCV589703 | 1 | age_ge75 = 1 | apoe4, male | 0.21666 | 0.21795 | 0.04782 | 0.04705 | 1.28 | 0.86:1.90 | 1.55 | 1.00:2.43 | 0.19 | 0.03:1.07 | G | 14.6 | 11.5 | 226 | 217 |
| hCV589703 | 2 | age_ge75 = 1 | apoe4, male | 0.03049 | 0.03539 | 0.02945 | 0.47082 | 1.8 | 1.07:3.04 | 1.94 | 1.07:3.52 | 1.91 | 0.36:10.00 | G | 20.4 | 13.2 | 71 | 268 |
| hCV7547730 | 2 | apoe4 = 1 | male, age_ge75 | 0.03911 | 0.03825 | 0.11864 | 0.04237 | 1.6 | 1.02:2.51 | 1.54 | 0.89:2.65 | 4.45 | 0.93:21.29 | A | 29.4 | 19.1 | 158 | 97 |
| hCV7547730 | 1 + 3 | apoe4 = 1 | source, male, age_ge75 | 0.05896 | 0.05761 | 0.17171 | 0.04388 | 1.32 | 0.99:1.78 | 1.28 | 0.90:1.81 | 2.51 | 0.98:6.43 | A | 26.2 | 20.9 | 473 | 182 |
| hCV7611203 | 1 | male = 0 | NONE | 0.01502 | 0.01464 | 0.02194 | 0.12572 | 1.4 | 1.07:1.83 | 1.51 | 1.06:2.15 | 1.6 | 0.87:2.95 | T | 34.906 | 27.8 | 265.0 | 236 |
| hCV7611203 | 3 | male = 0 | NONE | 0.04993 | 0.05699 | 0.11836 | 0.10555 | 1.29 | 1.00:1.67 | 1.3 | 0.94:1.80 | 1.6 | 0.90:2.82 | T | 31.25 | 26.0 | 280.0 | 294 |
| hCV811329 | 1 | ALL | apoe4, male, age_ge75 | 0.01396 | 0.01272 | 0.0136 | 0.28952 | 0.71 | 0.54:0.93 | 0.67 | 0.49:0.92 | 0.62 | 0.26:1.50 | A | 17.1 | 21.0 | 418 | 374 |
| hCV811329 | 2 + 3 | ALL | source, apoe4, male, age_ge75 | 0.03631 | 0.03217 | 0.11103 | 0.02153 | 0.8 | 0.65:0.99 | 0.82 | 0.65:1.05 | 0.41 | 0.19:0.86 | A | 18.9 | 22.1 | 630 | 782 |
| hCV8161028 | 1 | male = 1 | apoe4, age_ge75 | 0.04534 | 0.04569 | 0.04492 | 0.28183 | 0.69 | 0.48:0.99 | 0.6 | 0.36:0.99 | 0.66 | 0.31:1.41 | C | 31.8 | 37.5 | 154 | 140 |
| hCV8161028 | 3 | male = 1 | apoe4, age_ge75 | 0.04863 | 0.06271 | 0.0817 | 0.18643 | 0.63 | 0.40:1.00 | 0.56 | 0.30:1.07 | 0.55 | 0.23:1.32 | C | 34.0 | 43.1 | 78 | 101 |
| hCV8227677 | 1 | age_ge75 = 0 | apoe4, male | 0.01889 | 0.01684 | 0.50634 | 0.00141 | 1.55 | 1.07:2.23 | 1.24 | 0.67:2.29 | 2.77 | 1.46:5.26 | C | 55.4 | 45.5 | 177 | 146 |
| hCV8227677 | 2 + 3 | age_ge75 = 0 | source, apoe4, male | 0.00638 | 0.00868 | 0.0621 | 0.01249 | 1.49 | 1.12:2.00 | 1.52 | 0.97:2.38 | 1.87 | 1.15:3.04 | C | 52.7 | 43.7 | 244 | 253 |
| hCV8227677 | 2 | age_ge75 = 1 | apoe4, male | 0.00812 | 0.01146 | 0.00843 | 0.12238 | 1.78 | 1.16:2.73 | 2.73 | 1.27:5.90 | 1.69 | 0.87:3.29 | C | 58.2 | 46.6 | 61 | 238 |
| hCV8227677 | 1 + 3 | age_ge75 = 1 | source, apoe4, male | 0.02759 | 0.02462 | 0.52246 | 0.00208 | 1.25 | 1.02:1.51 | 1.11 | 0.81:1.52 | 1.7 | 1.21:2.38 | C | 50.1 | 45.7 | 433 | 450 |
| hCV8227677 | 1 | ALL | apoe4, male, age_ge75 | 0.00601 | 0.00587 | 0.95775 | 0.00001 | 1.37 | 1.09:1.71 | 0.99 | 0.68:1.43 | 2.35 | 1.61:3.43 | C | 54.6 | 46.9 | 389 | 350 |
| hCV8227677 | 2 + 3 | ALL | source, apoe4, male, age_ge75 | 0.00016 | 0.00017 | 0.00136 | 0.00324 | 1.41 | 1.18:1.69 | 1.59 | 1.20:2.12 | 1.59 | 1.17:2.16 | C | 50.7 | 44.7 | 526 | 737 |
| hCV8227677 | 1 | apoe4 = 1 | male, age_ge75 | 0.03439 | 0.02936 | 0.97154 | 0.00079 | 1.48 | 1.03:2.14 | 1.01 | 0.54:1.90 | 3.32 | 1.60:6.86 | C | 55.5 | 45.7 | 226 | 81 |
| hCV8227677 | 2 + 3 | apoe4 = 1 | source, male, age_ge75 | 0.0005 | 0.00057 | 0.00844 | 0.00234 | 1.64 | 1.24:2.17 | 1.75 | 1.15:2.66 | 2.25 | 1.33:3.83 | C | 49.8 | 38.2 | 325 | 170 |
| hCV8227677 | 1 | male = 0 | apoe4, age_ge75 | 0.05246 | 0.05073 | 0.91673 | 0.00264 | 1.32 | 1.00:1.76 | 1.03 | 0.63:1.66 | 2.03 | 1.27:3.24 | C | 55.4 | 48.2 | 250 | 218 |
| hCV8227677 | 2 + 3 | male = 0 | source, apoe4, age_ge75 | 0.00083 | 0.00105 | 0.01265 | 0.00349 | 1.45 | 1.17:1.81 | 1.55 | 1.10:2.18 | 1.75 | 1.20:2.54 | C | 50.7 | 44.4 | 360 | 515 |
| hCV648829 | 1 | age_ge75 = 0 | apoe4, male | 0.04828 | 0.044 | 0.12597 | 0.0418 | 1.5 | 0.99:2.26 | 1.46 | 0.89:2.38 | 5.75 | 1.10:29.98 | C | 25.8 | 17.9 | 190 | 156 |
| hCV848829 | 2 + 3 | age_ge75 = 0 | source, apoe4, male | 0.12326 | 0.12435 | 0.60075 | 0.0038 | 1.29 | 0.93:1.78 | 1.11 | 0.75:1.65 | 3.87 | 1.56:9.55 | C | 25.4 | 22.8 | 252 | 268 |
| hCV855979 | 1 | ALL | NONE | 0.0169 | 0.01833 | 0.01375 | 0.63623 | 1.5 | 1.07:2.09 | 1.57 | 1.10:2.26 | 1.36 | 0.38:4.85 | T | 11.8 | 8.2 | 418 | 377 |
| hCV855979 | 2 + 3 | ALL | source | 0.04501 | 0.05019 | 0.05276 | 0.41742 | 1.3 | 1.01:1.69 | 1.32 | 1.00:1.75 | 1.49 | 0.57:3.86 | T | 10.9 | 8.5 | 562 | 790 |
| hCV8715115 | 1 | ALL | NONE | 0.03239 | 0.03319 | 0.04741 | 0.17723 | 1.71 | 1.04:2.82 | 1.67 | 1.00:2.80 | | | A | 5.9 | 3.5 | 391 | 355 |
| hCV8715115 | 2 + 3 | ALL | source | 0.00831 | 0.00916 | 0.00997 | 0.40659 | 1.73 | 1.15:2.61 | 1.74 | 1.14:2.66 | 3.05 | 0.23:40.80 | A | 4.9 | 2.9 | 546 | 754 |
| hCV8715115 | 2 | apoe4 = 0 | NONE | 0.07336 | 0.08026 | 0.04784 | 0.56528 | 2.08 | 0.92:4.72 | 2.31 | 0.99:5.39 | | | A | 5.4 | 2.7 | 92 | 279 |
| hCV8715115 | 1 + 3 | apoe4 = 0 | source | 0.00562 | 0.00545 | 0.00775 | 0.15524 | 1.97 | 1.21:3.22 | 1.96 | 1.18:3.25 | | | A | 5.4 | 2.8 | 314 | 576 |
| hCV8715115 | 1 | male = 0 | NONE | 0.02755 | 0.03024 | 0.0436 | 0.18457 | 1.99 | 1.07:3.72 | 1.93 | 1.01:3.67 | | | A | 6.6 | 3.4 | 251 | 220 |
| hCV8715115 | 2 + 3 | male = 0 | source | 0.00327 | 0.00361 | 0.00544 | 0.14626 | 2.09 | 1.27:3.44 | 2.05 | 1.23:3.43 | | | A | 5.7 | 2.7 | 371 | 523 |
| hCV8725171 | 1 | apoe4 = 1 | male, age_ge75 | 0.01489 | 0.01922 | 0.0309 | 0.11628 | 1.83 | 1.12:2.98 | 1.86 | 1.06:3.27 | 3.1 | 0.70:13.77 | G | 24.0 | 14.8 | 227 | 81 |
| hCV8725171 | 2 + 3 | apoe4 = 1 | source, male, age_ge75 | 0.04864 | 0.04729 | 0.08495 | 0.13559 | 1.38 | 1.00:1.92 | 1.39 | 0.95:2.03 | 2.32 | 0.75:7.15 | G | 23.3 | 17.3 | 390 | 185 |
| hCV8725171 | 1 | male = 0 | apoe4, age_ge75 | 0.05495 | 0.0626 | 0.04876 | 0.48103 | 1.41 | 1.00:2.00 | 1.52 | 1.00:2.31 | 1.42 | 0.57:3.55 | G | 24.2 | 19.2 | 250 | 219 |
| hCV8725171 | 2 + 3 | male = 0 | source, apoe4, age_ge75 | 0.00894 | 0.01119 | 0.03595 | 0.02825 | 1.43 | 1.09:1.86 | 1.4 | 1.02:1.92 | 2.21 | 1.09:4.47 | G | 24.2 | 17.9 | 370 | 533 |
| hCV8782652 | 1 | age_ge75 = 1 | apoe4, male | 0.05378 | 0.04595 | 0.01817 | 0.41898 | 1.32 | 1.00:1.75 | 1.76 | 1.10:2.80 | 1.22 | 0.75:1.99 | T | 50.0 | 44.6 | 212 | 205 |
| hCV8782652 | 3 | age_ge75 = 1 | apoe4, male | 0.11023 | 0.09478 | 0.0391 | 0.55991 | 1.25 | 0.95:1.63 | 1.59 | 1.02:2.48 | 1.15 | 0.72:1.84 | T | 50.0 | 46.3 | 222 | 246 |
| hCV8856240 | 1 | age_ge75 = 1 | apoe4, male | 0.02985 | 0.02881 | 0.04189 | 0.19808 | 1.52 | 1.04:2.21 | 1.56 | 1.02:2.38 | 2.42 | 0.61:9.65 | G | 19.4 | 13.2 | 227 | 216 |
| hCV8856240 | 2 + 3 | age_ge75 = 1 | source, apoe4, male | 0.03269 | 0.03653 | 0.07607 | 0.08502 | 1.38 | 1.03:1.84 | 1.36 | 0.97:1.92 | 2.19 | 0.93:5.14 | G | 20.0 | 17.5 | 295 | 509 |
| hCV8856240 | 1 | ALL | apoe4, male, age_ge75 | 0.00229 | 0.0025 | 0.00758 | 0.02729 | 1.57 | 1.17:2.09 | 1.57 | 1.13:2.18 | 3.02 | 1.13:8.10 | G | 20.5 | 14.2 | 418 | 374 |
| hCV8856240 | 2 + 3 | ALL | source, apoe4, male, age_ge75 | 0.03055 | 0.03323 | 0.03945 | 0.25711 | 1.28 | 1.02:1.60 | 1.32 | 1.01:1.72 | 1.48 | 0.77:2.84 | G | 20.1 | 18.0 | 551 | 784 |
| hCV8856240 | 1 | apoe4 = 1 | NONE | 0.02119 | 0.02356 | 0.04583 | 0.095 | 1.77 | 1.08:2.89 | 1.75 | 1.01:3.03 | 4.87 | 0.63:37.78 | G | 21.5 | 13.4 | 240 | 86 |
| hCV8856240 | 2 + 3 | apoe4 = 1 | source | 0.03451 | 0.04378 | 0.0787 | 0.1165 | 1.45 | 1.03:2.05 | 1.43 | 0.96:2.12 | 2.22 | 0.81:6.11 | G | 20.2 | 14.4 | 351 | 187 |
| hCV8921255 | 3 | apoe4 = 0 | NONE | 0.03761 | 0.03326 | 0.02535 | 0.37977 | 0.72 | 0.52:0.98 | 0.63 | 0.42:0.95 | 0.72 | 0.34:1.51 | G | 26.6 | 33.6 | 141 | 301 |
| hCV8921255 | 1 + 2 | apoe4 = 0 | source | 0.03824 | 0.0422 | 0.05682 | 0.18146 | 0.78 | 0.61:0.99 | 0.74 | 0.54:1.01 | 0.72 | 0.44:1.18 | G | 30.2 | 35.7 | 230 | 544 |
| hCV9579537 | 1 | ALL | NONE | 0.03721 | 0.03826 | 0.01924 | 0.56977 | 1.5 | 1.02:2.21 | 1.63 | 1.08:2.45 | 0.6 | 0.10:3.60 | C | 8.8 | 6.0 | 417 | 375 |
| hCV9579537 | 3 | ALL | NONE | 0.04507 | 0.04904 | 0.08328 | 0.12067 | 1.44 | 1.01:2.07 | 1.41 | 0.96:2.07 | 3.32 | 0.67:16.57 | C | 10.3 | 7.4 | 359 | 393 |
| hCV9632133 | 3 | apoe4 = 1 | NONE | 0.01457 | 0.01599 | 0.00795 | 0.38552 | 1.63 | 1.10:2.40 | 1.94 | 1.18:3.16 | 1.48 | 0.61:3.57 | G | 32.9 | 23.2 | 219 | 95 |
| hCV9632133 | 1 + 2 | apoe4 = 1 | source | 0.03481 | 0.035 | 0.16782 | 0.01781 | 1.38 | 1.02:1.87 | 1.31 | 0.89:1.91 | 2.73 | 1.17:6.38 | G | 32.0 | 25.3 | 344 | 158 |
| hDV68530985 | 1 | age_ge75 = 0 | NONE | 0.00049 | 0.00051 | 0.00127 | 0.0285 | 1.95 | 1.34:2.86 | 2.11 | 1.34:3.33 | 3.3 | 1.07:10.19 | C | 29.4 | 17.6 | 175 | 145 |
| hDV68530985 | 3 | age_ge75 = 0 | NONE | 0.05325 | 0.05421 | 0.19047 | 0.02565 | 1.47 | 0.99:2.16 | 1.37 | 0.85:2.19 | 3.48 | 1.09:11.05 | C | 26.8 | 20.0 | 138 | 150 |
| hDV68530994 | 3 | age_ge75 = 0 | NONE | 0.04207 | 0.04337 | 0.15387 | 0.02565 | 1.5 | 1.01:2.21 | 1.41 | 0.88:2.26 | 3.48 | 1.09:11.05 | T | 26.8 | 19.7 | 138 | 150 |
| hDV68530994 | 1 + 2 | age_ge75 = 0 | source | 0.02527 | 0.03175 | 0.06092 | 0.09803 | 1.38 | 1.04:1.83 | 1.39 | 0.98:1.96 | 1.77 | 0.90:3.48 | T | 27.0 | 21.2 | 285 | 255 |
| hDV68530995 | 3 | age_ge75 = 0 | NONE | 0.0329 | 0.03442 | 0.12278 | 0.02565 | 1.53 | 1.03:2.26 | 1.45 | 0.90:2.33 | 3.48 | 1.09:11.05 | A | 26.8 | 19.3 | 138 | 150 |
| hDV68530995 | 1 + 2 | age_ge75 = 0 | source | 0.03873 | 0.04554 | 0.07181 | 0.15451 | 1.35 | 1.01:1.78 | 1.37 | 0.97:1.93 | 1.65 | 0.83:3.28 | A | 26.8 | 21.4 | 282 | 255 |

[0436] TABLE 7

| | | | | Allelic | | Domi- | Reces- | | | OR- | OR- | OR- | OR- | Al- | Case | Control | Case | |
|---|---|---|---|---|---|---|---|---|---|---|---|---|---|---|---|---|---|---|
| | Sample | | | p- | Additive | nant | sive | OR- | OR-allelic | domi- | dominant | reces- | recessive | lele | Allele 1 | Allele 1 | Sam- | Control |
| Marker | set | Strata | Adjust | value | p-value | p-value | p-value | allelic | 95% Cl | nant | 95% Cl | sive | 95% Cl | 1 | Freq | Freq | ples | Samples |
| hCV1027219 | 1 | male = 1 | apoe4, age_ge75 | 0.00771 | 0.00722 | 0.09036 | 0.0017 | 1.68 | 1.15:2.48 | 1.53 | 0.94:2.51 | 5.35 | 1.78:16.07 | A | 34.4 | 23.9 | 154 | 140 |
| hCV1027219 | 1 + 2 | male = 1 | source, apoe4, age_ge75 | 0.0487 | 0.0419 | 0.2554 | 0.00868 | 1.34 | 1.00:1.79 | 1.25 | 0.85:1.83 | 2.7 | 1.30:5.60 | A | 34.0 | 27.8 | 243 | 268 |
| hCV1054616 | 1 | male = 0 | apoe4, age_ge75 | 0.22834 | 0.22945 | 0.60006 | 0.00712 | 1.18 | 0.90:1.55 | 0.9 | 0.59:1.36 | 1.96 | 1.20:3.20 | G | 47.9 | 42.5 | 264 | 234 |
| hCV1054616 | 1 + 2 | male = 0 | source, apoe4, age_ge75 | 0.05876 | 0.05832 | 0.82983 | 0.00258 | 1.24 | 0.99:1.55 | 1.04 | 0.73:1.47 | 1.82 | 1.23:2.70 | G | 49.2 | 44.9 | 354 | 483 |
| hCV11192460 | 1 | age_ge75 = 1 | apoe4, male | 0.00014 | 0.00023 | 0.00254 | 0.00069 | 2.29 | 1.48:3.53 | 2.07 | 1.29:3.33 | | . :. | A | 17.0 | 8.5 | 227 | 217 |
| hCV11192460 | 1 + 2 + 3 | age_ge75 = 1 | source, apoe4, male | 0.00116 | 0.00137 | 0.00637 | 0.00666 | 1.56 | 1.19:2.04 | 1.51 | 1.12:2.02 | 4.58 | 1.50:13.96 | A | 14.3 | 10.5 | 520 | 731 |
| hCV11192460 | 1 | ALL | apoe4, male, age_ge75 | 0.00234 | 0.00303 | 0.00693 | 0.04556 | 1.65 | 1.19:2.28 | 1.64 | 1.14:2.36 | 2.74 | 0.93:8.05 | A | 15.1 | 10.5 | 418 | 375 |
| hCV11192460 | 1 + 2 + 3 | ALL | source, apoe4, male, | 0.00142 | 0.00159 | 0.00238 | 0.11618 | 1.4 | 1.14:1.72 | 1.42 | 1.13:1.79 | 1.79 | 0.85:3.76 | A | 13.6 | 11.2 | 964 | 1163 |
| | | | age_ge75 | | | | | | | | | | | | | | | |
| hCV11192460 | 3 | male = 0 | apoe4, age_ge75 | 0.0253 | 0.02334 | 0.02551 | 0.404 | 1.58 | 1.06:2.37 | 1.65 | 1.06:2.56 | 2.57 | 0.33:19.99 | A | 13.3 | 10.0 | 282 | 295 |
| hCV11192460 | 1 + 2 + 3 | male = 0 | source, apoe4, age_ge75 | 0.00442 | 0.00427 | 0.01246 | 0.02438 | 1.46 | 1.13:1.89 | 1.44 | 1.08:1.91 | 3.9 | 1.21:12.55 | A | 13.8 | 11.2 | 636 | 780 |
| hCV11193939 | 1 | age_ge75 = 0 | apoe4, male | 0.00036 | 0.00034 | 0.00005 | 0.32857 | 2.03 | 1.37:3.00 | 2.8 | 1.69:4.65 | 1.66 | 0.64:4.29 | G | 35.6 | 22.9 | 191 | 157 |
| hCV11193939 | 1 + 2 + 3 | age_ge75 = 0 | source, apoe4, male | 0.00354 | 0.00324 | 0.00295 | 0.15258 | 1.43 | 1.12:1.81 | 1.58 | 1.17:2.14 | 1.55 | 0.87:2.78 | G | 32.7 | 26.6 | 445 | 432 |
| hCV11214738 | 3 | ALL | NONE | 0.04563 | 0.04582 | 0.05589 | 0.31298 | 1.36 | 1.01:1.83 | 1.38 | 0.99:1.93 | 1.77 | 0.57:5.47 | C | 14.9 | 11.4 | 360 | 395 |
| hCV11214738 | 1 + 2 + 3 | ALL | source | 0.00675 | 0.00649 | 0.01498 | 0.05616 | 1.27 | 1.07:1.51 | 1.27 | 1.05:1.55 | 1.8 | 0.98:3.32 | C | 17.1 | 13.9 | 932 | 1100 |
| hCV11278562 | 2 | male = 1 | NONE | 0.02953 | 0.02897 | 0.15597 | 0.00718 | 1.57 | 1.04:2.37 | 1.43 | 0.87:2.34 | 6.3 | 1.38:28.71 | T | 27.2 | 19.2 | 134 | 130 |
| hCV11278562 | 1 + 2 + 3 | male = 1 | source | 0.03375 | 0.02955 | 0.13322 | 0.00995 | 1.31 | 1.02:1.68 | 1.26 | 0.93:1.69 | 2.82 | 1.24:6.41 | T | 24.7 | 19.9 | 363 | 366 |
| hCV11568644 | 1 | apoe4 = 0 | male, age_ge75 | 0.02405 | 0.02419 | 0.09906 | 0.03979 | 0.73 | 0.56:0.96 | 0.71 | 0.47:1.07 | 0.6 | 0.37:0.98 | G | 41.3 | 48.8 | 178 | 286 |
| hCV11568644 | 1 + 2 + 3 | apoe4 = 0 | source, male, age_ge75 | 0.0131 | 0.01351 | 0.17293 | 0.00532 | 0.8 | 0.67:0.95 | 0.83 | 0.64:1.08 | 0.62 | 0.45:0.87 | G | 40.4 | 44.8 | 382 | 886 |
| hCV11574262 | 1 | age_ge75 = 0 | apoe4, male | 0.11784 | 0.09633 | 0.01219 | 0.96185 | 1.34 | 0.93:1.93 | 2.15 | 1.17:3.95 | 1.02 | 0.52:1.98 | A | 51.7 | 42.9 | 174 | 147 |
| hCV11574262 | 1 + 3 | age_ge75 = 0 | source, apoe4, male | 0.12259 | 0.10832 | 0.00578 | 0.82526 | 1.23 | 0.95:1.60 | 1.87 | 1.19:2.92 | 0.95 | 0.61:1.49 | A | 51.3 | 46.6 | 312 | 297 |
| hCV11597077 | 1 | age_ge75 = 0 | NONE | 0.12292 | 0.12657 | 0.60509 | 0.04495 | 0.79 | 0.59:1.07 | 0.88 | 0.55:1.42 | 0.61 | 0.37:0.99 | A | 46.4 | 52.2 | 192 | 159 |
| hCV11597077 | 1 + 3 | age_ge75 = 0 | source | 0.02906 | 0.03132 | 0.33082 | 0.00862 | 0.78 | 0.63:0.98 | 0.84 | 0.60:1.19 | 0.6 | 0.41:0.88 | A | 43.9 | 49.7 | 330 | 309 |
| hCV11720402 | 1 | age_ge75 = 1 | apoe4, male | 0.19273 | 0.17864 | 0.97646 | 0.01586 | 0.83 | 0.63:1.10 | 0.99 | 0.66:1.51 | 0.52 | 0.30:0.89 | T | 41.0 | 44.9 | 227 | 215 |
| hCV11720402 | 1 + 2 | age_ge75 = 1 | source, apoe4, male | 0.07201 | 0.06491 | 0.56292 | 0.00836 | 0.81 | 0.65:1.02 | 0.9 | 0.64:1.27 | 0.56 | 0.36:0.86 | T | 40.5 | 44.5 | 301 | 482 |
| hCV11720789 | 1 | apoe4 = 0 | male, age_ge75 | 0.0492 | 0.06695 | 0.02861 | 0.77578 | 2.08 | 1.01:4.27 | 2.38 | 1.10:5.15 | 0.69 | 0.06:8.24 | T | 5.3 | 2.6 | 178 | 288 |
| hCV11720789 | 1 + 2 + 3 | apoe4 = 0 | source, male, age_ge75 | 0.00759 | 0.0104 | 0.0072 | 0.67683 | 1.85 | 1.17:2.92 | 1.92 | 1.19:3.10 | 1.47 | 0.23:9.42 | T | 4.5 | 2.8 | 421 | 893 |
| hCV11842860 | 1 | age_ge75 = 0 | apoe4, male | 0.04875 | 0.0543 | 0.01039 | 0.84279 | 0.68 | 0.47:0.99 | 0.51 | 0.30:0.86 | 0.92 | 0.44:1.96 | T | 32.7 | 39.7 | 179 | 146 |
| hCV11842860 | 1 + 3 | age_ge75 = 0 | source, apoe4, male | 0.01079 | 0.01189 | 0.00228 | 0.51318 | 0.7 | 0.53:0.92 | 0.56 | 0.38:0.82 | 0.83 | 0.48:1.44 | T | 32.6 | 39.2 | 316 | 296 |
| hCV11855743 | 1 | ALL | NONE | 0.18037 | 0.19033 | 0.86492 | 0.00328 | 1.18 | 0.93:1.50 | 1.03 | 0.77:1.37 | 2.59 | 1.35:4.97 | A | 25.1 | 22.1 | 391 | 355 |
| hCV11855743 | 1 + 2 | ALL | source | 0.46747 | 0.47429 | 0.5079 | 0.00142 | 1.07 | 0.89:1.29 | 0.93 | 0.74:1.16 | 2.15 | 1.34:3.45 | A | 24.2 | 22.9 | 594 | 749 |
| hCV11855743 | 2 | male = 0 | NONE | 0.80606 | 0.81008 | 0.16153 | 0.0381 | 0.95 | 0.65:1.39 | 0.71 | 0.44:1.15 | 2.31 | 1.03:5.18 | A | 25.0 | 25.9 | 100 | 251 |
| hCV11855743 | 1 + 2 | male = 0 | source | 0.92992 | 0.93115 | 0.16149 | 0.00857 | 0.99 | 0.78:1.26 | 0.81 | 0.61:1.09 | 2.17 | 1.20:3.92 | A | 23.2 | 24.2 | 351 | 471 |
| hCV11861096 | 1 | age_ge75 = 1 | apoe4, male | 0.00016 | 0.00026 | 0.00247 | 0.00105 | 2.38 | 1.51:3.77 | 2.16 | 1.31:3.57 | | . :. | C | 16.7 | 8.0 | 210 | 205 |
| hCV11861096 | 1 + 2 + 3 | age_ge75 = 1 | source, apoe4, male | 0.00058 | 0.00072 | 0.00292 | 0.00998 | 1.63 | 1.24:2.15 | 1.59 | 1.17:2.16 | 4.31 | 1.40:13.28 | C | 14.3 | 10.1 | 494 | 693 |
| hCV12029086 | 1 | male = 0 | NONE | 0.00304 | 0.0031 | 0.00605 | 0.06 | 0.66 | 0.50:0.87 | 0.61 | 0.43:0.87 | 0.52 | 0.26:1.04 | T | 23.1 | 31.4 | 264 | 237 |
| hCV12029086 | 1 + 2 + 3 | male = 0 | source | 0.00169 | 0.00143 | 0.00457 | 0.02612 | 0.76 | 0.65:0.90 | 0.74 | 0.59:0.91 | 0.62 | 0.40:0.95 | T | 25.1 | 30.7 | 648 | 786 |
| hCV12123244 | 1 | apoe4 = 0 | male, age_ge75 | 0.04201 | 0.03511 | 0.00619 | 0.42419 | 0.71 | 0.51:0.99 | 0.58 | 0.39:0.86 | 1.47 | 0.56:3.85 | C | 18.5 | 24.7 | 178 | 288 |
| hCV12123244 | 1 + 2 + 3 | apoe4 = 0 | source, male, age_ge75 | 0.02194 | 0.01981 | 0.00961 | 0.77366 | 0.78 | 0.63:0.97 | 0.72 | 0.56:0.92 | 0.91 | 0.48:1.74 | C | 17.9 | 21.5 | 420 | 893 |
| hCV12126867 | 3 | male = 1 | apoe4, age_ge75 | 0.03958 | 0.04997 | 0.37624 | 0.00743 | 0.61 | 0.38:0.98 | 0.75 | 0.40:1.41 | 0.28 | 0.10:0.77 | A | 30.1 | 39.5 | 78 | 100 |
| hCV12126867 | 1 + 3 | male = 1 | source, apoe4, age_ge75 | 0.19199 | 0.20504 | 0.8121 | 0.00161 | 0.82 | 0.61:1.11 | 1.05 | 0.71:1.54 | 0.36 | 0.18:0.71 | A | 28.3 | 32.3 | 230 | 240 |
| hCV1229667 | 1 | age_ge75 = 1 | apoe4, male | 0.00571 | 0.00442 | 0.00442 | | 0.44 | 0.24:0.80 | 0.42 | 0.22:0.78 | | | C | 3.8 | 7.9 | 225 | 216 |
| hCV1229667 | 1 + 2 + 3 | age_ge75 = 1 | source, apoe4, male | 0.00445 | 0.00355 | 0.00254 | 0.45939 | 0.59 | 0.40:0.86 | 0.55 | 0.37:0.82 | | . :. | C | 4.4 | 7.4 | 517 | 718 |
| hCV1229667 | 1 | ALL | apoe4, male, age_ge75 | 0.00278 | 0.00227 | 0.00163 | 0.5827 | 0.5 | 0.32:0.79 | 0.47 | 0.29:0.76 | | . :. | C | 4.6 | 7.6 | 416 | 374 |
| hCV1229667 | 1 + 2 + 3 | ALL | source, apoe4, male, | 0.00413 | 0.0037 | 0.0018 | 0.37244 | 0.66 | 0.50:0.88 | 0.63 | 0.47:0.85 | 4.78 | 0.22:105.98 | C | 5.1 | 7.1 | 958 | 1143 |
| | | | age_ge75 | | | | | | | | | | | | | | | |
| hCV1244849 | 1 | apoe4 = 1 | male, age_ge75 | 0.02575 | 0.02942 | 0.02315 | 0.55282 | 2.1 | 1.09:4.07 | 2.27 | 1.11:4.66 | 2.03 | 0.21:19.85 | C | 13.9 | 7.5 | 226 | 80 |
| hCV1244849 | 1 + 2 + 3 | apoe4 = 1 | source, male, age_ge75 | 0.0092 | 0.01094 | 0.01498 | 0.16496 | 1.57 | 1.12:2.19 | 1.59 | 1.10:2.30 | 2.4 | 0.71:8.06 | C | 15.9 | 11.1 | 555 | 257 |
| hCV1305685 | 1 | age_ge75 = 0 | apoe4, male | 0.03421 | 0.03178 | 0.03102 | 0.30503 | 1.53 | 1.03:2.26 | 1.72 | 1.05:2.84 | 1.76 | 0.64:4.81 | A | 29.5 | 25.6 | 190 | 158 |
| hCV1305685 | 1 + 2 + 3 | age_ge75 = 0 | source, apoe4, male | 0.01249 | 0.01345 | 0.00894 | 0.34492 | 1.36 | 1.07:1.73 | 1.49 | 1.11:2.02 | 1.34 | 0.74:2.43 | A | 26.3 | 23.1 | 516 | 438 |
| hCV1305685 | 1 | ALL | apoe4, male, age_ge75 | 0.00842 | 0.0071 | 0.00807 | 0.18163 | 1.39 | 1.09:1.77 | 1.51 | 1.11:2.04 | 1.58 | 0.82:3.06 | A | 28.8 | 24.1 | 417 | 375 |
| hCV1305685 | 1 + 2 + 3 | ALL | source, apoe4, male, | 0.0059 | 0.00589 | 0.00963 | 0.09594 | 1.24 | 1.07:1.45 | 1.29 | 1.06:1.57 | 1.39 | 0.94:2.06 | A | 27.1 | 23.8 | 961 | 1147 |
| | | | age_ge75 | | | | | | | | | | | | | | | |
| hCV1305685 | 1 | male = 0 | apoe4, age_ge75 | 0.00042 | 0.00036 | 0.0002 | 0.15197 | 1.74 | 1.28:2.37 | 2.09 | 1.41:3.10 | 1.8 | 0.82:3.96 | A | 31.4 | 23.0 | 264 | 235 |
| hCV1305685 | 1 + 2 + 3 | male = 0 | source, apoe4, age_ge75 | 0.00244 | 0.0026 | 0.00344 | 0.09943 | 1.35 | 1.11:1.64 | 1.43 | 1.13:1.82 | 1.5 | 0.93:2.43 | A | 27.3 | 23.0 | 635 | 769 |
| hCV1322419 | 1 | apoe4 = 1 | NONE | 0.00521 | 0.00696 | 0.00573 | 0.08913 | 1.68 | 1.16:2.41 | 2.14 | 1.24:3.69 | 1.7 | 0.92:3.15 | A | 53.5 | 40.7 | 227 | 81 |
| hCV1322419 | 1 + 2 + 3 | apoe4 = 1 | source | 0.0046 | 0.00451 | 0.01088 | 0.03659 | 1.36 | 1.10:1.67 | 1.54 | 1.10:2.15 | 1.47 | 1.02:2.10 | A | 52.6 | 44.9 | 564 | 257 |
| hCV1345818 | 1 | male = 0 | NONE | 0.00932 | 0.00992 | 0.00615 | 0.9369 | 2.14 | 1.19:3.83 | 2.31 | 1.25:4.27 | 0.89 | 0.06:14.37 | T | 7.4 | 3.6 | 265 | 237 |
| hCV1345818 | 1 + 2 | male = 0 | source | 0.00537 | 0.00563 | 0.00281 | 0.68412 | 1.86 | 1.20:2.88 | 2.01 | 1.27:3.18 | 0.58 | 0.05:7.43 | T | 7.3 | 4.2 | 365 | 488 |
| hCV1345858 | 1 | male = 0 | NONE | 0.00678 | 0.00718 | 0.00434 | 0.9369 | 2.19 | 1.23:3.93 | 2.38 | 1.29:4.39 | 0.89 | 0.06:14.37 | C | 7.5 | 3.6 | 265 | 237 |
| hCV1345858 | 1 + 2 + 3 | male = 0 | source | 0.00631 | 0.00575 | 0.00374 | 0.67853 | 1.57 | 1.14:2.18 | 1.65 | 1.17:2.31 | 0.57 | 0.05:7.33 | C | 7.0 | 4.7 | 646 | 772 |
| hCV1345864 | 1 | male = 0 | NONE | 0.0086 | 0.00914 | 0.00564 | 0.94094 | 2.15 | 1.20:3.86 | 2.33 | 1.26:4.31 | 0.9 | 0.06:14.48 | A | 7.4 | 3.6 | 262 | 236 |
| hCV1345864 | 1 + 3 | male = 0 | source | 0.0118 | 0.01069 | 0.00863 | 0.941 | 1.6 | 1.11:2.32 | 1.67 | 1.14:2.45 | 0.9 | 0.06:14.48 | A | 7.0 | 4.5 | 556 | 533 |
| hCV1348542 | 1 | apoe4 = 1 | male, age_ge75 | 0.01594 | 0.01481 | 0.05726 | 0.02521 | 1.73 | 1.10:2.72 | 1.66 | 0.98:2.82 | 6.65 | 0.93:47.35 | G | 29.8 | 19.5 | 223 | 77 |
| hCV1348542 | 1 + 3 | apoe4 = 1 | source, male, age_ge75 | 0.03994 | 0.03578 | 0.20137 | 0.00702 | 1.37 | 1.01:1.84 | 1.26 | 0.88:1.81 | 4.35 | 1.34:14.15 | G | 28.0 | 21.8 | 441 | 172 |
| hCV1406876 | 1 | age_ge75 = 0 | apoe4, male | 0.04275 | 0.03859 | 0.03204 | 0.62658 | 1.65 | 1.02:2.68 | 1.82 | 1.05:3.14 | 1.54 | 0.27:8.75 | C | 18.4 | 13.4 | 187 | 157 |
| hCV1406876 | 1 + 2 | age_ge75 = 0 | source, apoe4, male | 0.0165 | 0.01439 | 0.00772 | 0.91843 | 1.58 | 1.09:2.30 | 1.78 | 1.16:2.72 | 1.07 | 0.28:4.15 | C | 17.6 | 13.2 | 295 | 272 |
| hCV1406876 | 1 | ALL | apoe4, male, age_ge75 | 0.01511 | 0.01502 | 0.02982 | 0.08584 | 1.43 | 1.07:1.91 | 1.44 | 1.04:2.01 | 2.29 | 0.87:6.03 | C | 18.5 | 14.5 | 413 | 373 |
| hCV1406876 | 1 + 2 | ALL | source, apoe4, male, | 0.00695 | 0.00764 | 0.00907 | 0.19805 | 1.38 | 1.09:1.75 | 1.43 | 1.09:1.87 | 1.61 | 0.78:3.31 | C | 18.1 | 15.0 | 586 | 741 |
| | | | age_ge75 | | | | | | | | | | | | | | | |
| hCV1413258 | 3 | age_ge75 = 1 | apoe4, male | 0.04971 | 0.05108 | 0.00926 | 0.5652 | 0.72 | 0.51:1.00 | 0.59 | 0.39:0.88 | 1.32 | 0.53:3.27 | A | 18.3 | 23.5 | 221 | 245 |
| hCV1413258 | 1 + 3 | age_ge75 = 1 | source, apoe4, male | 0.00961 | 0.01017 | 0.00191 | 0.96788 | 0.74 | 0.58:0.93 | 0.64 | 0.48:0.85 | 0.99 | 0.53:1.83 | A | 19.6 | 24.6 | 433 | 450 |
| hCV1413258 | 1 | ALL | apoe4, male, age_ge75 | 0.00954 | 0.01016 | 0.01026 | 0.21544 | 0.71 | 0.55:0.92 | 0.66 | 0.48:0.91 | 0.65 | 0.33:1.28 | A | 21.3 | 26.4 | 390 | 351 |
| hCV1413258 | 1 + 3 | ALL | source, apoe4, male, | 0.00649 | 0.00668 | 0.00213 | 0.59702 | 0.78 | 0.65:0.93 | 0.7 | 0.56:0.88 | 0.88 | 0.54:1.42 | A | 21.7 | 25.6 | 749 | 746 |
| | | | age_ge75 | | | | | | | | | | | | | | | |
| hCV1413258 | 1 | male = 0 | apoe4, age_ge75 | 0.00914 | 0.00925 | 0.00704 | 0.29804 | 0.65 | 0.47:0.90 | 0.58 | 0.39:0.86 | 0.63 | 0.27:1.49 | A | 21.4 | 27.8 | 250 | 218 |
| hCV1413258 | 1 + 3 | male = 0 | source, apoe4, age_ge75 | 0.01028 | 0.01079 | 0.00212 | 0.88031 | 0.75 | 0.61:0.94 | 0.66 | 0.50:0.86 | 0.96 | 0.55:1.67 | A | 22.4 | 26.7 | 531 | 512 |
| hCV1489917 | 1 | male = 0 | apoe4, age_ge75 | 0.1201 | 0.10708 | 0.64968 | 0.0099 | 0.79 | 0.59:1.06 | 0.91 | 0.60:1.37 | 0.41 | 0.21:0.80 | C | 34.6 | 39.6 | 250 | 217 |
| hCV1489917 | 1 + 2 | male = 0 | source, apoe4, age_ge75 | 0.07933 | 0.06848 | 0.54373 | 0.00533 | 0.8 | 0.63:1.02 | 0.9 | 0.64:1.26 | 0.45 | 0.26:0.78 | C | 34.7 | 37.8 | 329 | 446 |
| hCV1558531 | 2 | apoe4 = 0 | male, age_ge75 | 0.0171 | 0.01495 | 0.04634 | 0.03842 | 0.53 | 0.31:0.90 | 0.54 | 0.29:1.00 | 0 | . :. | C | 16.7 | 25.9 | 60 | 276 |
| hCV1558531 | 2 + 3 | apoe4 = 0 | source, male, age_ge75 | 0.00826 | 0.00769 | 0.02591 | 0.02894 | 0.68 | 0.51:0.90 | 0.68 | 0.48:0.95 | 0.35 | 0.13:0.92 | C | 19.2 | 25.8 | 201 | 576 |
| hCV15806020 | 1 | male = 1 | NONE | 0.00437 | 0.00634 | 0.00927 | 0.08644 | 0.58 | 0.40:0.85 | 0.54 | 0.34:0.86 | 0.48 | 0.21:1.13 | C | 21.1 | 31.4 | 154 | 140 |
| hCV15806020 | 1 + 3 | male = 1 | source | 0.00963 | 0.01028 | 0.02187 | 0.06868 | 0.69 | 0.52:0.91 | 0.66 | 0.46:0.94 | 0.52 | 0.26:1.06 | C | 23.0 | 30.4 | 244 | 242 |
| hCV15811970 | 1 | ALL | apoe4, male, age_ge75 | 0.0131 | 0.01701 | 0.27857 | 0.00026 | 0.72 | 0.56:0.94 | 0.84 | 0.61:1.15 | 0.33 | 0.18:0.63 | T | 22.2 | 28.1 | 390 | 351 |
| hCV15811970 | 1 + 3 | ALL | source, apoe4, male, | 0.30678 | 0.31908 | 0.90909 | 0.00982 | 0.91 | 0.76:1.09 | 1.01 | 0.81:1.27 | 0.57 | 0.37:0.88 | T | 24.6 | 26.6 | 749 | 747 |
| | | | age_ge75 | | | | | | | | | | | | | | | |
| hCV15811970 | 1 | male = 1 | apoe4, age_ge75 | 0.04694 | 0.04471 | 0.32168 | 0.00313 | 0.66 | 0.43:1.00 | 0.77 | 0.45:1.29 | 0.17 | 0.05:0.62 | T | 23.2 | 28.6 | 140 | 133 |
| hCV15811970 | 1 + 3 | male = 1 | source, apoe4, age_ge75 | 0.05059 | 0.04744 | 0.30429 | 0.00321 | 0.72 | 0.52:1.00 | 0.81 | 0.54:1.21 | 0.24 | 0.09:0.67 | T | 22.0 | 26.1 | 218 | 234 |
| hCV15870743 | 1 | age_ge75 = 0 | NONE | 0.00011 | 0.00016 | 0.00043 | 0.01391 | 0.51 | 0.36:0.72 | 0.45 | 0.29:0.70 | 0.38 | 0.17:0.84 | T | 22.6 | 36.4 | 177 | 147 |
| hCV15870743 | 1 + 2 + 3 | age_ge75 = 0 | source | 0.00779 | 0.00777 | 0.00323 | 0.39168 | 0.75 | 0.61:0.93 | 0.67 | 0.51:0.87 | 0.81 | 0.50:1.31 | T | 26.2 | 32.1 | 429 | 422 |
| hCV15870743 | 1 | ALL | NONE | 0.0001 | 0.00014 | 0.00089 | 0.00398 | 0.64 | 0.51:0.80 | 0.61 | 0.46:0.82 | 0.47 | 0.27:0.79 | T | 23.9 | 33.0 | 389 | 353 |
| hCV15870743 | 1 + 2 + 3 | ALL | source | 0.00109 | 0.00113 | 0.00382 | 0.02003 | 0.8 | 0.69:0.91 | 0.77 | 0.65:0.92 | 0.68 | 0.49:0.94 | T | 26.0 | 30.7 | 950 | 1140 |
| hCV15870743 | 1 | male = 0 | NONE | 0.00037 | 0.00037 | 0.00075 | 0.0324 | 0.59 | 0.44:0.79 | 0.53 | 0.37:0.77 | 0.47 | 0.23:0.95 | T | 22.9 | 33.3 | 249 | 219 |
| hCV15870743 | 1 + 2 + 3 | male = 0 | source | 0.00118 | 0.00101 | 0.00135 | 0.0763 | 0.76 | 0.64:0.90 | 0.7 | 0.57:0.87 | 0.69 | 0.45:1.04 | T | 25.6 | 31.3 | 630 | 762 |
| hCV15873426 | 2 | male = 0 | NONE | 0.02509 | 0.02052 | 0.02333 | 0.22872 | 0.65 | 0.45:0.95 | 0.58 | 0.37:0.93 | 0.55 | 0.20:1.48 | T | 24.0 | 32.6 | 100 | 250 |
| hCV15873426 | 1 + 2 + 3 | male = 0 | source | 0.00808 | 0.00846 | 0.00953 | 0.14683 | 0.8 | 0.67:0.94 | 0.75 | 0.61:0.93 | 0.75 | 0.52:1.10 | T | 27.4 | 32.0 | 632 | 762 |
| hCV15887512 | 3 | ALL | apoe4, male, age_ge75 | 0.05793 | 0.0572 | 0.1702 | 0.01776 | 1.33 | 0.99:1.80 | 1.27 | 0.90:1.78 | 3.73 | 1.14:12.20 | A | 16.4 | 13.3 | 383 | 399 |
| hCV15887512 | 1 + 3 | ALL | source, apoe4, male, | 0.18896 | 0.19089 | 0.60743 | 0.00847 | 1.15 | 0.94:1.41 | 1.06 | 0.84:1.35 | 2.37 | 1.23:4.57 | A | 18.5 | 16.5 | 772 | 751 |
| | | | age_ge75 | | | | | | | | | | | | | | | |
| hCV15887521 | 1 | male = 0 | NONE | 0.0004 | 0.00036 | 0.00072 | 0.03366 | 0.6 | 0.45:0.80 | 0.53 | 0.37:0.77 | 0.48 | 0.24:0.96 | T | 24.1 | 34.6 | 249 | 218 |
| hCV15887521 | 1 + 2 + 3 | male = 0 | source | 0.00257 | 0.00217 | 0.00598 | 0.03541 | 0.78 | 0.66:0.92 | 0.74 | 0.60:0.92 | 0.66 | 0.44:0.97 | T | 27.6 | 33.1 | 631 | 762 |
| hCV15887528 | 1 | male = 0 | NONE | 0.00035 | 0.00039 | 0.00061 | 0.03946 | 0.6 | 0.45:0.79 | 0.53 | 0.36:0.76 | 0.51 | 0.27:0.98 | T | 24.4 | 35.1 | 248 | 218 |
| hCV15887528 | 1 + 2 + 3 | male = 0 | source | 0.00199 | 0.00178 | 0.00495 | 0.03193 | 0.77 | 0.65:0.91 | 0.73 | 0.59:0.91 | 0.66 | 0.44:0.97 | T | 27.7 | 33.4 | 630 | 760 |
| hCV15919456 | 1 | ALL | NONE | 0.17589 | 0.17995 | 0.04199 | 0.8693 | 1.15 | 0.94:1.40 | 1.39 | 1.01:1.92 | 1.03 | 0.75:1.41 | A | 51.7 | 48.3 | 419 | 376 |
| hCV15919456 | 1 + 2 + 3 | ALL | source | 0.07805 | 0.0799 | 0.00682 | 0.86956 | 1.12 | 0.99:1.26 | 1.32 | 1.08:1.61 | 1.02 | 0.83:1.24 | A | 51.5 | 49.0 | 979 | 1150 |
| hCV15961334 | 3 | apoe4 = 1 | male, age_ge75 | 0.79687 | 0.79928 | 0.7969 | 0.02106 | 0.92 | 0.47:1.79 | 1.1 | 0.53:2.29 | 0 | . :. | C | 6.4 | 7.4 | 219 | 95 |
| hCV15961334 | 1 + 2 + 3 | apoe4 = 1 | source, male, age_ge75 | 0.13691 | 0.13446 | 0.27225 | 0.00867 | 0.74 | 0.50:1.11 | 0.79 | 0.52:1.21 | 0 | . :. | C | 5.8 | 8.1 | 582 | 278 |
| hCV15965240 | 3 | age_ge75 = 0 | NONE | 0.08514 | 0.08009 | 0.04786 | 0.40137 | 1.33 | 0.96:1.85 | 1.72 | 1.00:2.96 | 1.27 | 0.73:2.20 | G | 52.2 | 45.0 | 137 | 150 |
| hCV15965240 | 1 + 3 | age_ge75 = 0 | source | 0.07365 | 0.06884 | 0.00577 | 0.88222 | 1.23 | 0.98:1.54 | 1.68 | 1.16:2.43 | 1.03 | 0.71:1.50 | G | 51.3 | 46.1 | 315 | 296 |
| hCV15965240 | 3 | apoe4 = 0 | male, age_ge75 | 0.08829 | 0.08267 | 0.01196 | 0.82819 | 1.28 | 0.96:1.71 | 1.86 | 1.14:3.04 | 1.06 | 0.65:1.73 | G | 51.4 | 45.2 | 141 | 300 |
| hCV15965240 | 1 + 3 | apoe4 = 0 | source, male, age_ge75 | 0.08699 | 0.08622 | 0.00311 | 0.81837 | 1.19 | 0.98:1.45 | 1.66 | 1.18:2.32 | 0.96 | 0.69:1.35 | G | 51.2 | 46.5 | 304 | 571 |
| hCV15965240 | 1 | male = 1 | apoe4, age_ge75 | 0.05983 | 0.05878 | 0.00504 | 0.72088 | 1.41 | 0.99:2.02 | 2.46 | 1.30:4.66 | 1.11 | 0.62:1.99 | G | 55.0 | 49.3 | 140 | 135 |
| hCV15965240 | 1 + 3 | male = 1 | source, apoe4, age_ge75 | 0.04857 | 0.04177 | 0.00271 | 0.77478 | 1.33 | 1.00:1.75 | 2.08 | 1.28:3.39 | 1.07 | 0.67:1.74 | G | 52.8 | 47.2 | 218 | 236 |
| hCV16113167 | 1 | age_ge75 = 0 | NONE | 0.00005 | 0.00007 | 0.00008 | 0.03408 | 0.49 | 0.34:0.69 | 0.41 | 0.26:0.64 | 0.43 | 0.19:0.96 | A | 21.1 | 35.4 | 178 | 147 |
| hCV16113167 | 1 + 2 + 3 | age_ge75 = 0 | source | 0.00932 | 0.00938 | 0.00265 | 0.59322 | 0.76 | 0.61:0.93 | 0.66 | 0.51:0.87 | 0.87 | 0.53:1.44 | A | 24.8 | 30.4 | 432 | 423 |
| hCV16113167 | 1 | ALL | NONE | 0.00002 | 0.00003 | 0.00009 | 0.00734 | 0.61 | 0.48:0.76 | 0.56 | 0.42:0.75 | 0.48 | 0.28:0.83 | A | 22.4 | 32.3 | 390 | 353 |
| hCV16113167 | 1 + 2 + 3 | ALL | source | 0.00181 | 0.00184 | 0.00257 | 0.0807 | 0.8 | 0.70:0.92 | 0.77 | 0.64:0.91 | 0.74 | 0.53:1.04 | A | 24.9 | 29.3 | 952 | 1141 |
| hCV16113167 | 1 | apoe4 = 0 | male, age_ge75 | 0.0041 | 0.00504 | 0.00219 | 0.2839 | 0.63 | 0.46:0.86 | 0.54 | 0.36:0.80 | 0.68 | 0.34:1.38 | A | 23.3 | 33.9 | 163 | 271 |
| hCV16113167 | 1 + 2 + 3 | apoe4 = 0 | source, male, age_ge75 | 0.00671 | 0.00714 | 0.00331 | 0.35032 | 0.76 | 0.62:0.93 | 0.68 | 0.53:0.88 | 0.8 | 0.49:1.28 | A | 24.3 | 30.5 | 371 | 870 |
| hCV16113167 | 1 | male = 0 | NONE | 0.0001 | 0.00011 | 0.00009 | 0.06743 | 0.56 | 0.42:0.75 | 0.48 | 0.33:0.69 | 0.52 | 0.25:1.06 | A | 21.2 | 32.4 | 250 | 219 |
| hCV16113167 | 1 + 2 + 3 | male = 0 | source | 0.00133 | 0.00116 | 0.00056 | 0.24053 | 0.76 | 0.64:0.90 | 0.68 | 0.55:0.85 | 0.77 | 0.50:1.19 | A | 24.2 | 29.8 | 631 | 763 |
| hCV16190971 | 2 | age_ge75 = 0 | NONE | 0.12776 | 0.13991 | 0.74861 | 0.00581 | 1.34 | 0.92:1.94 | 1.08 | 0.67:1.74 | 3.78 | 1.39:10.30 | A | 31.5 | 25.6 | 157 | 121 |
| hCV16190971 | 1 + 2 | age_ge75 = 0 | source | 0.36878 | 0.39251 | 0.52601 | 0.00281 | 1.12 | 0.87:1.45 | 0.9 | 0.65:1.24 | 2.48 | 1.35:4.58 | A | 28.6 | 26.2 | 334 | 267 |
| hCV16190971 | 2 | male = 1 | NONE | 0.35683 | 0.34827 | 0.90958 | 0.01804 | 1.21 | 0.81:1.81 | 0.97 | 0.57:1.64 | 3.2 | 1.17:8.75 | A | 32.5 | 28.5 | 97 | 130 |
| hCV16190971 | 1 + 2 | male = 1 | source | 0.63111 | 0.63763 | 0.34646 | 0.00583 | 1.07 | 0.81:1.41 | 0.84 | 0.59:1.20 | 2.48 | 1.28:4.81 | A | 28.5 | 27.5 | 237 | 264 |
| hCV16221181 | 1 | male = 1 | apoe4, age_ge75 | 0.00357 | 0.00295 | 0.00295 | | 4.66 | 1.40:15.53 | 4.94 | 1.46:16.74 | | | T | 6.2 | 1.1 | 154 | 140 |
| hCV16221181 | 1 + 3 | male = 1 | source, apoe4, age_ge75 | 0.00775 | 0.00673 | 0.00673 | | 2.99 | 1.25:7.13 | 3.1 | 1.28:7.48 | | | T | 5.2 | 1.5 | 231 | 239 |
| hCV16248263 | 1 | age_ge75 = 0 | apoe4, male | 0.53669 | 0.55579 | 0.64371 | 0.04105 | 1.14 | 0.75:1.73 | 0.88 | 0.52:1.50 | 3.25 | 1.14:9.31 | T | 31.3 | 27.9 | 174 | 140 |
| hCV16248263 | 1 + 2 + 3 | age_ge75 = 0 | source, apoe4, male | 0.94421 | 0.94513 | 0.15644 | 0.00776 | 1.01 | 0.78:1.30 | 0.79 | 0.57:1.09 | 2.35 | 1.27:4.34 | T | 29.5 | 28.1 | 419 | 398 |
| hCV16248299 | 1 | male = 0 | NONE | 0.00065 | 0.00056 | 0.00129 | 0.03257 | 0.61 | 0.46:0.81 | 0.55 | 0.38:0.79 | 0.47 | 0.23:0.95 | G | 23.8 | 33.9 | 250 | 220 |
| hCV16248299 | 1 + 2 + 3 | male = 0 | source | 0.00412 | 0.00336 | 0.00783 | 0.05157 | 0.78 | 0.66:0.93 | 0.75 | 0.60:0.93 | 0.67 | 0.45:1.00 | G | 27.5 | 32.8 | 632 | 766 |
| hCV1651379 | 1 | age_ge75 = 0 | apoe4, male | 0.00743 | 0.00807 | 0.02484 | 0.03724 | 1.63 | 1.14:2.33 | 1.79 | 1.07:2.97 | 2.01 | 1.02:3.97 | A | 41.1 | 34.8 | 191 | 158 |
| hCV1651379 | 1 + 2 | age_ge75 = 0 | source, apoe4, male | 0.00979 | 0.01081 | 0.02201 | 0.06606 | 1.42 | 1.09:1.85 | 1.56 | 1.06:2.29 | 1.6 | 0.97:2.63 | A | 42.0 | 37.1 | 308 | 284 |
| hCV1687563 | 1 | age_ge75 = 1 | NONE | 0.01754 | 0.01837 | 0.05609 | 0.02204 | 1.6 | 1.08:2.37 | 1.52 | 0.99:2.35 | 7.89 | 0.98:63.62 | G | 16.3 | 10.8 | 227 | 217 |
| hCV1687563 | 1 + 3 | age_ge75 = 1 | source | 0.0208 | 0.02144 | 0.08719 | 0.00608 | 1.38 | 1.05:1.81 | 1.3 | 0.96:1.76 | 4.96 | 1.41:17.45 | G | 15.1 | 11.4 | 449 | 463 |
| hCV1687563 | 3 | male = 0 | apoe4, age_ge75 | 0.03693 | 0.04021 | 0.05951 | 0.18711 | 1.49 | 1.03:2.16 | 1.49 | 0.99:2.27 | 2.33 | 0.63:8.67 | G | 15.6 | 11.8 | 294 | 297 |
| hCV1687563 | 1 + 3 | male = 0 | source, apoe4, age_ge75 | 0.00955 | 0.01005 | 0.03352 | 0.01842 | 1.42 | 1.09:1.84 | 1.38 | 1.02:1.85 | 3.48 | 1.18:10.21 | G | 16.1 | 12.7 | 558 | 531 |
| hCV1780695 | 2 | ALL | NONE | 0.01239 | 0.0149 | 0.02959 | 0.06815 | 1.35 | 1.07:1.72 | 1.52 | 1.04:2.23 | 1.43 | 0.97:2.11 | A | 51.7 | 44.1 | 207 | 401 |
| hCV1780695 | 1 + 2 + 3 | ALL | source | 0.02512 | 0.02539 | 0.00851 | 0.3342 | 1.15 | 1.02:1.30 | 1.3 | 1.07:1.57 | 1.11 | 0.90:1.36 | A | 49.5 | 45.8 | 983 | 1171 |
| hCV1780695 | 2 | male = 1 | NONE | 0.05985 | 0.05955 | 0.03369 | 0.37516 | 1.41 | 0.99:2.01 | 1.86 | 1.04:3.30 | 1.32 | 0.72:2.42 | A | 51.0 | 42.5 | 105 | 146 |
| hCV1780695 | 1 + 2 + 3 | male = 1 | source | 0.04753 | 0.04366 | 0.00653 | 0.65965 | 1.24 | 1.00:1.52 | 1.59 | 1.14:2.23 | 1.08 | 0.76:1.56 | A | 49.9 | 43.9 | 337 | 387 |
| hCV1792848 | 1 | ALL | NONE | 0.07385 | 0.07132 | 0.41139 | 0.00842 | 1.23 | 0.98:1.53 | 1.13 | 0.84:1.51 | 2.04 | 1.19:3.50 | T | 32.7 | 28.4 | 385 | 345 |
| hCV1792848 | 1 + 2 + 3 | ALL | source | 0.02152 | 0.02023 | 0.15347 | 0.00539 | 1.17 | 1.02:1.33 | 1.13 | 0.95:1.35 | 1.56 | 1.14:2.14 | T | 31.4 | 28.2 | 1011 | 1101 |
| hCV1792856 | 1 | ALL | apoe4, male, age_ge75 | 0.00014 | 0.00012 | 0.00058 | 0.0064 | 0.56 | 0.41:0.75 | 0.55 | 0.39:0.77 | 0.21 | 0.06:0.67 | G | 14.2 | 20.4 | 388 | 353 |
| hCV1792856 | 1 + 3 | ALL | source, apoe4, male, | 0.00969 | 0.00846 | 0.01674 | 0.08644 | 0.77 | 0.63:0.94 | 0.75 | 0.60:0.95 | 0.58 | 0.30:1.13 | G | 16.0 | 19.8 | 748 | 749 |
| | | | age_ge75 | | | | | | | | | | | | | | | |
| hCV1792856 | 1 | male = 1 | apoe4, age_ge75 | 0.01453 | 0.01016 | 0.01189 | 0.33282 | 0.53 | 0.32:0.88 | 0.48 | 0.27:0.85 | 0.21 | 0.01:4.02 | G | 13.9 | 20.0 | 140 | 135 |
| hCV1792856 | 1 + 3 | male = 1 | source, apoe4, age_ge75 | 0.01439 | 0.01018 | 0.00866 | 0.52945 | 0.62 | 0.43:0.91 | 0.56 | 0.37:0.86 | 0.57 | 0.11:2.94 | G | 15.1 | 21.2 | 218 | 236 |
| hCV1801156 | 1 | male = 1 | apoe4, age_ge75 | 0.01949 | 0.02211 | 0.01836 | 0.40328 | 0.58 | 0.36:0.92 | 0.53 | 0.31:0.90 | 0.53 | 0.12:2.32 | G | 13.3 | 21.4 | 154 | 140 |
| hCV1801156 | 1 + 2 + 3 | male = 1 | source, apoe4, age_ge75 | 0.00885 | 0.00897 | 0.01261 | 0.16858 | 0.66 | 0.48:0.90 | 0.64 | 0.45:0.91 | 0.42 | 0.13:1.43 | G | 13.6 | 18.7 | 327 | 378 |
| hCV1822206 | 1 | age_ge75 = 1 | NONE | 0.03293 | 0.0338 | 0.04072 | 0.26676 | 0.69 | 0.49:0.97 | 0.66 | 0.45:0.98 | 0.56 | 0.20:1.57 | C | 15.9 | 21.4 | 227 | 217 |
| hCV1822206 | 1 + 2 | age_ge75 = 1 | source | 0.00792 | 0.00828 | 0.0108 | 0.17382 | 0.68 | 0.51:0.90 | 0.65 | 0.47:0.91 | 0.53 | 0.21:1.33 | C | 14.9 | 19.2 | 299 | 474 |
| hCV1822261 | 1 | male = 0 | NONE | 0.47084 | 0.4661 | 0.94999 | 0.04101 | 1.11 | 0.83:1.49 | 0.99 | 0.69:1.41 | 2.35 | 1.01:5.43 | A | 25.4 | 23.4 | 264 | 237 |
| hCV1822261 | 1 + 3 | male = 0 | source | 0.20102 | 0.20717 | 0.80587 | 0.00824 | 1.14 | 0.93:1.38 | 1.03 | 0.81:1.31 | 1.95 | 1.18:3.21 | A | 26.0 | 23.7 | 557 | 534 |
| hCV1839324 | 1 | age_ge75 = 0 | NONE | 0.12292 | 0.12657 | 0.60509 | 0.04495 | 0.79 | 0.59:1.07 | 0.88 | 0.55:1.42 | 0.61 | 0.37:0.99 | C | 46.4 | 52.2 | 192 | 159 |
| hCV1839324 | 1 + 3 | age_ge75 = 0 | source | 0.03297 | 0.03532 | 0.36161 | 0.00912 | 0.79 | 0.63:0.98 | 0.85 | 0.60:1.20 | 0.61 | 0.42:0.88 | C | 44.1 | 49.7 | 329 | 309 |
| hCV1839328 | 1 | age_ge75 = 0 | NONE | 0.10632 | 0.10923 | 0.58473 | 0.03578 | 0.78 | 0.58:1.05 | 0.88 | 0.54:1.41 | 0.59 | 0.36:0.97 | C | 46.1 | 52.2 | 191 | 159 |
| hCV1839328 | 1 + 3 | age_ge75 = 0 | source | 0.02886 | 0.03128 | 0.36281 | 0.00699 | 0.78 | 0.63:0.97 | 0.85 | 0.60:1.20 | 0.6 | 0.41:0.87 | C | 43.9 | 49.7 | 327 | 307 |
| hCV1839328 | 1 | male = 1 | apoe4, age_ge75 | 0.06715 | 0.07205 | 0.736 | 0.01024 | 0.73 | 0.52:1.03 | 0.91 | 0.52:1.60 | 0.49 | 0.28:0.85 | C | 48.0 | 56.1 | 153 | 140 |
| hCV1839328 | 1 + 3 | male = 1 | source, apoe4, age_ge75 | 0.05044 | 0.04969 | 0.55136 | 0.00881 | 0.76 | 0.58:1.00 | 0.87 | 0.56:1.36 | 0.55 | 0.35:0.87 | C | 47.0 | 52.7 | 230 | 239 |
| hCV1839329 | 1 | age_ge75 = 0 | NONE | 0.12267 | 0.12686 | 0.62968 | 0.04133 | 0.79 | 0.59:1.07 | 0.89 | 0.55:1.43 | 0.6 | 0.37:0.98 | G | 46.4 | 52.2 | 192 | 158 |
| hCV1839329 | 1 + 3 | age_ge75 = 0 | source | 0.03317 | 0.03604 | 0.38839 | 0.00796 | 0.79 | 0.63:0.98 | 0.86 | 0.61:1.21 | 0.6 | 0.41:0.88 | G | 43.9 | 49.5 | 330 | 308 |
| hCV1845232 | 1 | age_ge75 = 0 | apoe4, male | 0.04177 | 0.03716 | 0.09561 | 0.08272 | 0.66 | 0.45:0.98 | 0.64 | 0.38:1.09 | 0.46 | 0.20:1.08 | C | 31.5 | 37.7 | 178 | 146 |
| hCV1845232 | 1 + 3 | age_ge75 = 0 | source, apoe4, male | 0.00742 | 0.00846 | 0.04887 | 0.013 | 0.69 | 0.52:0.90 | 0.69 | 0.48:1.00 | 0.47 | 0.26:0.85 | C | 30.7 | 36.0 | 340 | 299 |
| hCV1847915 | 2 | male = 0 | apoe4, age_ge75 | 0.20025 | 0.20735 | 094906 | 0.0213 | 0.77 | 0.51:1.15 | 0.98 | 0.55:1.76 | 0.34 | 0.14:0.85 | G | 35.0 | 42.6 | 90 | 249 |
| hCV1847915 | 1 + 2 | male = 0 | source, apoe4, age_ge75 | 0.01322 | 0.01453 | 0.16246 | 0.00474 | 0.74 | 0.59:0.94 | 0.79 | 0.56:1.10 | 0.51 | 0.32:0.82 | G | 36.6 | 41.6 | 340 | 468 |
| hCV1853469 | 1 | apoe4 = 0 | male, age_ge75 | 0.04652 | 0.03665 | 0.00951 | 0.94122 | 1.35 | 1.00:1.83 | 1.7 | 1.13:2.54 | 1.03 | 0.49:2.14 | G | 35.5 | 29.2 | 162 | 271 |
| hCV1853469 | 1 + 3 | apoe4 = 0 | source, male, age_ge75 | 0.07352 | 0.06584 | 0.00909 | 0.71251 | 1.21 | 0.98:1.50 | 1.46 | 1.10:1.95 | 0.91 | 0.56:1.49 | G | 35.3 | 31.1 | 303 | 570 |
| hCV1911230 | 3 | age_ge75 = 0 | apoe4, male | 0.02321 | 0.02369 | 0.06782 | 0.04611 | 0.59 | 0.37:0.93 | 0.59 | 0.34:1.04 | 0.29 | 0.08:1.03 | C | 21.7 | 26.0 | 138 | 150 |
| hCV1911230 | 1 + 3 | age_ge75 = 0 | source, apoe4, male | 0.05735 | 0.05792 | 0.31068 | 0.00604 | 0.75 | 0.56:1.01 | 0.83 | 0.58:1.19 | 0.36 | 0.16:0.78 | C | 23.5 | 25.4 | 328 | 307 |
| hCV1913066 | 1 | ALL | NONE | 0.07093 | 0.07069 | 0.02804 | 0.95118 | 1.23 | 0.98:1.55 | 1.37 | 1.03:1.82 | 1.02 | 0.57:1.82 | A | 26.7 | 22.8 | 419 | 377 |
| hCV1913066 | 1 + 2 | ALL | source | 0.03278 | 0.03259 | 0.00942 | 0.94764 | 1.2 | 1.02:1.43 | 1.32 | 1.07:1.63 | 1.01 | 0.66:1.57 | A | 26.6 | 23.1 | 685 | 763 |
| hCV1920609 | 2 | apoe4 = 1 | male, age_ge75 | 0.00601 | 0.00662 | 0.06107 | 0.00989 | 1.81 | 1.19:2.78 | 1.92 | 0.97:3.80 | 2.64 | 1.25:5.55 | A | 55.9 | 41.9 | 118 | 86 |
| hCV1920609 | 1 + 2 + 3 | apoe4 = 1 | source, male, age_ge75 | 0.02203 | 0.01852 | 0.36884 | 0.00426 | 1.28 | 1.04:1.58 | 1.18 | 0.82:1.69 | 1.7 | 1.18:2.45 | A | 54.2 | 47.6 | 577 | 266 |
| hCV1946182 | 2 | age_ge75 = 0 | apoe4, male | 0.09351 | 0.10165 | 0.04227 | 0.98279 | 1.55 | 0.94:2.56 | 1.9 | 1.02:3.52 | 1.02 | 0.27:3.83 | G | 25.0 | 21.6 | 114 | 118 |
| hCV1946182 | 1 + 2 | age_ge75 = 0 | source, apoe4, male | 0.02591 | 0.02402 | 0.0073 | 0.9492 | 1.45 | 1.05:2.01 | 1.73 | 1.16:2.58 | 1.03 | 0.42:2.49 | G | 25.1 | 21.9 | 293 | 265 |
| hCV2027467 | 1 | apoe4 = 1 | male, age_ge75 | 0.168 | 0.16484 | 0.61151 | 0.01095 | 0.75 | 0.49:1.13 | 0.87 | 0.52:1.47 | 0.28 | 0.10:0.78 | A | 22.5 | 28.5 | 227 | 79 |
| hCV2027467 | 1 + 2 | apoe4 = 1 | source, male, age_ge75 | 0.20555 | 0.20527 | 0.79174 | 0.00499 | 0.81 | 0.59:1.12 | 0.95 | 0.64:1.40 | 0.33 | 0.15:0.75 | A | 22.0 | 25.0 | 345 | 172 |
| hCV2028275 | 1 | age_ge75 = 0 | NONE | 0.05679 | 0.06807 | 0.00225 | 0.6732 | 0.73 | 0.53:1.01 | 0.49 | 0.30:0.77 | 1.13 | 0.64:2.01 | T | 36.7 | 44.1 | 173 | 145 |
| hCV2028275 | 1 + 3 | age_ge75 = 0 | source | 0.09669 | 0.10815 | 0.00078 | 0.21954 | 0.82 | 0.65:1.04 | 0.56 | 0.40:0.79 | 1.3 | 0.85:1.98 | T | 38.1 | 42.9 | 307 | 294 |
| hCV2028376 | 1 | apoe4 = 1 | NONE | 0.19851 | 0.21114 | 0.00927 | 0.42667 | 0.79 | 0.55:1.13 | 0.46 | 0.25:0.83 | 1.31 | 0.68:2.52 | C | 42.3 | 48.1 | 226 | 80 |
| hCV2028376 | 1 + 3 | apoe4 = 1 | source | 0.17748 | 0.17581 | 0.00832 | 0.49649 | 0.84 | 0.66:1.08 | 0.58 | 0.39:0.87 | 1.17 | 0.74:1.84 | C | 43.1 | 47.4 | 445 | 175 |
| hCV2116087 | 1 | male = 0 | apoe4, age_ge75 | 0.0142 | 0.01349 | 0.0228 | 0.10662 | 1.45 | 1.08:1.95 | 1.57 | 1.06:2.30 | 1.82 | 0.91:3.66 | A | 35.2 | 28.5 | 264 | 235 |
| hCV2116087 | 1 + 2 + 3 | male = 0 | source, apoe4, age_ge75 | 0.01046 | 0.00942 | 0.01245 | 0.12787 | 1.26 | 1.06:1.50 | 1.35 | 1.07:1.71 | 1.37 | 0.92:2.05 | A | 35.4 | 30.7 | 670 | 787 |
| hCV2116434 | 1 | ALL | NONE | 0.01843 | 0.02038 | 0.03809 | 0.0673 | 0.57 | 0.36:0.91 | 0.6 | 0.37:0.98 | | . :. | C | 3.6 | 6.1 | 418 | 376 |
| hCV2116434 | 1 + 2 + 3 | ALL | source | 0.00873 | 0.00867 | 0.01088 | 0.28375 | 0.68 | 0.50:0.91 | 0.67 | 0.50:0.91 | 0.32 | 0.03:2.98 | C | 3.5 | 5.1 | 1071 | 1176 |
| hCV2131920 | 1 | apoe4 = 0 | male, age_ge75 | 0.61813 | 0.59831 | 0.4903 | 0.01335 | 1.08 | 0.80:1.45 | 0.87 | 0.59:1.29 | 2.48 | 1.19:5.14 | A | 33.2 | 30.6 | 164 | 273 |
| hCV2131920 | 1 + 2 | apoe4 = 0 | source, male, age_ge75 | 0.50318 | 0.48742 | 0.55275 | 0.00882 | 1.09 | 0.85:1.39 | 0.91 | 0.65:1.26 | 2.09 | 1.20:3.64 | A | 32.9 | 31.2 | 225 | 549 |
| hCV2153267 | 1 | male = 0 | NONE | 0.02022 | 0.02464 | 0.00632 | 0.77118 | 1.43 | 1.06:1.92 | 1.68 | 1.16:2.43 | 1.11 | 0.56:2.19 | C | 28.5 | 21.9 | 247 | 217 |
| hCV2153267 | 1 + 3 | male = 0 | source | 0.01599 | 0.01641 | 0.00544 | 0.66465 | 1.27 | 1.05:1.55 | 1.42 | 1.11:1.81 | 1.11 | 0.69:1.81 | C | 28.1 | 23.5 | 528 | 512 |
| hCV2170733 | 2 | male = 1 | apoe4, age_ge75 | 0.01526 | 0.01905 | 0.00577 | 0.61808 | 0.42 | 0.20:0.87 | 0.34 | 0.15:0.77 | 2.38 | 0.11:50.32 | C | 6.6 | 8.9 | 137 | 141 |
| hCV2170733 | 1 + 2 + 3 | male = 1 | source, apoe4, age_ge75 | 0.009 | 0.00999 | 0.00482 | 0.83353 | 0.56 | 0.36:0.88 | 0.52 | 0.32:0.83 | 1.31 | 0.14:12.18 | C | 5.9 | 7.7 | 380 | 382 |
| hCV2264708 | 1 | male = 1 | apoe4, age_ge75 | 0.00412 | 0.00369 | 0.01449 | 0.01585 | 1.96 | 1.24:3.12 | 1.97 | 1.14:3.40 | 11.3 | 1.15:110.85 | T | 23.6 | 15.6 | 140 | 135 |
| hCV2264708 | 1 + 2 + 3 | male = 1 | source, apoe4, age_ge75 | 0.00197 | 0.00202 | 0.00315 | 0.08663 | 1.57 | 1.18:2.09 | 1.67 | 1.19:2.35 | 2.11 | 0.93:4.76 | T | 23.9 | 19.1 | 314 | 377 |
| hCV2302732 | 1 | age_ge75 = 0 | NONE | 0.00002 | 0.00003 | 0.00002 | 0.03538 | 0.48 | 0.34:0.68 | 0.4 | 0.26:0.61 | 0.43 | 0.19:0.96 | C | 20.6 | 34.9 | 192 | 159 |
| hCV2302732 | 1 + 2 + 3 | age_ge75 = 0 | source | 0.00814 | 0.00805 | 0.00166 | 0.70703 | 0.76 | 0.61:0.93 | 0.66 | 0.50:0.85 | 0.91 | 0.55:1.50 | C | 24.6 | 30.2 | 449 | 440 |
| hCV2302732 | 1 | ALL | NONE | 0.00003 | 0.00004 | 0.00009 | 0.01106 | 0.62 | 0.50:0.78 | 0.57 | 0.43:0.76 | 0.51 | 0.30:0.86 | C | 22.7 | 32.0 | 419 | 376 |
| hCV2302732 | 1 + 2 + 3 | ALL | source | 0.00155 | 0.00158 | 0.00211 | 0.08162 | 0.8 | 0.70:0.92 | 0.76 | 0.64:0.91 | 0.75 | 0.54:1.04 | C | 24.8 | 29.2 | 988 | 1170 |
| hCV2302732 | 1 | apoe4 = 0 | male, age_ge75 | 0.01585 | 0.01845 | 0.01087 | 0.34103 | 0.69 | 0.51:0.93 | 0.61 | 0.42:0.89 | 0.72 | 0.37:1.41 | C | 24.7 | 33.3 | 178 | 287 |
| hCV2302732 | 1 + 2 + 3 | apoe4 = 0 | source, male, age_ge75 | 0.01429 | 0.01529 | 0.00892 | 0.36077 | 0.78 | 0.64:0.95 | 0.72 | 0.56:0.92 | 0.81 | 0.51:1.28 | C | 24.8 | 30.3 | 387 | 888 |
| hCV2302732 | 1 | male = 0 | NONE | 0.00023 | 0.00026 | 0.00022 | 0.08057 | 0.59 | 0.44:0.78 | 0.51 | 0.36:0.73 | 0.54 | 0.27:1.09 | C | 21.3 | 31.6 | 265 | 236 |
| hCV2302732 | 1 + 2 + 3 | male = 0 | source | 0.00105 | 0.00089 | 0.0005 | 0.20254 | 0.75 | 0.64:0.89 | 0.69 | 0.55:0.85 | 0.76 | 0.49:1.16 | C | 24.1 | 29.6 | 650 | 785 |
| hCV2302737 | 1 | ALL | apoe4, male, age_ge75 | 0.0041 | 0.00664 | 0.02948 | 0.0178 | 1.39 | 1.11:1.74 | 1.44 | 1.04:1.99 | 1.59 | 1.07:2.36 | T | 45.2 | 36.3 | 388 | 353 |
| hCV2302737 | 1 + 2 + 3 | ALL | source, apoe4, male, | 0.00682 | 0.0083 | 0.02982 | 0.02874 | 1.2 | 1.05:1.37 | 1.25 | 1.02:1.52 | 1.29 | 1.02:1.64 | T | 45.0 | 40.6 | 1023 | 1151 |
| | | | age_ge75 | | | | | | | | | | | | | | | |
| hCV2302737 | 1 | apoe4 = 0 | male, age_ge75 | 0.00305 | 0.00624 | 0.03316 | 0.01187 | 1.53 | 1.15:2.04 | 1.56 | 1.04:2.34 | 1.83 | 1.13:2.96 | T | 45.4 | 34.9 | 162 | 272 |
| hCV2302737 | 1 + 2 + 3 | apoe4 = 0 | source, male, age_ge75 | 0.00516 | 0.00657 | 0.09401 | 0.00337 | 1.29 | 1.08:1.54 | 1.26 | 0.96:1.64 | 1.57 | 1.16:2.13 | T | 46.5 | 40.5 | 370 | 872 |
| hCV2302737 | 1 | male = 1 | NONE | 0.0329 | 0.04204 | 0.06925 | 0.12402 | 1.45 | 1.03:2.04 | 1.58 | 0.96:2.60 | 1.6 | 0.88:2.92 | T | 46.4 | 37.4 | 139 | 135 |
| hCV2302737 | 1 + 2 + 3 | male = 1 | source | 0.00642 | 0.00882 | 0.01304 | 0.07277 | 1.33 | 1.08:1.63 | 1.46 | 1.08:1.98 | 1.39 | 0.97:1.99 | T | 46.1 | 39.5 | 375 | 384 |
| hCV2539346 | 3 | ALL | NONE | 0.00396 | 0.00358 | 0.00649 | 0.05658 | 0.74 | 0.60:0.91 | 0.66 | 0.49:0.89 | 0.67 | 0.44:1.01 | T | 35.1 | 42.3 | 358 | 396 |
| hCV2539346 | 1 + 2 + 3 | ALL | source | 0.00097 | 0.00096 | 0.00253 | 0.02271 | 0.81 | 0.71:0.92 | 0.75 | 0.63:0.91 | 0.75 | 0.59:0.96 | T | 36.8 | 41.9 | 929 | 1097 |
| hCV2539346 | 3 | male = 0 | NONE | 0.00475 | 0.00472 | 0.02174 | 0.0193 | 0.71 | 0.56:0.90 | 0.67 | 0.48:0.94 | 0.57 | 0.35:0.92 | T | 34.1 | 42.2 | 280 | 295 |
| hCV2539346 | 1 + 2 + 3 | male = 0 | source | 0.00562 | 0.0054 | 0.03152 | 0.01439 | 0.8 | 0.68:0.94 | 0.78 | 0.62:0.98 | 0.67 | 0.49:0.92 | T | 35.6 | 40.4 | 617 | 736 |
| hCV25602413 | 2 | apoe4 = 1 | male, age_ge75 | 0.15084 | 0.16251 | 0.44633 | 0.04377 | 1.4 | 0.88:2.22 | 1.24 | 0.71:2.15 | 4.03 | 0.99:16.38 | A | 24.5 | 19.1 | 157 | 97 |
| hCV25602413 | 1 + 2 + 3 | apoe4 = 1 | source, male, age_ge75 | 0.1272 | 0.13074 | 0.56564 | 0.00659 | 1.21 | 0.95:1.55 | 1.09 | 0.81:1.47 | 2.93 | 1.31:6.54 | A | 24.2 | 21.0 | 631 | 279 |
| hCV25602413 | 1 | male = 0 | apoe4, age_ge75 | 0.0172 | 0.0196 | 0.08469 | 0.01923 | 1.45 | 1.07:1.98 | 1.4 | 0.95:2.07 | 2.5 | 1.14:5.48 | A | 28.8 | 23.1 | 264 | 234 |
| hCV25602413 | 1 + 2 + 3 | male = 0 | source, apoe4, age_ge75 | 0.00357 | 0.00371 | 0.01875 | 0.0116 | 1.33 | 1.10:1.61 | 1.33 | 1.05:1.69 | 1.91 | 1.16:3.13 | A | 27.4 | 24.0 | 636 | 776 |
| hCV25602413 | 2 | male = 1 | apoe4, age_ge75 | 0.70841 | 0.71862 | 0.46547 | 0.01034 | 1.09 | 0.69:1.71 | 0.82 | 0.48:1.40 | 5.39 | 1.34:21.72 | A | 19.9 | 19.3 | 138 | 145 |
| hCV25602413 | 1 + 2 + 3 | male = 1 | source, apoe4, age_ge75 | 0.30802 | 0.3005 | 0.9401 | 0.00563 | 1.14 | 0.88:1.48 | 1.01 | 0.74:1.38 | 2.93 | 1.31:6.58 | A | 22.6 | 21.2 | 382 | 387 |
| hCV25603905 | 1 | ALL | apoe4, male, age_ge75 | 0.00418 | 0.00633 | 0.02505 | 0.02072 | 1.39 | 1.11:1.74 | 1.45 | 1.05:2.01 | 1.59 | 1.06:2.37 | C | 44.3 | 35.6 | 386 | 350 |
| hCV25603905 | 1 + 2 + 3 | ALL | source, apoe4, male, | 0.02173 | 0.02508 | 0.21667 | 0.00968 | 1.18 | 1.02:1.36 | 1.14 | 0.93:1.40 | 1.37 | 1.07:1.76 | C | 44.3 | 40.3 | 913 | 1095 |
| | | | age_ge75 | | | | | | | | | | | | | | | |
| hCV25603906 | 1 | age_ge75 = 0 | NONE | 0.15083 | 0.16404 | 0.88053 | 0.00546 | 1.28 | 0.91:1.80 | 1.03 | 0.67:1.60 | 3.06 | 1.35:6.97 | T | 33.0 | 27.7 | 179 | 146 |
| hCV25603906 | 1 + 2 + 3 | age_ge75 = 0 | source | 0.50679 | 0.51083 | 0.54924 | 0.00958 | 1.07 | 0.87:1.33 | 0.92 | 0.70:1.21 | 1.94 | 1.17:3.22 | T | 29.4 | 27.7 | 432 | 422 |
| hCV25625639 | 1 | age_ge75 = 0 | NONE | 0.00562 | 0.0053 | 0.00408 | 0.18717 | 0.63 | 0.45:0.87 | 0.52 | 0.33:0.82 | 0.61 | 0.29:1.28 | A | 27.2 | 37.4 | 178 | 147 |
| hCV25625639 | 1 + 2 + 3 | age_ge75 = 0 | source | 0.00857 | 0.00814 | 0.00974 | 0.14947 | 0.75 | 0.61:0.93 | 0.7 | 0.53:0.92 | 0.69 | 0.42:1.14 | A | 26.1 | 31.7 | 424 | 404 |
| hCV25637868 | 3 | ALL | NONE | 0.04981 | 0.04782 | 0.05834 | 0.3295 | 1.35 | 1.00:1.82 | 1.37 | 0.99:1.91 | 1.83 | 0.53:6.31 | C | 14.3 | 11.0 | 384 | 399 |
| hCV25637868 | 1 + 2 + 3 | ALL | source | 0.00969 | 0.00925 | 0.01777 | 0.09004 | 1.25 | 1.06:1.49 | 1.26 | 1.04:1.53 | 1.74 | 0.92:3.29 | C | 16.0 | 13.1 | 1020 | 1113 |
| hCV25744917 | 1 | apoe4 = 1 | male, age_ge75 | 0.00547 | 0.00525 | 0.11518 | 0.00249 | 0.59 | 0.41:0.86 | 0.6 | 0.32:1.13 | 0.41 | 0.23:0.74 | A | 44.6 | 57.0 | 223 | 79 |
| hCV25744917 | 1 + 3 | apoe4 = 1 | source, male, age_ge75 | 0.00373 | 0.0046 | 0.02357 | 0.0163 | 0.69 | 0.53:0.89 | 0.62 | 0.41:0.94 | 0.61 | 0.41:0.92 | A | 44.9 | 54.3 | 440 | 174 |
| hCV25752440 | 1 | age_ge75 = 0 | NONE | 0.0001 | 0.00014 | 0.00036 | 0.01329 | 0.51 | 0.36:0.71 | 0.45 | 0.29:0.70 | 0.38 | 0.17:0.84 | A | 22.5 | 36.4 | 178 | 147 |
| hCV25752440 | 1 + 2 + 3 | age_ge75 = 0 | source | 0.00966 | 0.00962 | 0.00461 | 0.37493 | 0.76 | 0.62:0.94 | 0.68 | 0.52:0.89 | 0.81 | 0.50:1.30 | A | 26.3 | 32.0 | 432 | 422 |
| hCV25752440 | 1 | ALL | NONE | 0.0001 | 0.00014 | 0.00091 | 0.00399 | 0.64 | 0.51:0.80 | 0.61 | 0.46:0.82 | 0.47 | 0.27:0.79 | A | 23.8 | 32.9 | 390 | 354 |
| hCV25752440 | 1 + 2 + 3 | ALL | source | 0.0011 | 0.00113 | 0.00464 | 0.01486 | 0.8 | 0.69:0.91 | 0.78 | 0.65:0.93 | 0.67 | 0.48:0.93 | A | 26.0 | 30.7 | 953 | 1140 |
| hCV25752440 | 1 | apoe4 = 0 | male, age_ge75 | 0.00671 | 0.00801 | 0.00632 | 0.1905 | 0.65 | 0.47:0.89 | 0.58 | 0.39:0.86 | 0.63 | 0.31:1.26 | A | 24.5 | 34.6 | 163 | 272 |
| hCV25752440 | 1 + 2 + 3 | apoe4 = 0 | source, male, age_ge75 | 0.00419 | 0.00481 | 0.00417 | 0.15559 | 0.75 | 0.61:0.91 | 0.69 | 0.54:0.89 | 0.72 | 0.45:1.14 | A | 25.1 | 31.7 | 371 | 870 |
| hCV25752440 | 1 | male = 0 | NONE | 0.00032 | 0.00032 | 0.00065 | 0.0314 | 0.59 | 0.44:0.79 | 0.53 | 0.37:0.76 | 0.47 | 0.23:0.95 | A | 22.8 | 33.3 | 250.0 | 219 |
| hCV25752440 | 1 + 2 + 3 | male = 0 | source | 0.00106 | 0.00088 | 0.00146 | 0.05786 | 0.75 | 0.64:0.89 | 0.71 | 0.57:0.87 | 0.67 | 0.44:1.02 | A | 25.475 | 31.3 | 632.0 | 763 |
| hCV25766586 | 2 | apoe4 = 0 | male, age_ge75 | 0.01479 | 0.0173 | 0.06066 | 0.01975 | 1.79 | 1.12:2.86 | 1.71 | 0.98:2.98 | 4.08 | 1.21:13.68 | T | 22.4 | 14.9 | 85 | 281 |
| hCV25766586 | 1 + 2 + 3 | apoe4 = 0 | source, male, age_ge75 | 0.46484 | 0.46308 | 0.91904 | 0.00473 | 1.09 | 0.86:1.39 | 0.99 | 0.75:1.30 | 3.04 | 1.38:6.72 | T | 15.8 | 14.9 | 396 | 854 |
| hCV25766586 | 1 | apoe4 = 1 | male, age_ge75 | 0.01532 | 0.01478 | 0.0094 | 0.69778 | 0.56 | 0.34:0.90 | 0.48 | 0.27:0.84 | 0.72 | 0.13:3.94 | T | 13.0 | 20.0 | 227 | 80 |
| hCV25766586 | 1 + 2 + 3 | apoe4 = 1 | source, male, age_ge75 | 0.02275 | 0.02256 | 0.00838 | 0.86253 | 0.72 | 0.55:0.96 | 0.65 | 0.47:0.90 | 1.08 | 0.42:2.80 | T | 13.7 | 18.4 | 606 | 263 |
| hCV25923332 | 1 | male = 1 | apoe4, age_ge75 | 0.00054 | 0.00065 | 0.00052 | 0.15627 | 2.29 | 1.42:3.70 | 2.65 | 1.52:4.62 | 2.6 | 0.65:10.42 | G | 25.4 | 12.2 | 140 | 135 |
| hCV25923332 | 1 + 3 | male = 1 | source, apoe4, age_ge75 | 0.00629 | 0.00647 | 0.00112 | 0.89169 | 1.64 | 1.15:2.35 | 2.01 | 1.32:3.07 | 0.93 | 0.33:2.60 | G | 23.7 | 15.5 | 213 | 235 |
| hCV25938519 | 1 | male = 1 | apoe4, age_ge75 | 0.00605 | 0.00768 | 0.00454 | 0.32979 | 1.8 | 1.17:2.76 | 2.13 | 1.25:3.63 | 1.6 | 0.58:4.39 | T | 25.7 | 18.7 | 138 | 134 |
| hCV25938519 | 1 + 3 | male = 1 | source, apoe4, age_ge75 | 0.00719 | 0.00968 | 0.01696 | 0.08349 | 1.54 | 1.12:2.11 | 1.63 | 1.09:2.43 | 1.76 | 0.88:3.49 | T | 28.7 | 22.1 | 216 | 235 |
| hCV25970515 | 1 | apoe4 = 0 | NONE | 0.00099 | 0.00099 | 0.00506 | 0.00755 | 1.8 | 1.26:2.55 | 1.8 | 1.19:2.71 | 4.39 | 1.35:14.23 | T | 23.6 | 14.7 | 161 | 269 |
| hCV25970515 | 1 + 2 + 3 | apoe4 = 0 | source | 0.00619 | 0.00596 | 0.00658 | 0.23809 | 1.37 | 1.09:1.73 | 1.44 | 1.11:1.87 | 1.56 | 0.75:3.25 | T | 20.0 | 15.1 | 368 | 845 |
| hCV25992569 | 1 | ALL | NONE | 0.00449 | 0.00499 | 0.00612 | 0.0996 | 0.73 | 0.59:0.91 | 0.67 | 0.50:0.89 | 0.68 | 0.43:1.08 | G | 29.6 | 36.5 | 389 | 352 |
| hCV25992569 | 1 + 3 | ALL | source | 0.00667 | 0.00681 | 0.03289 | 0.01743 | 0.81 | 0.70:0.94 | 0.8 | 0.66:0.98 | 0.67 | 0.48:0.93 | G | 30.2 | 34.8 | 771 | 750 |
| hCV2655148 | 1 | age_ge75 = 0 | NONE | 0.19447 | 0.21395 | 0.93571 | 0.00465 | 1.25 | 0.89:1.76 | 0.98 | 0.63:1.52 | 3.13 | 1.37:7.11 | C | 32.1 | 27.4 | 176 | 146 |
| hCV2655148 | 1 + 2 + 3 | age_ge75 = 0 | source | 0.60906 | 0.61403 | 0.41954 | 0.0091 | 1.06 | 0.86:1.31 | 0.89 | 0.68:1.17 | 1.95 | 1.18:3.23 | C | 29.0 | 27.7 | 430 | 421 |
| hCV2655158 | 1 | ALL | apoe4, male, age_ge75 | 0.00413 | 0.00813 | 0.00254 | 0.39118 | 1.48 | 1.13:1.93 | 1.66 | 1.19:2.31 | 1.28 | 0.72:2.27 | T | 25.7 | 19.5 | 382 | 344 |
| hCV2655158 | 1 + 2 + 3 | ALL | source, apoe4, male, | 0.00967 | 0.01268 | 0.00915 | 0.27564 | 1.23 | 1.05:1.44 | 1.29 | 1.07:1.57 | 1.22 | 0.85:1.75 | T | 24.9 | 22.9 | 1017 | 1142 |
| | | | age_ge75 | | | | | | | | | | | | | | | |
| hCV2655167 | 1 | male = 1 | apoe4, age_ge75 | 0.13624 | 0.13751 | 0.65137 | 0.00576 | 1.34 | 0.91:1.97 | 1.12 | 0.69:1.82 | 3.54 | 1.28:9.80 | G | 29.2 | 23.6 | 154 | 140 |
| hCV2655167 | 1 + 2 + 3 | male = 1 | source, apoe4, age_ge75 | 0.13637 | 0.13812 | 0.69134 | 0.00523 | 1.21 | 0.94:1.55 | 1.07 | 0.78:1.47 | 2.35 | 1.28:4.33 | G | 29.4 | 25.1 | 332 | 385 |
| hCV2682758 | 3 | ALL | apoe4, male, age_ge75 | 0.03315 | 0.02986 | 0.00902 | 0.64938 | 0.78 | 0.62:0.98 | 0.66 | 0.48:0.90 | 0.9 | 0.55:1.46 | T | 32.1 | 36.1 | 358 | 395 |
| hCV2682758 | 1 + 3 | ALL | source, apoe4, male, | 0.03344 | 0.03071 | 0.0039 | 0.98247 | 0.84 | 0.71:0.99 | 0.72 | 0.58:0.90 | 1 | 0.71:1.40 | T | 33.2 | 36.1 | 749 | 749 |
| | | | age_ge75 | | | | | | | | | | | | | | | |
| hCV2682758 | 3 | apoe4 = 0 | male, age_ge75 | 0.13254 | 0.11721 | 0.01544 | 0.50973 | 0.79 | 0.58:1.08 | 0.61 | 0.40:0.91 | 1.24 | 0.64:2.41 | T | 30.1 | 34.8 | 141 | 300 |
| hCV2682758 | 1 + 3 | apoe4 = 0 | source, male, age_ge75 | 0.09873 | 0.09142 | 0.00532 | 0.38834 | 0.84 | 0.68:1.03 | 0.67 | 0.50:0.89 | 1.21 | 0.78:1.89 | T | 32.0 | 35.5 | 305 | 573 |
| hCV2682758 | 3 | male = 0 | apoe4, age_ge75 | 0.01491 | 0.012 | 0.00659 | 0.33666 | 0.72 | 0.55:0.94 | 0.61 | 0.42:0.87 | 0.76 | 0.43:1.35 | T | 31.2 | 36.3 | 293 | 296 |
| hCV2682758 | 1 + 3 | male = 0 | source, apoe4, age_ge75 | 0.03123 | 0.02838 | 0.00932 | 0.60068 | 0.81 | 0.66:0.98 | 0.7 | 0.54:0.92 | 0.9 | 0.59:1.36 | T | 32.7 | 36.1 | 544 | 515 |
| hCV2685860 | 3 | age_ge75 = 0 | NONE | 0.01755 | 0.01325 | 0.01325 | | 2.13 | 1.13:4.01 | 2.26 | 1.17:4.37 | | | A | 9.9 | 4.9 | 162 | 153 |
| hCV2685860 | 1 + 2 + 3 | age_ge75 = 0 | source | 0.00902 | 0.00878 | 0.01112 | 0.26834 | 1.59 | 1.12:2.26 | 1.61 | 1.11:2.32 | 3.22 | 0.36:28.82 | A | 9.1 | 5.9 | 518 | 441 |
| hCV2734178 | 1 | apoe4 = 0 | male, age_ge75 | 0.01102 | 0.01134 | 0.39295 | 0.0013 | 1.42 | 1.08:1.86 | 1.22 | 0.77:1.93 | 1.96 | 1.29:2.98 | G | 58.0 | 48.8 | 176 | 288 |
| hCV2734178 | 1 + 2 + 3 | apoe4 = 0 | source, male, age_ge75 | 0.00347 | 0.00326 | 0.09596 | 0.00164 | 1.3 | 1.09:1.55 | 1.28 | 0.96:1.71 | 1.56 | 1.18:2.07 | G | 53.8 | 47.2 | 385 | 891 |
| hCV2757616 | 1 | age_ge75 = 1 | NONE | 0.02518 | 0.02728 | 0.01005 | 0.88518 | 1.47 | 1.05:2.05 | 1.68 | 1.13:2.49 | 1.07 | 0.43:2.69 | G | 22.5 | 16.5 | 227 | 218 |
| hCV2757616 | 1 + 2 + 3 | age_ge75 = 1 | source | 0.00976 | 0.01052 | 0.00366 | 0.80674 | 1.32 | 1.07:1.63 | 1.44 | 1.13:1.85 | 1.08 | 0.58:2.01 | G | 20.6 | 16.4 | 520 | 721 |
| hCV2760432 | 1 | male = 0 | NONE | 0.0061 | 0.01022 | 0.00855 | 0.31982 | 2.05 | 1.22:3.44 | 2.1 | 1.20:3.69 | 2.26 | 0.43:11.76 | C | 9.1 | 4.6 | 265 | 237 |
| hCV2760432 | 1 + 2 | male = 0 | source | 0.00773 | 0.01075 | 0.00536 | 0.76817 | 1.67 | 1.15:2.43 | 1.78 | 1.19:2.68 | 1.24 | 0.32:4.78 | C | 9.3 | 6.4 | 365 | 488 |
| hCV286937 | 1 | age_ge75 = 0 | NONE | 0.00121 | 0.00189 | 0.001 | 0.24138 | 0.53 | 0.36:0.78 | 0.46 | 0.29:0.73 | 0.56 | 0.21:1.50 | G | 15.2 | 25.3 | 178 | 146 |
| hCV286937 | 1 + 2 + 3 | age_ge75 = 0 | source | 0.00067 | 0.00085 | 0.00065 | 0.20458 | 0.63 | 0.49:0.83 | 0.59 | 0.44:0.80 | 0.6 | 0.28:1.32 | G | 13.5 | 19.4 | 422 | 403 |
| hCV286937 | 1 | apoe4 = 0 | NONE | 0.01556 | 0.01669 | 0.01962 | 0.22477 | 0.64 | 0.44:0.92 | 0.6 | 0.40:0.92 | 0.5 | 0.16:1.56 | G | 14.8 | 21.5 | 162 | 270 |
| hCV286937 | 1 + 2 + 3 | apoe4 = 0 | source | 0.00908 | 0.00988 | 0.01998 | 0.07722 | 0.72 | 0.56:0.92 | 0.72 | 0.55:0.95 | 0.47 | 0.20:1.10 | G | 14.0 | 17.9 | 368 | 838 |
| hCV286937 | 2 | apoe4 = 1 | NONE | 0.05087 | 0.04567 | 0.03687 | 0.67331 | 0.58 | 0.34:1.01 | 0.52 | 0.28:0.96 | 0.65 | 0.09:4.75 | G | 13.5 | 21.1 | 115 | 76 |
| hCV286937 | 1 + 2 + 3 | apoe4 = 1 | source | 0.01009 | 0.00993 | 0.00742 | 0.52227 | 0.68 | 0.51:0.91 | 0.64 | 0.46:0.89 | 0.71 | 0.25:2.01 | G | 12.5 | 17.5 | 561 | 251 |
| hCV2945715 | 1 | male = 0 | apoe4, age_ge75 | 0.09244 | 0.09308 | 0.00862 | 0.6672 | 1.27 | 0.96:1.69 | 1.69 | 1.14:2.51 | 0.88 | 0.49:1.56 | T | 39.0 | 33.8 | 264 | 235 |
| hCV2945715 | 1 + 2 | male = 0 | source, apoe4, age_ge75 | 0.0779 | 0.07825 | 0.00932 | 0.79126 | 1.23 | 0.98:1.55 | 1.53 | 1.11:2.11 | 0.94 | 0.58:1.51 | T | 38.2 | 33.3 | 356 | 483 |
| hCV29522 | 1 | ALL | apoe4, male, age_ge75 | 0.07834 | 0.08509 | 0.41078 | 0.0169 | 1.24 | 0.98:1.57 | 1.14 | 0.83:1.56 | 1.9 | 1.12:3.20 | T | 34.4 | 29.5 | 390 | 352 |
| hCV29522 | 1 + 2 + 3 | ALL | source, apoe4, male, | 0.11891 | 0.12106 | 0.68883 | 0.00639 | 1.13 | 0.97:1.31 | 1.04 | 0.86:1.27 | 1.58 | 1.14:2.19 | T | 33.3 | 30.7 | 919 | 1097 |
| | | | age_ge75 | | | | | | | | | | | | | | | |
| hCV29522 | 1 | male = 0 | apoe4, age_ge75 | 0.26375 | 0.27263 | 0.89146 | 0.03483 | 1.19 | 0.88:1.60 | 1.03 | 0.69:1.54 | 2.06 | 1.05:4.02 | T | 34.6 | 31.2 | 250 | 218 |
| hCV29522 | 1 + 2 + 3 | male = 0 | source, apoe4, age_ge75 | 0.0642 | 0.06616 | 0.39817 | 0.00928 | 1.19 | 0.99:1.42 | 1.11 | 0.87:1.41 | 1.71 | 1.14:2.55 | T | 33.9 | 31.2 | 645 | 744 |
| hCV2981213 | 1 | age_ge75 = 0 | apoe4, male | 0.5145 | 0.53341 | 0.68569 | 0.04727 | 1.14 | 0.77:1.70 | 0.9 | 0.54:1.50 | 2.72 | 1.05:7.03 | T | 32.8 | 28.5 | 174 | 144 |
| hCV2981213 | 1 + 2 + 3 | age_ge75 = 0 | source, apoe4, male | 0.83883 | 0.84134 | 0.21252 | 0.00852 | 1.03 | 0.80:1.31 | 0.82 | 0.59:1.12 | 2.23 | 1.23:4.04 | T | 30.2 | 28.4 | 419 | 402 |
| hCV2981216 | 1 | age_ge75 = 0 | apoe4, male | 0.42276 | 0.44228 | 0.70732 | 0.02489 | 1.18 | 0.79:1.75 | 0.91 | 0.54:1.51 | 3.02 | 1.17:7.80 | T | 33.1 | 28.8 | 178 | 146 |
| hCV2981216 | 1 + 2 + 3 | age_ge75 = 0 | source, apoe4, male | 0.8273 | 0.82995 | 0.19738 | 0.00594 | 1.03 | 0.81:1.31 | 0.81 | 0.60:1.11 | 2.27 | 1.27:4.07 | T | 29.9 | 28.3 | 430 | 420 |
| hCV299325 | 1 | age_ge75 = 0 | apoe4, male | 0.01196 | 0.01194 | 0.0115 | 0.60505 | 3.01 | 1.30:7.00 | 3.2 | 1.32:7.75 | | . :. | T | 6.0 | 3.8 | 191 | 158 |
| hCV299325 | 1 + 2 + 3 | age_ge75 = 0 | source, apoe4, male | 0.006 | 0.00695 | 0.00292 | 0.67541 | 1.96 | 1.20:3.18 | 2.16 | 1.29:3.60 | 0.55 | 0.05:6.54 | T | 6.6 | 4.1 | 445 | 434 |
| hCV3027361 | 1 | age_ge75 = 0 | apoe4, male | 0.05995 | 0.06238 | 0.02149 | 0.6572 | 0.71 | 0.50:1.01 | 0.56 | 0.34:0.92 | 0.85 | 0.42:1.72 | T | 33.2 | 40.8 | 191 | 157 |
| hCV3027361 | 1 + 3 | age_ge75 = 0 | source, apoe4, male | 0.05501 | 0.05498 | 0.00863 | 0.93053 | 0.77 | 0.59:1.01 | 0.61 | 0.42:0.88 | 0.98 | 0.58:1.65 | T | 35.3 | 40.2 | 329 | 306 |
| hCV3052366 | 1 | ALL | NONE | 0.01512 | 0.0216 | 0.0533 | 0.03231 | 1.91 | 1.12:3.26 | 1.72 | 0.99:2.99 | | . :. | T | 5.5 | 3.0 | 390 | 355 |
| hCV3052366 | 1 + 2 + 3 | ALL | source | 0.00531 | 0.00649 | 0.01841 | 0.01221 | 1.61 | 1.15:2.26 | 1.52 | 1.07:2.16 | | . :. | T | 4.4 | 2.7 | 951 | 1128 |
| hCV3052366 | 1 | male = 0 | NONE | 0.00429 | 0.00902 | 0.02136 | 0.03496 | 2.67 | 1.33:5.36 | 2.3 | 1.11:4.75 | | . :. | T | 6.4 | 2.5 | 250 | 220 |
| hCV3052366 | 1 + 2 + 3 | male = 0 | source | 0.00824 | 0.01067 | 0.02452 | 0.03515 | 1.76 | 1.16:2.68 | 1.64 | 1.07:2.54 | | . :. | T | 4.7 | 2.7 | 631 | 754 |
| hCV3132900 | 1 | male = 0 | apoe4, age_ge75 | 0.00974 | 0.00764 | 0.03196 | 0.02864 | 0.69 | 0.52:0.91 | 0.65 | 0.43:0.97 | 0.54 | 0.31:0.95 | A | 35.8 | 43.0 | 264 | 235 |
| hCV3132900 | 1 + 2 + 3 | male = 0 | source, apoe4, age_ge75 | 0.00397 | 0.00412 | 0.02085 | 0.01601 | 0.78 | 0.65:0.92 | 0.75 | 0.59:0.96 | 0.67 | 0.48:0.94 | A | 36.1 | 40.3 | 635 | 778 |
| hCV3159528 | 1 | apoe4 = 0 | male, age_ge75 | 0.05536 | 0.06031 | 0.60992 | 0.00403 | 1.31 | 0.99:1.72 | 1.11 | 0.75:1.65 | 2.07 | 1.26:3.40 | C | 43.5 | 37.8 | 178 | 288 |
| hCV3159528 | 1 + 2 + 3 | apoe4 = 0 | source, male, age_ge75 | 0.011 | 0.01067 | 0.16102 | 0.00249 | 1.26 | 1.05:1.51 | 1.2 | 0.93:1.56 | 1.67 | 1.20:2.33 | C | 42.2 | 36.8 | 386 | 888 |
| hCV3159528 | 1 | male = 1 | apoe4, age_ge75 | 0.09702 | 0.0987 | 0.9565 | 0.00189 | 1.35 | 0.95:1.93 | 1.01 | 0.61:1.68 | 3.08 | 1.48:6.42 | C | 40.8 | 35.0 | 153 | 140 |
| hCV3159528 | 1 + 2 + 3 | male = 1 | source, apoe4, age_ge75 | 0.009 | 0.00699 | 0.0768 | 0.00541 | 1.36 | 1.08:1.72 | 1.36 | 0.97:1.90 | 1.94 | 1.21:3.12 | C | 41.0 | 35.8 | 327 | 383 |
| hCV3159529 | 1 | male = 1 | apoe4, age_ge75 | 0.08372 | 0.09185 | 0.91238 | 0.00036 | 1.4 | 0.95:2.07 | 1.03 | 0.62:1.70 | 4.95 | 1.80:13.63 | G | 32.4 | 25.9 | 139 | 135 |
| hCV3159529 | 1 + 2 + 3 | male = 1 | source, apoe4, age_ge75 | 0.02684 | 0.02262 | 0.14832 | 0.00764 | 1.33 | 1.03:1.71 | 1.28 | 0.92:1.78 | 2.27 | 1.21:4.23 | G | 32.2 | 27.7 | 306 | 361 |
| hCV3159576 | 1 | apoe4 = 1 | NONE | 0.02939 | 0.03304 | 0.02799 | 0.19725 | 0.67 | 0.47:0.96 | 0.5 | 0.27:0.93 | 0.69 | 0.39:1.22 | T | 45.6 | 55.6 | 227 | 81 |
| hCV3159576 | 1 + 2 + 3 | apoe4 = 1 | source | 0.01565 | 0.0155 | 0.00407 | 0.29291 | 0.77 | 0.62:0.95 | 0.59 | 0.41:0.85 | 0.83 | 0.59:1.17 | T | 47.1 | 53.4 | 563 | 253 |
| hCV3178540 | 1 | apoe4 = 0 | male, age_ge75 | 0.04353 | 0.04326 | 0.00546 | 0.42381 | 1.39 | 1.01:1.90 | 1.72 | 1.17:2.54 | 0.67 | 0.26:1.74 | G | 25.8 | 20.3 | 178 | 288 |
| hCV3178540 | 1 + 2 + 3 | apoe4 = 0 | source, male, age_ge75 | 0.01386 | 0.0157 | 0.00148 | 0.62318 | 1.3 | 1.05:1.60 | 1.5 | 1.17:1.93 | 0.87 | 0.49:1.53 | G | 24.8 | 20.5 | 387 | 882 |
| hCV3188402 | 3 | age_ge75 = 1 | apoe4, male | 0.38669 | 0.38885 | 0.97514 | 0.00227 | 0.84 | 0.56:1.25 | 0.99 | 0.64:1.55 | 0 | . :. | C | 12.2 | 13.4 | 222 | 246 |
| hCV3188402 | 1 + 3 | age_ge75 = 1 | source, apoe4, male | 0.2435 | 0.24068 | 0.57765 | 0.00685 | 0.83 | 0.61:1.13 | 0.91 | 0.65:1.27 | 0.13 | 0.02:0.87 | C | 10.8 | 12.6 | 434 | 453 |
| hCV3234889 | 1 | apoe4 = 1 | male, age_ge75 | 0.00916 | 0.00932 | 0.00473 | 0.36097 | 0.61 | 0.42:0.89 | 0.48 | 0.29:0.80 | 0.68 | 0.29:1.57 | G | 25.8 | 36.2 | 240 | 87 |
| hCV3234889 | 1 + 2 | apoe4 = 1 | source, male, age_ge75 | 0.04116 | 0.04389 | 0.0075 | 0.9222 | 0.74 | 0.55:0.99 | 0.59 | 0.40:0.87 | 1.03 | 0.53:2.02 | G | 27.4 | 32.6 | 354 | 170 |
| hCV337151 | 1 | apoe4 = 1 | NONE | 0.00821 | 0.00892 | 0.10503 | 0.00343 | 0.61 | 0.42:0.88 | 0.64 | 0.38:1.10 | 0.37 | 0.19:0.73 | G | 32.6 | 44.3 | 224 | 79 |
| hCV337151 | 1 + 2 + 3 | apoe4 = 1 | source | 0.00702 | 0.00664 | 0.0314 | 0.02086 | 0.74 | 0.60:0.92 | 0.71 | 0.52:0.97 | 0.62 | 0.41:0.93 | G | 34.7 | 42.4 | 560 | 250 |
| hCV337151 | 3 | male = 0 | NONE | 0.00753 | 0.00777 | 0.03237 | 0.02494 | 0.72 | 0.57:0.92 | 0.69 | 0.49:0.97 | 0.58 | 0.36:0.94 | G | 34.2 | 41.9 | 282 | 295 |
| hCV337151 | 1 + 2 + 3 | male = 0 | source | 0.00687 | 0.00661 | 0.04568 | 0.0114 | 0.8 | 0.69:0.94 | 0.79 | 0.63:1.00 | 0.66 | 0.48:0.91 | G | 35.5 | 40.3 | 619 | 733 |
| hCV368390 | 1 | age_ge75 = 1 | apoe4, male | 0.00014 | 0.00023 | 0.00254 | 0.00069 | 2.29 | 1.48:3.53 | 2.07 | 1.29:3.33 | | . :. | C | 17.0 | 8.5 | 227 | 217 |
| hCV368390 | 1 + 2 + 3 | age_ge75 = 1 | source, apoe4, male | 0.00109 | 0.00129 | 0.00602 | 0.00659 | 1.56 | 1.20:2.04 | 1.51 | 1.13:2.03 | 4.59 | 1.50:13.99 | C | 14.4 | 10.5 | 519 | 731 |
| hCV368390 | 1 | ALL | apoe4, male, age_ge75 | 0.00258 | 0.00334 | 0.00767 | 0.04556 | 1.64 | 1.18:2.27 | 1.63 | 1.14:2.35 | 2.74 | 0.93:8.05 | C | 15.0 | 10.5 | 418 | 375 |
| hCV368390 | 1 + 2 + 3 | ALL | source, apoe4, male, | 0.00117 | 0.00134 | 0.00209 | 0.10273 | 1.41 | 1.14:1.73 | 1.43 | 1.14:1.80 | 1.83 | 0.87:3.83 | C | 13.7 | 11.2 | 963 | 1163 |
| | | | age_ge75 | | | | | | | | | | | | | | | |
| hCV368390 | 3 | male = 0 | apoe4, age_ge75 | 0.02153 | 0.02055 | 0.02374 | 0.3355 | 1.6 | 1.07:2.40 | 1.66 | 1.07:2.58 | 2.93 | 0.39:22.21 | C | 13.5 | 10.0 | 281 | 295 |
| hCV368390 | 1 + 2 + 3 | male = 0 | source, apoe4, age_ge75 | 0.00421 | 0.00416 | 0.01282 | 0.02082 | 1.46 | 1.13:1.89 | 1.44 | 1.08:1.91 | 4.04 | 1.25:13.00 | C | 13.8 | 11.2 | 635 | 780 |
| hCV369380 | 1 | age_ge75 = 0 | NONE | 0.0111 | 0.01153 | 0.01464 | 0.27042 | 0.39 | 0.19:0.83 | 0.4 | 0.18:0.85 | | . :. | C | 3.1 | 7.5 | 178 | 147 |
| hCV369380 | 1 + 3 | age_ge75 = 0 | source | 0.00746 | 0.00715 | 0.00908 | 0.27116 | 0.48 | 0.28:0.83 | 0.48 | 0.27:0.84 | 0 | . :. | C | 3.1 | 6.2 | 340 | 300 |
| hCV472673 | 1 | apoe4 = 0 | male, age_ge75 | 0.0218 | 0.01554 | 0.00652 | 0.28757 | 1.39 | 1.05:1.84 | 1.93 | 1.20:3.12 | 1.31 | 0.80:2.17 | C | 51.2 | 42.3 | 163 | 273 |
| hCV472673 | 1 + 2 + 3 | apoe4 = 0 | source, male, age_ge75 | 0.03476 | 0.02951 | 0.00489 | 0.53431 | 1.21 | 1.01:1.44 | 1.53 | 1.13:2.05 | 1.1 | 0.81:1.50 | C | 50.4 | 45.9 | 371 | 873 |
| hCV52509 | 1 | age_ge75 = 0 | apoe4, male | 0.00813 | 0.00741 | 0.02812 | 0.03083 | 1.64 | 1.14:2.38 | 1.82 | 1.05:3.15 | 2.11 | 1.07:4.17 | T | 49.2 | 39.7 | 177 | 146 |
| hCV52509 | 1 + 2 + 3 | age_ge75 = 0 | source, apoe4, male | 0.0096 | 0.01003 | 0.02106 | 0.05947 | 1.34 | 1.07:1.67 | 1.5 | 1.06:2.11 | 1.42 | 0.98:2.07 | T | 49.1 | 43.0 | 428 | 414 |
| hCV5478 | 1 | age_ge75 = 0 | NONE | 0.01421 | 0.0175 | 0.0216 | 0.27042 | 0.32 | 0.12:0.83 | 0.33 | 0.12:0.89 | | . :. | T | 1.7 | 5.1 | 178 | 147 |
| hCV5478 | 1 + 3 | age_ge75 = 0 | source | 0.00312 | 0.00457 | 0.00658 | 0.14473 | 0.34 | 1.16:0.72 | 0.36 | 0.17:0.77 | 0 | . :. | T | 1.6 | 4.4 | 316 | 296 |
| hCV7432717 | 1 | apoe4 = 1 | male, age_ge75 | 0.00861 | 0.00885 | 0.00432 | 0.36515 | 0.61 | 0.42:0.88 | 0.48 | 0.29:0.80 | 0.68 | 0.30:1.58 | A | 25.7 | 36.2 | 239 | 87 |
| hCV7432717 | 1 + 2 | apoe4 = 1 | source, male, age_ge75 | 0.03092 | 0.03241 | 0.00577 | 0.99754 | 0.73 | 0.54:0.97 | 0.58 | 0.39:0.85 | 1 | 0.51:1.97 | A | 27.1 | 32.7 | 356 | 173 |
| hCV7582334 | 1 | age_ge75 = 0 | NONE | 0.00216 | 0.00164 | 0.00464 | 0.02638 | 0.49 | 0.31:0.78 | 0.49 | 0.29:0.80 | | . :. | G | 9.8 | 18.0 | 179 | 147 |
| hCV7582334 | 1 + 2 + 3 | age_ge75 = 0 | source | 0.00927 | 0.00864 | 0.01553 | 0.10485 | 0.7 | 0.54:0.92 | 0.69 | 0.52:0.93 | 0.42 | 0.14:1.24 | G | 11.7 | 15.9 | 498 | 421 |
| hCV7582334 | 1 | apoe4 = 1 | male, age_ge75 | 0.02109 | 0.0173 | 0.01324 | 0.81083 | 0.57 | 0.35:0.93 | 0.51 | 0.29:0.88 | 0.78 | 0.08:7.38 | G | 10.8 | 18.5 | 227 | 81 |
| hCV7582334 | 1 + 2 + 3 | apoe4 = 1 | source, male, age_ge75 | 0.00575 | 0.00476 | 0.00358 | 0.66224 | 0.65 | 0.48:0.89 | 0.61 | 0.43:0.85 | 0.73 | 0.18:3.06 | G | 10.8 | 15.5 | 556 | 258 |
| hCV7584409 | 1 | age_ge75 = 0 | apoe4, male | 0.00713 | 0.00881 | 0.00933 | 0.12445 | 0.59 | 0.40:0.87 | 0.51 | 0.30:0.85 | 0.53 | 0.24:1.16 | 7 | 30.9 | 40.1 | 178 | 146 |
| hCV7584409 | 1 + 3 | age_ge75 = 0 | source, apoe4, male | 0.00869 | 0.01066 | 0.0199 | 0.07228 | 0.69 | 0.52:0.91 | 0.64 | 0.44:0.93 | 0.59 | 0.34:1.04 | 7 | 32.0 | 38.1 | 316 | 295 |
| hCV799520 | 1 | age_ge75 = 1 | apoe4, male | 0.09533 | 0.08651 | 0.03478 | 0.20152 | 1.42 | 0.93:2.18 | 1.64 | 1.03:2.62 | 0.31 | 0.04:2.51 | G | 14.6 | 10.0 | 212 | 204 |
| hCV799520 | 1 + 3 | age_ge75 = 1 | source, apoe4, male | 0.04383 | 0.04506 | 0.00512 | 0.04207 | 1.36 | 1.00:1.85 | 1.62 | 1.15:2.27 | 0.31 | 0.09:1.10 | G | 13.3 | 9.7 | 432 | 448 |
| hCV811329 | 1 | apoe4 = 0 | male, age_ge75 | 0.01146 | 0.01077 | 0.01067 | 0.30277 | 0.64 | 0.45:0.91 | 0.59 | 0.39:0.89 | 0.56 | 0.18:1.75 | A | 14.9 | 21.1 | 178 | 287 |
| hCV811329 | 1 + 2 + 3 | apoe4 = 0 | source, male, age_ge75 | 0.0062 | 0.00551 | 0.01772 | 0.02859 | 0.73 | 0.58:0.92 | 0.73 | 0.56:0.95 | 0.41 | 0.18:0.93 | A | 16.7 | 21.4 | 383 | 877 |
| hCV811329 | 2 | male = 1 | apoe4, age_ge75 | 0.00012 | 0.00011 | 0.00034 | 0.0179 | 0.4 | 0.25:0.65 | 0.37 | 0.21:0.65 | 0.05 | 0.00:0.89 | A | 13.5 | 26.6 | 137 | 141 |
| hCV811329 | 1 + 2 + 3 | male = 1 | source, apoe4, age_ge75 | 0.00271 | 0.00223 | 0.00543 | 0.04946 | 0.66 | 0.51:0.87 | 0.64 | 0.47:0.88 | 0.38 | 0.14:1.00 | A | 17.1 | 23.6 | 381 | 383 |
| hCV8227677 | 1 | apoe4 = 0 | male, age_ge75 | 0.06598 | 0.06937 | 0.92784 | 0.00203 | 1.3 | 0.98:1.72 | 0.98 | 0.62:1.54 | 2 | 1.28:3.12 | C | 53.4 | 47.2 | 163 | 269 |
| hCV8227677 | 1 + 2 + 3 | apoe4 = 0 | source, male, age_ge75 | 0.0067 | 0.00701 | 0.15067 | 0.00263 | 1.28 | 1.07:1.54 | 1.24 | 0.93:1.67 | 1.56 | 1.16:2.08 | C | 52.6 | 46.8 | 364 | 836 |
| hCV8227677 | 1 | male = 1 | apoe4, age_ge75 | 0.04809 | 0.04909 | 0.83364 | 0.00052 | 1.44 | 1.00:2.06 | 0.94 | 0.53:1.67 | 3.07 | 1.62:5.83 | C | 53.2 | 44.7 | 139 | 132 |
| hCV8227677 | 1 + 2 + 3 | male = 1 | source, apoe4, age_ge75 | 0.00765 | 0.00693 | 0.1625 | 0.00234 | 1.38 | 1.09:1.74 | 1.31 | 0.90:1.92 | 1.88 | 1.25:2.82 | C | 51.8 | 45.2 | 305 | 354 |
| hCV8725171 | 3 | age_ge75 = 0 | NONE | 0.00151 | 0.00143 | 0.00133 | 0.15863 | 1.85 | 1.26:2.71 | 2.11 | 1.33:3.35 | 2.14 | 0.73:6.31 | G | 28.1 | 17.4 | 162 | 152 |
| hCV8725171 | 1 + 2 + 3 | age_ge75 = 0 | source | 0.01117 | 0.01248 | 0.00868 | 0.36345 | 1.34 | 1.07:1.67 | 1.43 | 1.09:1.87 | 1.31 | 0.73:2.38 | G | 23.7 | 18.9 | 505 | 428 |
| hCV8725171 | 3 | ALL | NONE | 0.01223 | 0.01401 | 0.01332 | 0.25482 | 1.37 | 1.07:1.76 | 1.45 | 1.08:1.96 | 1.46 | 0.76:2.79 | G | 24.0 | 18.7 | 358 | 395 |
| hCV8725171 | 1 + 2 + 3 | ALL | source | 0.00901 | 0.01016 | 0.01128 | 0.19773 | 1.22 | 1.05:1.42 | 1.26 | 1.05:1.51 | 1.3 | 0.87:1.95 | G | 22.7 | 19.1 | 949 | 1127 |
| hCV8780618 | 1 | apoe4 = 0 | male, age_ge75 | 0.03226 | 0.02396 | 0.01159 | 0.83587 | 1.47 | 1.03:2.09 | 1.7 | 1.12:2.57 | 0.87 | 0.21:3.52 | C | 22.2 | 16.3 | 162 | 270 |
| hCV8780618 | 1 + 2 + 3 | apoe4 = 0 | source, male, age_ge75 | 0.00776 | 0.0054 | 0.00257 | 0.93874 | 1.37 | 1.09:1.72 | 1.51 | 1.15:1.97 | 1.03 | 0.42:2.55 | C | 20.5 | 16.4 | 364 | 848 |
| hCV8782652 | 1 | apoe4 = 0 | NONE | 0.00955 | 0.0064 | 0.00284 | 0.1939 | 1.44 | 1.09:1.90 | 2.04 | 1.27:3.27 | 1.38 | 0.85:2.25 | T | 51.8 | 42.8 | 163 | 270 |
| hCV8782652 | 1 + 3 | apoe4 = 0 | source | 0.03425 | 0.02744 | 0.00816 | 0.3968 | 1.24 | 1.02:1.51 | 1.57 | 1.12:2.19 | 1.16 | 0.82:1.63 | T | 51.2 | 46.1 | 304 | 570 |
| hCV8782652 | 3 | male = 0 | apoe4, age_ge75 | 0.09542 | 0.08558 | 0.01928 | 0.7043 | 1.24 | 0.96:1.60 | 1.65 | 1.09:2.52 | 1.09 | 0.70:1.68 | T | 49.8 | 46.3 | 282 | 295 |
| hCV8782652 | 1 + 3 | male = 0 | source, apoe4, age_ge75 | 0.06549 | 0.05509 | 0.00888 | 0.69313 | 1.2 | 0.99:1.44 | 1.53 | 1.12:2.09 | 1.07 | 0.77:1.49 | T | 49.5 | 45.7 | 532 | 510 |
| hCV8856240 | 3 | male = 1 | apoe4, age_ge75 | 0.00776 | 0.00927 | 0.01762 | 0.07823 | 2.13 | 1.22:3.72 | 2.22 | 1.14:4.30 | 5.09 | 0.83:31.28 | G | 26.9 | 16.5 | 78 | 100 |
| hCV8856240 | 1 + 2 + 3 | male = 1 | source, apoe4, age_ge75 | 0.00759 | 0.00884 | 0.01734 | 0.07912 | 1.5 | 1.12:2.02 | 1.52 | 1.08:2.15 | 2.31 | 0.93:5.71 | G | 20.9 | 15.4 | 332 | 383 |
| hCV8885200 | 1 | apoe4 = 0 | male, age_ge75 | 0.00006 | 0.00007 | 0.00017 | 0.02036 | 0.47 | 0.33:0.69 | 0.45 | 0.30:0.69 | 0.19 | 0.04:0.88 | A | 12.6 | 23.8 | 178 | 288 |
| hCV8885200 | 1 + 2 + 3 | apoe4 = 0 | source, male, age_ge75 | 0.00852 | 0.00895 | 0.00371 | 0.61328 | 0.74 | 0.60:0.93 | 0.68 | 0.53:0.88 | 0.86 | 0.47:1.57 | A | 17.4 | 22.7 | 385 | 887 |
| hCV8921255 | 1 | age_ge75 = 0 | NONE | 0.00006 | 0.00011 | 0.0003 | 0.01025 | 0.51 | 0.36:0.71 | 0.44 | 0.28:0.69 | 0.4 | 0.20:0.82 | G | 24.9 | 39.5 | 179 | 147 |
| hCV8921255 | 1 + 2 + 3 | age_ge75 = 0 | source | 0.00215 | 0.00254 | 0.00229 | 0.1109 | 0.72 | 0.59:0.89 | 0.65 | 0.50:0.86 | 0.7 | 0.45:1.09 | G | 28.0 | 35.0 | 425 | 407 |
| hCV8921255 | 1 | ALL | NONE | 0.0001 | 0.00013 | 0.00027 | 0.0179 | 0.65 | 0.52:0.81 | 0.58 | 0.44:0.78 | 0.56 | 0.35:0.91 | G | 26.7 | 36.1 | 391 | 355 |
| hCV8921255 | 1 + 2 + 3 | ALL | source | 0.00308 | 0.00321 | 0.00322 | 0.11558 | 0.82 | 0.71:0.93 | 0.77 | 0.64:0.92 | 0.79 | 0.59:1.06 | G | 29.2 | 33.6 | 936 | 1102 |
| hCV8921255 | 1 | male = 0 | NONE | 0.00017 | 0.00021 | 0.00031 | 0.0299 | 0.59 | 0.44:0.78 | 0.51 | 0.35:0.74 | 0.51 | 0.27:0.94 | G | 25.5 | 36.8 | 251 | 220 |
| hCV8921255 | 1 + 2 + 3 | male = 0 | source | 0.00079 | 0.00074 | 0.00067 | 0.08626 | 0.75 | 0.64:0.89 | 0.69 | 0.55:0.85 | 0.72 | 0.50:1.05 | G | 28.3 | 34.3 | 623 | 740 |
| hCV8984582 | 1 | male = 0 | apoe4, age_ge75 | 0.02187 | 0.01962 | 0.03738 | 0.09869 | 0.72 | 0.55:0.95 | 0.65 | 0.43:0.98 | 0.63 | 0.36:1.08 | C | 36.9 | 42.3 | 263 | 235 |
| hCV8984582 | 1 + 2 | male = 0 | source, apoe4, age_ge75 | 0.01039 | 0.00934 | 0.01992 | 0.06651 | 0.74 | 0.59:0.93 | 0.67 | 0.48:0.94 | 0.66 | 0.42:1.03 | C | 37.0 | 42.4 | 354 | 486 |
| hCV9605432 | 3 | apoe4 = 0 | male, age_ge75 | 0.01679 | 0.02303 | 0.03386 | 0.13648 | 0.64 | 0.44:0.92 | 0.62 | 0.40:0.96 | 0.48 | 0.18:1.30 | G | 16.0 | 22.7 | 141 | 300 |
| hCV9605432 | 1 + 2 + 3 | apoe4 = 0 | source, male, age_ge75 | 0.00828 | 0.01126 | 0.01013 | 0.222 | 0.74 | 0.59:0.93 | 0.71 | 0.54:0.92 | 0.7 | 0.40:1.24 | G | 17.8 | 23.4 | 371 | 872 |
| hCV9605432 | 3 | male = 0 | NONE | 0.09568 | 0.09517 | 0.34933 | 0.01456 | 0.79 | 0.59:1.04 | 0.85 | 0.61:1.19 | 0.35 | 0.15:0.84 | G | 19.7 | 23.7 | 282 | 295 |
| hCV9605432 | 1 + 2 + 3 | male = 0 | source | 0.03261 | 0.03387 | 0.17851 | 0.00704 | 0.82 | 0.68:0.98 | 0.86 | 0.69:1.07 | 0.49 | 0.29:0.83 | G | 20.5 | 24.1 | 631 | 766 |
| hCV97656 | 1 | age_ge75 = 1 | apoe4, male | 0.00003 | 0.00006 | 0.00077 | 0.00055 | 2.55 | 1.63:3.97 | 2.29 | 1.41:3.73 | | . :. | T | 17.0 | 7.8 | 227 | 217 |
| hCV97656 | 1 + 2 + 3 | age_ge75 = 1 | source, apoe4, male | 0.00072 | 0.00093 | 0.00514 | 0.00389 | 1.6 | 1.22:2.10 | 1.53 | 1.14:2.07 | 5.17 | 1.64:16.33 | T | 14.0 | 10.2 | 520 | 728 |
| hCV97656 | 1 | ALL | apoe4, male, age_ge75 | 0.00129 | 0.00189 | 0.0046 | 0.03516 | 1.71 | 1.23:2.38 | 1.7 | 1.18:2.45 | 2.88 | 0.98:8.42 | T | 15.0 | 10.1 | 417 | 375 |
| hCV97656 | 1 + 2 + 3 | ALL | source, apoe4, male, | 0.00133 | 0.00158 | 0.00268 | 0.087 | 1.41 | 1.14:1.74 | 1.43 | 1.13:1.80 | 1.88 | 0.90:3.94 | T | 13.3 | 10.9 | 963 | 1157 |
| | | | age_ge75 | | | | | | | | | | | | | | | |
| hDV68530963 | 1 | age_ge75 = 0 | NONE | 0.17086 | 0.18466 | 0.96827 | 0.00487 | 1.27 | 0.90:1.77 | 1.01 | 0.65:1.56 | 3.11 | 1.37:7.07 | C | 32.9 | 27.9 | 178 | 147 |
| hDV68530963 | 1 + 2 + 3 | age_ge75 = 0 | source | 0.45874 | 0.46274 | 0.57878 | 0.00744 | 1.08 | 0.88:1.34 | 0.93 | 0.70:1.22 | 2 | 1.20:3.33 | C | 29.7 | 27.9 | 424 | 407 |
| hDV68530976 | 3 | age_ge75 = 1 | NONE | 0.43071 | 0.43582 | 0.93346 | 0.01222 | 0.87 | 0.63:1.22 | 1.02 | 0.69:1.50 | 0.23 | 0.06:0.80 | G | 17.1 | 19.1 | 222 | 246 |
| hDV68530976 | 1 + 2 + 3 | age_ge75 = 1 | source | 0.88484 | 0.88733 | 0.21965 | 0.00743 | 1.02 | 0.81:1.27 | 1.18 | 0.91:1.53 | 0.37 | 0.17:0.79 | G | 16.8 | 16.4 | 496 | 694 |
| hDV68531036 | 1 | age_ge75 = 0 | NONE | 0.13615 | 0.15079 | 0.82263 | 0.00586 | 1.3 | 0.92:1.82 | 1.05 | 0.68:1.63 | 3.04 | 1.34:6.92 | G | 32.9 | 27.4 | 178 | 144 |
| hDV68531036 | 1 + 2 + 3 | age_ge75 = 0 | source | 0.3983 | 0.40326 | 0.68354 | 0.00818 | 1.1 | 0.89:1.36 | 0.94 | 0.72:1.24 | 1.98 | 1.19:3.31 | G | 29.8 | 27.7 | 423 | 404 |

What is claimed is:

1. A method for identifying an individual who has an altered risk for developing Alzheimer's disease, comprising detecting a single nucleotide polymorphism (SNP) in any one of the nucleotide sequences of SEQ ID NOS:1-433 and 867-54,769 in said individual's nucleic acids, wherein the presence of the SNP is correlated with an altered risk for Alzheimer's disease in said individual.

2. The method of claim 1 in which the altered risk is an increased risk.

3. The method of claim 2 in which said individual has Alzheimer's disease.

4. The method of claim 1 in which the altered risk is a decreased risk.

5. The method of claim 1, wherein the SNP is selected from the group consisting of the SNPs set forth in Tables 6 and 7.

6. The method of claim 1 in which detection is carried out by a process selected from the group consisting of: allele-specific probe hybridization, allele-specific primer extension, allele-specific amplification, sequencing, 5′ nuclease digestion, molecular beacon assay, oligonucleotide ligation assay, size analysis, and single-stranded conformation polymorphism.

7. An isolated nucleic acid molecule comprising at least 8 contiguous nucleotides wherein one of the nucleotides is a single nucleotide polymorphism (SNP) selected from any one of the nucleotide sequences in SEQ ID NOS:1-433 and 867-54,769, or a complement thereof.

8. The isolated nucleic acid molecule of claim 7, wherein the SNP is selected from the group consisting of the SNPs set forth in Tables 3 and 4.

9. An isolated nucleic acid molecule that encodes any one of the amino acid sequences in SEQ ID NOS:434-866.

10. An isolated polypeptide comprising an amino acid sequence selected from the group consisting of SEQ ID NOS:434-866.

11. An antibody that specifically binds to a polypeptide of claim 10, or an antigen-binding fragment thereof.

12. The antibody of claim 11 in which the antibody is a monoclonal antibody.

13. An amplified polynucleotide containing a single nucleotide polymorphism (SNP) selected from any one of the nucleotide sequences of SEQ ID NOS:1-433 and 867-54,769, or a complement thereof, wherein the amplified polynucleotide is between about 16 and about 1,000 nucleotides in length.

14. The amplified polynucleotide of claim 13 in which the nucleotide sequence comprises any one of the nucleotide sequences of SEQ ID NOS:1-433 and 867-54,769.

15. An isolated polynucleotide which specifically hybridizes to a nucleic acid molecule containing a single nucleotide polymorphism (SNP) in any one of the nucleotide sequences in SEQ ID NOS: 1-433 and 867-54,769.

16. The polynucleotide of claim 15 which is 8-70 nucleotides in length.

17. The polynucleotide of claim 15 which is an allele-specific probe.

18. The polynucleotide of claim 15 which is an allele-specific primer.

19. The polynucleotide of claim 15, wherein the polynucleotide comprises a nucleotide sequence selected from the group consisting of the primer sequences set forth in Table 5 (SEQ ID NOS:54,770-55,342).

20. A kit for detecting a single nucleotide polymorphism (SNP) in a nucleic acid, comprising the polynucleotide of claim 15, a buffer, and an enzyme.

21. A method of detecting a single nucleotide polymorphism (SNP) in a nucleic acid molecule, comprising contacting a test sample with a reagent which specifically hybridizes to a SNP in any one of the nucleotide sequences of SEQ ID NOS:1-433 and 867-54,769 under stringent hybridization conditions, and detecting the formation of a hybridized duplex.

22. The method of claim 21 in which detection is carried out by a process selected from the group consisting of: allele-specific probe hybridization, allele-specific primer extension, allele-specific amplification, sequencing, 5′ nuclease digestion, molecular beacon assay, oligonucleotide ligation assay, size analysis, and single-stranded conformation polymorphism.

23. A method of detecting a variant polypeptide, comprising contacting a reagent with a variant polypeptide encoded by a single nucleotide polymorphism (SNP) in any one of the nucleotide sequences of SEQ ID NOS:1-433 and 867-54,769 in a test sample, and detecting the binding of the reagent to the polypeptide.

24. A method for identifying an agent useful in therapeutically or prophylactically treating Alzheimer's disease, comprising contacting the polypeptide of claim 10 with a candidate agent under conditions suitable to allow formation of a binding complex between the polypeptide and the candidate agent, and detecting the formation of the binding complex, wherein the presence of the complex identifies said agent.

25. A method for treating neurodegenerative disease in a human subject, which method comprises administering to said human subject a therapeutically or prophylactically effective amount of an agent which inhibits the activity of glyceraldehyde-3-phosphate dehydrogenase.

26. A method for treating neurodegenerative disease in a human subject wherein said human subject harbors a mutant glyceraldehyde-3-phosphate dehydrogenase (GAPDH) gene, which method comprises administering to said human subject a therapeutically or prophylactically effective amount of an agent counteracting the neurodegenerative effects of the disease.

27. The method of claim 26 in which the agent is neuroprotective.

28. The method of claim 27 in which the agent is anti-apoptotic.

29. The method of claim 28 in which the agent inhibits the activity of GAPDH.

30. The method of claim 29 in which the agent inhibits the activity of GAPDH by forming a binding complex with GAPDH.

31. The method of claim 30 in which the disease is selected from adrenoleukodystrophy, Alexander Disease, Alzheimer's disease, amyotrophic lateral sclerosis, Canavan Disease, cerebellar degeneration, cerebral ischemias, glaucoma, Krabbe Disease, metachromatic leukodystrophy, multiple sclerosis, neuronal ceroid lipofuscinoses, Parkinson's disease, Pelizaeus-Merzbacher Disease, retinitis pigmentosa, stroke, neurodegenerative disease caused by traumatic injury.

32. The method of claim 29 in which the mutant GAPDH gene comprises a polynucleotide sequence selected from the group consisting of the genomic sequence of SEQ ID NO:6795, the transcript sequences of SEQ ID NOS:125-127, and nucleic acid sequences that encode a polypeptide comprising an amino acid sequence of SEQ ID NOS:558-560.

33. The method of claim 25 in which the agent is selected from (R)-N-methyl-N-(1-methyl-2-phenyl-ethyl)-N-prop-2-ynylamine, dibenzo[bf]oxepin-10-ylmethyl-methyl-prop-2-ynyl-amine and (R)-indan-1-yl-prop-2-ynyl-amine.

34. A method for identifying an agent useful in therapeutically or prophylactically treating neurodegenerative disease in a human subject wherein said human subject harbors a mutant glyceraldehyde-3-phosphate dehydrogenase (GAPDH) gene, which method comprises contacting GAPDH with a candidate agent under conditions suitable to allow formation of a binding complex between the GAPDH and the candidate agent and detecting the formation of the binding complex, wherein the presence of the complex identifies said agent.

35. A method for treating neurodegenerative disease in a human subject wherein said human subject harbors a mutant glyceraldehydes-3-phosphate dehydrogenase (GAPDH) gene, which method comprises:
(i) determining that said human subject harbors the mutant GAPDH gene; and
(ii) administering to said subject a therapeutically or prophylactically effective amount of one or more agents counteracting the neurodegenerative effects of the disease.

The application's sequence listing, which the Patent Office published only in electronic form, follows.

SEQUENCE LISTING (55342 sequences)

SEQ ID NO: 1 - DNA, 3436 bp, Homo sapiens
ctcttagttgaaatgtcactgacagcttgcggtttggactttttttttttttttttttttttaactccagtcagaaacaactagaagccattaaacaactacaggaagatgctgtcaaccaggaaggcatccttaggaagagsctccaaraaaccagccaacggctggaggatgtggaggagcaggtagggtggctcatggctacattagattcaggggacatctcctcagatgccctgcaaaccatgaaataaaaatggaggaggaacaacaacaacaaacaaaaaaaaaaagcaaagaggaactgcaagttcagtccctagcgactaacagtgagcagaggaagtaaagggggagttgtaagagaggcggtatcaacagcctgctgatgaaagaggcgactctgcagaaagaggcaacttgacatatcaggactttaaccgctgtagaaatagctcaggcataccaagcccatgcaaacacagaattgcagaagttcaggagaggcttatcacttccctgagaagaaaaacacattttcagttttgcctgcatcataagagtgagcactccattgctttctttcctggccacactgctacaatccagcactaactatccaygtccagggtaaggatcgagatcgagaagcccacactgccagtgaaaaagctacgtctttactgcataaattagaggaagyaatttcggaacaacggaaccttcaaactataaatactgaattatcgaacacttgccaggcacttcagcagaagacaaggaaactgaagaagctttttagatgaggaatttcctcactatgattccctgtcctgcgcagatgcaattcaacaacctcttcaagaaaaattgaagcagtgttgccacaaactatatggtggtcaagaagcaagaatacatcagacacccctgaccttgaaacatacgtgctggtacacacctctgctggatgccttatctctggatagttttacagcagttccaaccctggaatcaacacctttctcaggtgtagccaaccaaatccacactctgtgtgaaaggcccacatatggagaagtaaaggatggtgctttggatgtaaaaagacaachcaagtgcccaggccccacaagtggccccagcccaggaacraatctctcaggctgcatcaggatgaatgatgacccaagtatggaagagaatggtgttgaacgcgtgtgtcctgagagcctgctgcagtccagggaatattcctcactaccattacccagacacacttcatcgrcagacggtactataacttcaagtgatcctggattagaaattctgaatatggcttcttgtgaccttgacagaaactcgctctgtaagaaagaggaggatacaagatcagcttctcccacgayagaggcccaaggcayaagtccagctcatgataatattgcattccaagactctacgagtaaggataaaaccatattaaatctggaagccaaagaggaaccagaaacaatagaagaacataaaaaagaacatgcttcaggagactctgtggtttcccctcttcctgtaaccactgtgaaatcggttaacsttagacaaagtgagaacacttctgctaatgagaaggaggtggaggcagaatttctcagattatctttgggatttaagtgtgactggtttaccttggagaagagartgaagcttgaagagaggtcccgtgactkggcagaagaaaatttgaagaaagaaatcactaactstttaaaactattagagtctttaacacctctgtgtgaagatgacaaccaggcacaggaaatcattaagaagctggagaagagtataaagtttcttagccagtgtgcagcacgagtggccagtagggctgagatgttgggagccatcaatcaggaaagccgggttagtaaagcagttgaagtgatgattcagcacgtagaaaacttgaagaggatgtatgccaaagagcacgctgaattagaagaactgaaacaggttcttctgcagaatgaaaggtctttcaatcctcttgaagatgatgatgactgccaaattaaaaaacgttcagcttctctaaactccaagccatcttctctacgaagagtgactattgcctctttacccagaaatattggaaatgcaggaatggtggctgggatggaaaataatgatcgattcagtagaaggtcaagcagttggcgtattttggggtcaaagcagagtgaacaccgtccctcattacctcgatttattagcacctattcctgggcagatgctgaagaagaaaaatgtgaactaaaaactaaagatgactcagagccatctggagaagaaacagtagaaaggacaaggaagccaagtctttctgaaaagaaaaataatccatcaaagtgggatgtctcttcagtttatgacacaatagcttcctgggcaacaaatctcaagtcctccatcagaaaggctaataaggccctctggctctctattgcattcattgtactgtttgcagctttgatgagcttcctcacaggccaattattccagaagtctgtggatgccgctcccacacagcaagaggactcatggacgtctctagaacatatcttgtggccatttaccagactccgacacaatgggccaccaccagtgtgacagcaggacatcctaatatatggatcttgatttttaagtttcagtatctgaacttcgtaaattagtaacttttagctgggaaagtatagcatgaaaccagaggttctcagaatgactgtaagatagcttacatttcctctttttgcctttatctccccaactaaaatacaatggggaagaagtctgcctatgatctttgaatgagctttttaaggaagaaatattatatattgtttgttaaagtttattgaaataaagaatcatttaaatcttsatagagtgaaagctgaaattcttaacaggccaagtattcaaaggaaaaaaaaatactgtttttaaaataaaacttgagtagaaaatgcagattagaaaatttttaatagttgatttgaaatgtattcattcactcattacattgtgttgcagaaatacctgtctttcaccatgcttggttcttcatacttacaatacagtttgtaagtggaggttaggagtagctgagcaatctggtagagagcagcatgtggcacacagagttgacaaactgacagttggaactcctgactttctccattgcttcctcagaagcaaaatccttcaccatgtgatataaagtagaatgaaactcagtttcttctttaagtgcttcagaaaatgcctcactctcttccttgatcttcagtctttgtgctctgtcaccactaaacattaaaagggcccaattaggattctcagtacattcttcagtaaggkgttccct

SEQ ID NO: 2 - DNA, 3498 bp, Homo sapiens
ctcttagttgaaatgtcactgacagcttgcggtttggactttttttttttttttttttttttaactccagtcagaaacaactagaagccattaaacaactacaggaagatgctgtcaaccaggaaggcatccttaggaagagsctccaaraaaccagccaacggctggaggatgtggaggagcaggtagggtggctcatggctacattagattcaggggacatctcctcagatgccctgcaaaccatgaaataaaaatggaggaggaacaacaacaacaaacaaaaaaaaaaagcaaagaggaactgcaagttcagtccctagcgactaacagtgagcagaggaagtaaagggggagttgtaagagaggcggtatcaacagcctgctgatgaaagaggcgactctgcagaaagaggcaacttgacatatcaggactttaaccgctgtagaaatagctcaggcataccaagcccatgcaaacacagaattgcagaagttcaggagaggcttatcacttccctgagaagaaaaacacattttcagttttgcctgcatcataagagtgagcactccattgctttctttcctggccacactgctacaatccagcactaactatccaygtccagggtaaggatcgagatcgagaagcccacactgccagtgaaaaagctacgtctttactgcataaattagaggaagyaatttcggaacaacggaaccttcaaactataaatactgaattatcgaacacttgccaggcacttcagcagaagacaaggaaactgaagacaacaattgagtcacttcaaaaggagttcattgaaggggaacaccatggcttgctgtttcagagctttttagatgaggaatttcctcactatgattccctgtcctgcgcagatgcaattcaacaacctcttcaagaaaaattgaagcagtgttgccacaaactatatggtggtcaagaagcaagaatacatcagacacccctgaccttgaaacatacgtgctggtacacacctctgctggatgccttatctctggatagttttacagcagttccaaccctggaatcaacacctttctcaggtgtagccaaccaaatccacactctgtgtgaaaggcccacatatggagaagtaaaggatggtgctttggatgtaaaaagacaachcaagtgcccaggccccacaagtggccccagcccaggaacraatctctcaggctgcatcaggatgaatgatgacccaagtatggaagagaatggtgttgaacgcgtgtgtcctgagagcctgctgcagtccagggaatattcctcactaccattacccagacacacttcatcgrcagacggtactataacttcaagtgatcctggattagaaattctgaatatggcttcttgtgaccttgacagaaactcgctctgtaagaaagaggaggatacaagatcagcttctcccacgayagaggcccaaggcayaagtccagctcatgataatattgcattccaagactctacgagtaaggataaaaccatattaaatctggaagccaaagaggaaccagaaacaatagaagaacataaaaaagaacatgcttcaggagactctgtggtttcccctcttcctgtaaccactgtgaaatcggttaacsttagacaaagtgagaacacttctgctaatgagaaggaggtggaggcagaatttctcagattatctttgggatttaagtgtgactggtttaccttggagaagagartgaagcttgaagagaggtcccgtgactkggcagaagaaaatttgaagaaagaaatcactaactstttaaaactattagagtctttaacacctctgtgtgaagatgacaaccaggcacaggaaatcattaagaagctggagaagagtataaagtttcttagccagtgtgcagcacgagtggccagtagggctgagatgttgggagccatcaatcaggaaagccgggttagtaaagcagttgaagtgatgattcagcacgtagaaaacttgaagaggatgtatgccaaagagcacgctgaattagaagaactgaaacaggttcttctgcagaatgaaaggtctttcaatcctcttgaagatgatgatgactgccaaattaaaaaacgttcagcttctctaaactccaagccatcttctctacgaagagtgactattgcctctttacccagaaatattggaaatgcaggaatggtggctgggatggaaaataatgatcgattcagtagaaggtcaagcagttggcgtattttggggtcaaagcagagtgaacaccgtccctcattacctcgatttattagcacctattcctgggcagatgctgaagaagaaaaatgtgaactaaaaactaaagatgactcagagccatctggagaagaaacagtagaaaggacaaggaagccaagtctttctgaaaagaaaaataatccatcaaagtgggatgtctcttcagtttatgacacaatagcttcctgggcaacaaatctcaagtcctccatcagaaaggctaataaggccctctggctctctattgcattcattgtactgtttgcagctttgatgagcttcctcacaggccaattattccagaagtctgtggatgccgctcccacacagcaagaggactcatggacgtctctagaacatatcttgtggccatttaccagactccgacacaatgggccaccaccagtgtgacagcaggacatcctaatatatggatcttgatttttaagtttcagtatctgaacttcgtaaattagtaacttttagctgggaaagtatagcatgaaaccagaggttctcagaatgactgtaagatagcttacatttcctctttttgcctttatctccccaactaaaatacaatggggaagaagtctgcctatgatctttgaatgagctttttaaggaagaaatattatatattgtttgttaaagtttattgaaataaagaatcatttaaatcttsatagagtgaaagctgaaattcttaacaggccaagtattcaaaggaaaaaaaaatactgtttttaaaataaaacttgagtagaaaatgcagattagaaaatttttaatagttgatttgaaatgtattcattcactcattacattgtgttgcagaaatacctgtctttcaccatgcttggttcttcatacttacaatacagtttgtaagtggaggttaggagtagctgagcaatctggtagagagcagcatgtggcacacagagttgacaaactgacagttggaactcctgactttctccattgcttcctcagaagcaaaatccttcaccatgtgatataaagtagaatgaaactcagtttcttctttaagtgcttcagaaaatgcctcactctcttccttgatcttcagtctttgtgctctgtcaccactaaacattaaaagggcccaattaggattctcagtacattcttcagtaaggkgttccct

SEQ ID NO: 3 - DNA, 2900 bp, Homo sapiens
tagctcaggcataccaagcccatgcaaacacagaattgcagaagttcaggagaggcttatcacttccctgagaagaaaaacacattttcagttttgcctgcatcataagagtgagcactccattgctttctttcctggccacactgctacaatccagcactaactatccaygtccagggtaaggatcgagatcgagaagcccacactgccagtgaaaaagctacgtctttactgcataaattagaggaagyaatttcggaacaacggaaccttcaaactataaatactgaattatcgaacacttgccaggcacttcagcagaagacaaggaaactgaagacagtgttgccacaaactatatggtggtcaagaagcaagaatacatcagacacccctgaccttgaaacatacgtgctggtacacacctctgctggatgccttatctctggatagttttacagcagttccaaccctggaatcaacacctttctcaggtgtagccaaccaaatccacactctgtgtgaaaggcccacatatggagaagtaaaggatggtgctttggatgtaaaaagacaachcaagtgcccaggccccacaagtggccccagcccaggaacraatctctcaggctgcatcaggatgaatgatgacccaagtatggaagagaatggtgttgaacgcgtgtgtcctgagagcctgctgcagtccagggaatattcctcactaccattacccagacacacttcatcgrcagacggtactataacttcaagtgatcctggattagaaattctgaatatggcttcttgtgaccttgacagaaactcgctctgtaagaaagaggaggatacaagatcagcttctcccacgayagaggcccaaggcayaagtccagctcatgataatattgcattccaagactctacgagtaaggataaaaccatattaaatctggaagccaaagaggaaccagaaacaatagaagaacataaaaaagaacatgcttcaggagactctgtggtttcccctcttcctgtaaccactgtgaaatcggttaacsttagacaaagtgagaacacttctgctaatgagaaggaggtggaggcagaatttctcagattatctttgggatttaagtgtgactggtttaccttggagaagagartgaagcttgaagagaggtcccgtgactkggcagaagaaaatttgaagaaagaaatcactaactstttaaaactattagagtctttaacacctctgtgtgaagatgacaaccaggcacaggaaatcattaagaagctggagaagagtataaagtttcttagccagtgtgcagcacgagtggccagtagggctgagatgttgggagccatcaatcaggaaagccgggttagtaaagcagttgaagtgatgattcagcacgtagaaaacttgaagaggatgtatgccaaagagcacgctgaattagaagaactgaaacaggttcttctgcagaatgaaaggtctttcaatcctcttgaagatgatgatgactgccaaattaaaaaacgttcagcttctctaaactccaagccatcttctctacgaagagtgactattgcctctttacccagaaatattggaaatgcaggaatggtggctgggatggaaaataatgatcgattcagtagaaggtcaagcagttggcgtattttggggtcaaagcagagtgaacaccgtccctcattacctcgatttattagcacctattcctgggcagatgctgaagaagaaaaatgtgaactaaaaactaaagatgactcagagccatctggagaagaaacagtagaaaggacaaggaagccaagtctttctgaaaagaaaaataatccatcaaagtgggatgtctcttcagtttatgacacaatagcttcctgggcaacaaatctcaagtcctccatcagaaaggctaataaggccctctggctctctattgcattcattgtactgtttgcagctttgatgagcttcctcacaggccaattattccagaagtctgtggatgccgctcccacacagcaagaggactcatggacgtctctagaacatatcttgtggccatttaccagactccgacacaatgggccaccaccagtgtgacagcaggacatcctaatatatggatcttgatttttaagtttcagtatctgaacttcgtaaattagtaacttttagctgggaaagtatagcatgaaaccagaggttctcagaatgactgtaagatagcttacatttcctctttttgcctttatctccccaactaaaatacaatggggaagaagtctgcctatgatctttgaatgagctttttaaggaagaaatattatatattgtttgttaaagtttattgaaataaagaatcatttaaatcttsatagagtgaaagctgaaattcttaacaggccaagtattcaaaggaaaaaaaaatactgtttttaaaataaaacttgagtagaaaatgcagattagaaaatttttaatagttgatttgaaatgtattcattcactcattacattgtgttgcagaaatacctgtctttcaccatgcttggttcttcatacttacaatacagtttgtaagtggaggttaggagtagctgagcaatctggtagagagcagcatgtggcacacagagttgacaaactgacagttggaactcctgactttctccattgcttcctcagaagcaaaatccttcaccatgtgatataaagtagaatgaaactcagtttcttctttaagtgcttcagaaaatgcctcactctcttccttgatcttcagtctttgtgctctgtcaccactaaacattaaaagggcccaattaggattctcagtacattcttcagtaaggkgttccct

SEQ ID NO: 4 - DNA, 2417 bp, Homo sapiens
tatattggcagttattgagggtaaagcaatatattgtaacagaatgtataaatatttttgataaaacagtctatattttattaaaaaatgaattataacccattttcagttttgcctgcatcataagagtgagcactccattgctttctttcctggccacactgctacaatccagcactaactatccaygtccagggtaaggatcgagatcgagaagcccacactgccagtgaaaaagctacgtctttactgcataaattagaggaagyaatttcggaacaacggaaccttcaaactataaatactgaattatcgaacacttgccaggcacttcagcagaagacaaggaaactgaagaagctttttagatgaggaatttcctcactatgattccctgtcctgcgcagatgcaattcaacaacctcttcaagaaaaattgaagcagtgttgccacaaactatatggtggtcaagaagcaagaatacatcagacacccctgaccttgaaacatacgtgctggtacacacctctgctggatgccttatctctggatagttttacagcagttccaaccctggaatcaacacctttctcaggtgtagccaaccaaatccacactctgtgtgaaaggcccacatatggagaagtaaaggatggtgctttggatgtaaaaagacaachcaagtgcccaggccccacaagtggccccagcccaggaacraatctctcaggctgcatcaggatgaatgatgacccaagtatggaagagaatggtgttgaacgcgtgtgtcctgagagcctgctgcagtccaggggatattcctcactaccattacccagacacacttcatcgrcagacggtactataacttcaagtgatcctggattagaaattctgaatatggcttcttgtgaccttgacagaaactcgctctgtaagaaagaggaggatacaagatcagcttctcccacgayagaggcccaaggcayaagtccagctcatgataatattgcattccaagactctacgagtaaggataaaaccatattaaatctggaagccaaagaggaaccagaaacaatagaagaacataaaaaagaacatgcttcaggagactctgtggtttcccctcttcctgtaaccactgtgaaatcggttaacsttagacaaagtgagaacacttctgctaatgagaaggaggtggaggcagaatttctcagattatctttgggatttaagtgtgactggtttaccttggagaagagartgaagcttgaagagaggtcccgtgactkggcagaagaaaatttgaagaaagaaatcactaactstttaaaactattagagtctttaacacctctgtgtgaagatgacaaccaggcacaggaaatcattaagaagctggagaagagtataaagtttcttagccagtgtgcagcacgagtggccagtagggctgagatgttgggagccatcaatcaggaaagccgggttagtaaagcagttgaagtgatgattcagcacgtagaaaacttgaagaggatgtatgccaaagagcacgctgaattagaagaactgaaacaggttcttctgcagaatgaaaggtctttcaatcctcttgaagatgatgatgactgccaaattaaaaaacgttcagcttctctaaactccaagccatcttctctacgaagagtgactattgcctctttacccagaaatattggaaatgcaggaatggtggctgggatggaaaataatgatcgattcagtagaaggtcaagcagttggcgtattttggggtcaaagcagagtgaacaccgtccctcattacctcgatttattagcacctattcctgggcagatgctgaagaagaaaaatgtgaactaaaaactaaagatgactcagagccatctggagaagaaacagtagaaaggacaaggaagccaagtctttctgaaaagaaaaataatccatcaaagtgggatgtctcttcagtttatgacacaatagcttcctgggcaacaaatctcaagtcctccatcagaaaggctaataaggccctctggctctctattgcattcattgtactgtttgcagctttgatgagcttcctcacaggccaattattccagaagtctgtggatgccgctcccacacagcaagaggactcatggacgtctctagaacatatcttgtggccatttaccagactccgacacaatgggccaccaccagtgtgacagcaggacatcctaatatatggatcttgatttttaagtttcagtatctgaacttcgtaaattagtaacttttagctgggaaagtatagcatgaaaccagaggttctcagaatgaccgtaagatagcttacatttcctctttttgcctttatctccccaactaaaatacaatggg

SEQ ID NO: 5 - DNA, 8305 bp, Homo sapiens
cacaggttcctaatgtgagaggctagacccagatcatggaggtgcttcagtgtgatggctgtgatttccgagccccgtcttatgaagatctcaaggcacacattcaggatgtccacacggcatttctgcagccaactgatgttgctgaggacaatgtgaatgagctacgatgtgggtccgtgaatgccagtaatcagacagaggtggagttttcttctataaaggatgaatttgccattgcagaagatttatcaggtcaaaatgcaacttcattggggaccggaggttactatggccacagtccaggatattatggtcagcatattgccgctaatcccaaaccaacaaacaagttttttcaatgcaagttctgtgtacgctacttcaggtcaaaaaacctcctcatagaacacactagaaaggtccatggagctcaagctgaagggagttcatcaggaccccctgtcccgggatccttaaattataatatcatgatgcacgagggatttggaaaggtcttctcttgccagttttgcacatacaagtcaccaagaagggcaagaataattaagcatcagaagatgtatcacaaaaacaatttgaaggagaccactgctcccccacctgctcctgctccaatgccagaccctgtggttccrcccgtatcactgcaggacccctgcaaggaactgccagcagaggttgtggagcgcagcatcttagagtctatggtcaagcctttgaccaaatctcgaggcaacttttgttgtgagtggtgcagctaccagaccccccgccgagamcgctggtgtgaccacatgatgaagaaacaccgcagtatggtcaagatcctttccagtctcagacagcaacaagaaggaactaatctacctgatgtgccgaacaagagtgcccccagccccacttccaactccacctatctgaccatgaatgctgcaagccgggagatacccaatactaccgtctccaacttcaggggctccatgggcaactccatcatgagacccaattcttcagcttccaagttttcgcccatgtcttaccctcagatgaagccgaagtcacctcacaattctggtctagttaacttgacagagagatcccgttayggaatgactgacatgaccaattcttctgctgacctggaaactaacagcatgctaaatgactctagttctgatgaagagttaaatgaaatagacagtgagaatggtttaagtgctrtggatcaccagacatcaggcctgtctgcagagcagctgatgggctcagatggcaacaaattattggagaccaaggggattccatttagaagattcatgaataggttccagtgccccttttgtcctttcctcaccatgcatcgacgtagcatctctcgtcacatagaaaacatccacttatctggaaagacagctgtctacaaatgtgacgaatgtccgtttacttgcaagagctcrttgaaacttggggctcacaaacagtgtcacacgggtacaacgtcagattgggatgctgtgaattcccagagtgaaagcatttcttcctcactgaatgaaggtgtggtgtcttatgagagctcaagcatcaatgccaccaccaacgcagcagccacagccacccacacaagccgcacctctgcacccatacaaatgcaccatgtgtaattactccaccacaactctgaaagggctaagagtccatcagcagcataaacattcattctgtgacaacttgccaaaattcgaggggcagccctcaagcctaccattggaaaatgagacagacagccacccctcttccagcaacactgtgaagaaaagtcagacctcaattcttgggttgtcctccaagaacaattttgtagctaaagcctctaggaagctcgccaatgactttcctctagatttgtcacccgtgaagaagagaaccaggattgacgagatagcaagcaaccttcagagcaaaattaaccaaaccaaacagcaggaagatgcagtgatcaatgttgaggatgatgaagaggaagaggaagacaacgaagtcgagatagaggttgagttggacagggaggaagaaccgacagaacccatcatagaggttcccacttccttttctgcscaacagatatgggtaagagataccagtgagccccagaaagagcccaacttcagaaacatcacccacgattayaatgccaccaatggggctgagattgagctcaccctttctgaagatgaagaggattattatggctcctcaacaaacttgaaagatcaccaagtttccaatactgctctgctgaatacccaaactcccatctatgggactgagcacaatagtgaaaacacagactttggtgactctggaaggctttactattgtaaacactgtgactttaacaacaaatctgcccggagtgttagcacccactaccaacgaatgcacccatacattaaattcagctttaggtacatcttggaccccaatgatcacagtgcagtgtacaggtgcctggaatgctacatcgattacaccaacttcgaagatctccagcagcattatggcgagcaccacccagaagccatgaatgtactcaactttgatcactcggacctgatctaccggtgtcggttttgttcatacacgagcccgaatgttagaagcctgatgccacattaccaaagaatgcatcccacggtgaagatcaacaacgcgatgatattttcaagctatgtcgtggagcagcaggaagggctgaatacagaatcccagaccctgagggagattctgaattcggctcccaagaacatggcgacttccacacctgtggctcgtggtggtggtttgccagctacgttcaacaaaaacactcctaagacctttactcctgaatgtgaaaatcagaaggaccctttggtcaacactgttgttgtttatgattgtgatgtttgttcgtttgcaagccccaacatgcattctgtcttggttcattatcagaagaaacaccccgaagaaaaggcttcctactttaggatccagaaaactatgcgaatggtgtctgtggacaggggctctgccctttctcaattatcatttgaggtgggtgctccaatgtctcccaaaatgtccaacatgggttccccaccccccccacaacccccgccaccagacctcagtactgagctttactactgcaaacactgttcctacagcaatcggtcagttgtgggagtgcttgtccactaccagaaaagacacccagaaataaaggttactgccaaatatatcagacaggctcctcccacagctgcaatgatgagaggggtcgaagggccccaaggctccccccggccacccgcccccatacaacagctgaaccgaagcagctctgagagagatggccctyctgtggagaatgagatgttcttttgccagcactgtgattatgggaaccggacggtcaaaggggtactcattcattatcagaagaagcaccgagacttcaaggccaaygcagatgtgatccggcagcatacggccaccattcgaagcctctgcgaccgaaatcagaagaagcctgccagctgcgtgcttgtctccccctctaatctggagcgggacaaaacgaaactccgagcactcaaatgtaggcagtgctcatatacctccccctacttctatgcactgaggaagcatatcaagaaagaccaccccgccctgaaagccacagtcacgtccatcatgcgatgggcatttctagatggcttgatagaagctggctaccactgcgagtggtgcatctactcccatacggagcccaacggtttgctcctgcattaccaacggaggcatccagaacactatgttgattacacctacatggctactaaactgtgggctgggccagacccatcccctccctctctcacaatgccagccgaagccaaaacctacagatgcagggactgtgttttcgaagctgtttccatctgggacatcactaatcactaccaagcattccacccctgggccatgaatggtgatgagtcagtgctactggacatcatcaaggagaaagatgctgtggagaagcccattctttcatccgaagagttggcaggccctgtgaattgtgaaaacagtatacccacccctttcccggagcaggaagctgaatgtccagaggatgcaagactgtcccctgagaaaagcctgcagctagcttcagccaaccccgccatatcctccaccccataccagtgcacggtatgccaatctgagtataacaacttgcacggccttctcactcattatgggaagaagcaccctggcatgaaagtgaaggctgctgactttgcccaggacattgacatcaacccaggtgccgtctacaaatgcaggcattgcccatacatcaacacccgcatccacggcgtactgacccactaccagaagcgacacccgtccatcaaggtgaccgctgaggactttgtgcacgacgtagagcagtctgctgacatatcccagaatgacgtggaggagacgagcaggatcttcaagcaagggtatggcgcctaccggtgcaaactgtgtccgtacacacacggcactttggagaaactaaaaatccactacgagaagtatcacaatcagcctgaatttgatgtcttttcccagtcgcccccgaagctgccagtccccctcgagccygagatgaccactgaagtgagcccttcccaagtctccatcactgaggaggaggtgggagaggagcccgtgtccacttctcacttctctacctcccacctggtctcccacactgtgttccggtgccagctctgcaagtacttctgctccacgaggaaggggatcgccaggcactaccgcatcaagcacaataatgtccgagcccagccagaaggcaagaacaacctcttcaagtgtgccctgtgtgcctacaccaaccccatccgcaaaggtctggcagcccactaccagaagcgccacgacattgatgcgtattacactcactgcttggcagcctccaggaccatcagcgayaagcccaacaaagtgatcatcccatccccgcccaaggacgactcccctcagctgagcgaggaactccggcgggcagtggagaagaaaaagtgctccttgtgctctttccagtcgttcagcaagaagggcatcgtgtcccattacatgaaacgccacccaggggtgttcccaaagaagcagcacgccagcaagttggggggctacttcacggccgtctatgcagatgagcatgagaagcccacactgatggaagaagaggagagaggcarctttgagaaagccgaggtggagggtgaagctcaggaaatcgagtggctcccattccgctgcatcaaatgcttcaagctgtcctttagcactgcagagctgctgtgcatgcattacactgaccaccacagtcgggacctaaagagggacttcatcattctgggcaacggcccccgcttgcagaactccacctaccagtgtaagcactgtgatagcaaactgcaaagcacagccgagctgacctcacacttgaacattcacaatgaggaattccagaagcgtgccaaacgtcaggagaggaggaaacagcttttgagcaagcagaaatatgcagatggtgcttttgcagatttcaaacaagagaggccttttggtcacttagaagaggtgccaaagatcaaggagaggaaagtggtgggctacaaatgtaaattctgtgtggaagtgcacccaacgctccgagccatctgcaatcacctccgaaagcacgtccagtatggcaatgtcccagctgtgtcagctgctgtgaagcaggaggcggatgaccctgcccacttgttcctggatggattggaagcagccaaagacgccagtggcgccctggtgggccgggtggatggtgaacactgcttgcttgatggaatgttggaggatgaaacccggccggggggataccattgcagtcaatgtgacagagtcctgatgtccatgcaggggctgcgttctcatgagaggagccacctggccctggccatgtttacccgcgaggacaagtacagctgccagtattgctcgtttgtttctgctttcaggcacaatttggatcgccatatgcaaacccaccacggacaccataaaccattccgatgcaaactctgctccttcaagtcctcctataacagccggctgaaaacacatatactcaaagctcatgctggtgagcatgcctacaagtgttcttggtgctcattctccaccatgacaatcagccagctgaaggaacactccctcaaggtccacggaaaagccctgaccctccccaggccacggatcgtcagtctcctctcctcacactcccaccactcctcccaaaaagctaccccggctgaagaagtggaagactccaatgactcatcatattcagagcccccagatgttcagcagcagttgaaccactatcagtcagctgccctggcaaggaacaacagccgtgttagccctgtgcctctttctggggctgctgctggcactgagcagaaaactgaagccgtgcttcactgcgaattctgtgaattctcctccggctacatccagagcatcaggcgtcattaccgggacaagcatggtgggaagaagcttttcaagtgcaaagactgctccttttacacaggctttaaatctgcttttactatgcacgtggaagctgggcactcagcagttcccgaggagggccccaaagatcttcgctgtcctctctgcctctatcacaccaaatacaagcgcaacatgattgaccacatcgtgctgcaccgagaagagcgtgttgtccccattgaagtttgccggtccaaactgtccaaatacttgcagggagtagttttccgctgtgataagtgtaccttcacctgctccagtgatgagagcctccagcaacatatagaaaagcacaatgaactgaaaccttacaaatgccagctctgctactatgagaccaagcacacggaggaactggacagccaccttcgggatgagcataaggtaagccgtaactttgagctggttggacgggttaacttggatcagctggaacagatgaaggagaaaatggagagctccagcagcgatgatgaggacaaggaagaagaaatgaacagcaaggctgaagacagagagctgatgagattttctgaccacggggctgctcttaacactgagaagcgttttccatgtgaattttgtggacgggcgttttcacagggctctgagtgggaaagacatgtgctgagacacggcatggcattgaatgacaccaagcaggtgagcagagaagaaatccwcccaaaagagatcatggagaacagtgttaaaatgccctccatagaggaaaaggaagatgacgaggccattgggatagacttttccctaaagaatgaaacagtagccatctgtgtagtaactgccgacaaatctctcctggagaatgcagaggccaaaaaagaatgagcgtttggtgaaattcttaatcaaaccttacttgaacagtgatgaaaaagtgggagggctggcttgggctgagaagggagggacagaaaagagaagacagaacaaagctgctttttaggactgaacaatctattttcaaagcactggtacctgtgtgagtgagtatgtaaattaaagttatttaaatggttggaatatgtggctccttttccatcactacatcttttcttccggatcttcatcatggaagtttcatttgttgcggaatatggaagcacctcccaatggtacggtgcaccctgtggtggtcttggacagtatgtggaaacagaagctccatgacggtagaagacttctcattggggagcaactttttgacgcacaacttttggtgcgtttttctagttttaataccttaagctttttcaagacctaactgcagccgctttgggaaaaaaaaacaaaaaacaaaaaacagaaaacaaaaaaaaaaaaactgctttgcataaaacagtcacctgtttcctagtacctcaaacttaaccaagggaactctctgcatttgtcagtactacctgtcgtcgttgtggttaaatgtagagagaactgctgggcaagatggtgaatggagaaaaaaaaagagttttaaagaaaggaacacaaattgtgcttaaaatccccatgtgggttttatttcttaaaatactgtgatttttttaattattttagt

SEQ ID NO: 6 - DNA, 8302 bp, Homo sapiens
cacaggttcctaatgtgagaggctagacccagatcatggaggtgcttcagtgtgatggctgtgatttccgagccccgtcttatgaagatctcaaggcacacattcaggatgtccacacggcatttctgcagccaactgatgttgctgaggacaatgtgaatgagctacgatgtgggtccgtgaatgccagtaatcagacagaggtggagttttcttctataaaggatgaatttgccattgcagaagatttatcaggtcaaaatgcaacttcattggggaccggaggttactatggccacagtccaggatattatggtcagcatattgccgctaatcccaaaccaacaaacaagttttttcaatgcaagttctgtgtacgctacttcaggtcaaaaaacctcctcatagaacacactagaaaggtccatggagctcaagctgaagggagttcatcaggaccccctgtcccgggatccttaaattataatatcatgatgcacgagggatttggaaaggtcttctcttgccagttttgcacatacaagtcaccaagaagggcaagaataattaagcatcagaagatgtatcacaaaaacaatttgaaggagaccactgctcccccacctgctcctgctccaatgccagaccctgtggttccrcccgtatcactgcaggacccctgcaaggaactgccagcagaggttgtggagcgcagcatcttagagtctatggtcaagcctttgaccaaatctcgaggcaacttttgttgtgagtggtgcagctaccagaccccccgccgagamcgctggtgtgaccacatgatgaagaaacaccgcagtatggtcaagatcctttccagtctcagacagcaacaagaaggaactaatctacctgatgtgccgaacaagagtgcccccagccccacttccaactccacctatctgaccatgaatgctgcaagccgggagatacccaatactaccgtctccaacttcaggggctccatgggcaactccatcatgagacccaattcttcagcttccaagttttcgcccatgtcttaccctcagatgaagccgaagtcacctcacaattctggtctagttaacttgacagagagatcccgttayggaatgactgacatgaccaattcttctgctgacctggaaactaacagcatgctaaatgactctagttctgatgaagagttaaatgaaatagacagtgagaatggtttaagtgctrtggatcaccagacatcaggcctgtctgcagagcagctgatgggctcagatggcaacaaattattggagaccaaggggattccatttagaagattcatgaataggttccagtgccccttttgtcctttcctcaccatgcatcgacgtagcatctctcgtcacatagaaaacatccacttatctggaaagacagctgtctacaaatgtgacgaatgtccgtttacttgcaagagctcrttgaaacttggggctcacaaacagtgtcacacgggtacaacgtcagattgggatgctgtgaattcccagagtgaaagcatttcttcctcactgaatgaaggtgtggtgtcttatgagagctcaagcatcaatgccaccaccaacgcagcagccacagccacccacacaagccgcacctctgcacccatacaaatgcaccatgtgtaattactccaccacaactctgaaagggctaagagtccatcagcagcataaacattcattctgtgacaacttgccaaaattcgaggggcagccctcaagcctaccattggaaaatgagacagacagccacccctcttccagcaacactgtgaagaaaagtcagacctcaattcttgggttgtcctccaagaacaattttgtagctaaagcctctaggaagctcgccaatgactttcctctagatttgtcacccgtgaagaagagaaccaggattgacgagatagcaagcaaccttcagagcaaaattaaccaaaccaaacagcaggaagatgcagtgatcaatgttgaggatgatgaagaggaagaggaagacaacgaagtcgagatagaggttgagttggacagggaggaagaaccgacagaacccatcatagaggttcccacttccttttctgcscaacagatatgggtaagagataccagtgagccccagaaagagcccaacttcagaaacatcacccacgattayaatgccaccaatggggctgagattgagctcaccctttctgaagatgaagaggattattatggctcctcaacaaacttgaaagatcaccaagtttccaatactgctctgctgaatacccaaactcccatctatgggactgagcacaatagtgaaaacacagactttggtgactctggaaggctttactattgtaaacactgtgactttaacaacaaatctgcccggagtgttagcacccactaccaacgaatgcacccatacattaaattcagctttaggtacatcttggaccccaatgatcacagtgcagtgtacaggtgcctggaatgctacatcgattacaccaacttcgaagatctccagcagcattatggcgagcaccacccagaagccatgaatgtactcaactttgatcactcggacctgatctaccggtgtcggttttgttcatacacgagcccgaatgttagaagcctgatgccacattaccaaagaatgcatcccacggtgaagatcaacaacgcgatgatattttcaagctatgtcgtggagcagcaggaagggctgaatacagaatcccagaccctgagggagattctgaattcggctcccaagaacatggcgacttccacacctgtggctcgtggtggtggtttgccagctacgttcaacaaaaacactcctaagacctttactcctgaatgtgaaaatcagaaggaccctttggtcaacactgttgttgtttatgattgtgatgtttgttcgtttgcaagccccaacatgcattctgtcttggttcattatcagaagaaacaccccgaagaaaaggcttcctactttaggatccagaaaactatgcgaatggtgtctgtggacaggggctctgccctttctcaattatcatttgaggtgggtgctccaatgtctcccaaaatgtccaacatgggttccccaccccccccacaacccccgccaccagacctcagtactgagctttactactgcaaacactgttcctacagcaatcggtcagttgtgggagtgcttgtccactaccagaaaagacacccagaaataaaggttactgccaaatatatcagacaggctcctcccacagctgcaatgatgagaggggtcgaagggccccaaggctccccccggccacccgcccccatacaacagctgaaccgaagcagctctgagagagatggccctyctgtggagaatgagatgttcttttgccagcactgtgattatgggaaccggacggtcaaaggggtactcattcattatcagaagaagcaccgagacttcaaggccaaygcagatgtgatccggcagcatacggccaccattcgaagcctctgcgaccgaaatcagaagaagcctgccagctgcgtgcttgtctccccctctaatctggagcgggacaaaacgaaactccgagcactcaaatgtaggcagtgctcatatacctccccctacttctatgcactgaggaagcatatcaagaaagaccaccccgccctgaaagccacagtcacgtccatcatgcgatgggcatttctagatggcttgatagaagctggctaccactgcgagtggtgcatctactcccatacggagcccaacggtttgctcctgcattaccaacggaggcatccagaacactatgttgattacacctacatggctactaaactgtgggctgggccagacccatcccctccctctctcacaatgccagccgaagccaaaacctacagatgcagggactgtgttttcgaagctgtttccatctgggacatcactaatcactaccaagcattccacccctgggccatgaatggtgatgagtcagtgctactggacatcatcaaggagaaagatgctgtggagaagcccattctttcatccgaagagttggcaggccctgtgaattgtgaaaacagtatacccacccctttcccggagcaggaagctgaatgtccagaggatgcaagactgtcccctgagaaaagcctgcagctagcttcagccaaccccgccatatcctccaccccataccagtgcacggtatgccaatctgagtataacaacttgcacggccttctcactcattatgggaagaagcaccctggcatgaaagtgaaggctgctgactttgcccaggacattgacatcaacccaggtgccgtctacaaatgcaggcattgcccatacatcaacacccgcatccacggcgtactgacccactaccagaagcgacacccgtccatcaaggtgaccgctgaggactttgtgcacgacgtagagcagtctgctgacatatcccagaatgacgtggaggagacgagcaggatcttcaagcaagggtatggcgcctaccggtgcaaactgtgtccgtacacacacggcactttggagaaactaaaaatccactacgagaagtatcacaatcagcctgaatttgatgtcttttcccagtcgcccccgaagctgccagtccccctcgagccygagatgaccactgaagtgagcccttcccaagtctccatcactgaggaggaggtgggagaggagcccgtgtccacttctcacttctctacctcccacctggtctcccacactgtgttccggtgccagctctgcaagtacttctgctccacgaggaaggggatcgccaggcactaccgcatcaagcacaataatgtccgagcccagccagaaggcaagaacaacctcttcaagtgtgccctgtgtgcctacaccaaccccatccgcaaaggtctggcagcccactaccagaagcgccacgacattgatgcgtattacactcactgcttggcagcctccaggaccatcagcgayaagcccaacaaagtgatcatcccatccccgcccaaggacgactcccctcagctgagcgaggaactccggcgggcagtggagaagaaaaagtgctccttgtgctctttccagtcgttcagcaagaagggcatcgtgtcccattacatgaaacgccacccaggggtgttcccaaagaagcagcacgccagcaagttggggggctacttcacggccgtctatgcagatgagcatgagaagcccacactgatggaagaagaggagagaggcarctttgagaaagccgaggtggagggtgaagctcaggaaatcgagtggctcccattccgctgcatcaaatgcttcaagctgtcctttagcactgcagagctgctgtgcatgcattacactgaccaccacagtcgggacctaaagagggacttcatcattctgggcaacggcccccgcttgcagaactccacctaccagtgtaagcactgtgatagcaaactgcaaagcacagccgagctgacctcacacttgaacattcacaatgaggaattccagaagcgtgccaaacgtcaggagaggaggaaacagcttttgagcaagcagaaatatgcagatggtgcttttgcagatttcaaacaagagaggccttttggtcacttagaagaggtgccaaagatcaaggagaggaaagtggtgggctacaaatgtaaattctgtgtggaagtgcacccaacgctccgagccatctgcaatcacctccgaaagcacgtccagtatggcaatgtcccagctgtgtcagctgctgtgaaggaggcggatgaccctgcccacttgttcctggatggattggaagcagccaaagacgccagtggcgccctggtgggccgggtggatggtgaacactgcttgcttgatggaatgttggaggatgaaacccggccggggggataccattgcagtcaatgtgacagagtcctgatgtccatgcaggggctgcgttctcatgagaggagccacctggccctggccatgtttacccgcgaggacaagtacagctgccagtattgctcgtttgtttctgctttcaggcacaatttggatcgccatatgcaaacccaccacggacaccataaaccattccgatgcaaactctgctccttcaagtcctcctataacagccggctgaaaacacatatactcaaagctcatgctggtgagcatgcctacaagtgttcttggtgctcattctccaccatgacaatcagccagctgaaggaacactccctcaaggtccacggaaaagccctgaccctccccaggccacggatcgtcagtctcctctcctcacactcccaccactcctcccaaaaagctaccccggctgaagaagtggaagactccaatgactcatcatattcagagcccccagatgttcagcagcagttgaaccactatcagtcagctgccctggcaaggaacaacagccgtgttagccctgtgcctctttctggggctgctgctggcactgagcagaaaactgaagccgtgcttcactgcgaattctgtgaattctcctccggctacatccagagcatcaggcgtcattaccgggacaagcatggtgggaagaagcttttcaagtgcaaagactgctccttttacacaggctttaaatctgcttttactatgcacgtggaagctgggcactcagcagttcccgaggagggccccaaagatcttcgctgtcctctctgcctctatcacaccaaatacaagcgcaacatgattgaccacatcgtgctgcaccgagaagagcgtgttgtccccattgaagtttgccggtccaaactgtccaaatacttgcagggagtagttttccgctgtgataagtgtaccttcacctgctccagtgatgagagcctccagcaacatatagaaaagcacaatgaactgaaaccttacaaatgccagctctgctactatgagaccaagcacacggaggaactggacagccaccttcgggatgagcataaggtaagccgtaactttgagctggttggacgggttaacttggatcagctggaacagatgaaggagaaaatggagagctccagcagcgatgatgaggacaaggaagaagaaatgaacagcaaggctgaagacagagagctgatgagattttctgaccacggggctgctcttaacactgagaagcgttttccatgtgaattttgtggacgggcgttttcacagggctctgagtgggaaagacatgtgctgagacacggcatggcattgaatgacaccaagcaggtgagcagagaagaaatccwcccaaaagagatcatggagaacagtgttaaaatgccctccatagaggaaaaggaagatgacgaggccattgggatagacttttccctaaagaatgaaacagtagccatctgtgtagtaactgccgacaaatctctcctggagaatgcagaggccaaaaaagaatgagcgtttggtgaaattcttaatcaaaccttacttgaacagtgatgaaaaagtgggagggctggcttgggctgagaagggagggacagaaaagagaagacagaacaaagctgctttttaggactgaacaatctattttcaaagcactggtacctgtgtgagtgagtatgtaaattaaagttatttaaatggttggaatatgtggctccttttccatcactacatcttttcttccggatcttcatcatggaagtttcatttgttgcggaatatggaagcacctcccaatggtacggtgcaccctgtggtggtcttggacagtatgtggaaacagaagctccatgacggtagaagacttctcattggggagcaactttttgacgcacaacttttggtgcgtttttctagttttaataccttaagctttttcaagacctaactgcagccgctttgggaaaaaaaaacaaaaaacaaaaaacagaaaacaaaaaaaaaaaaactgctttgcataaaacagtcacctgtttcctagtacctcaaacttaaccaagggaactctctgcatttgtcagtactacctgtcgtcgttgtggttaaatgtagagagaactgctgggcaagatggtgaatggagaaaaaaaaagagttttaaagaaaggaacacaaattgtgcttaaaatccccatgtgggttttatttcttaaaatactgtgatttttttaattattttagt

SEQ ID NO: 7 - DNA, 1045 bp, Homo sapiens
atgtatactatttacgaaatcctgtgcaagctcagcttggagggtcatcactctacaccctcaggtgcatatgggtcagtcaaagcctacaccaactttgatgctgagggggatgctttgaacattgaaaggaccatcaggacaaaaggtgtgggtaagttcaccattgtcaacattttgaccarcagcaggaatgctcggagagaggatgttgcctttgcctagcagagaaggaccacaaaggaacttacatcagcactgaagtcagccttactggccacctggagacagtcattttgggcctattgaagacacctgctcagtatgatgcttctgagctaaaagcttccatgaaggggctgggaactgaggaggactccctcgttgagatcatctgctcaacaaccaaccaggagctccaggaaattaacagagtctacaaagaaatgtacaaaactgatctggagaaggacattatttcggacacatatggtgacttctgcaagctgatgtttgccctggcaaatgttagaagaccagaggatggctctgtcgttgattatgaactgattgaccaagatgcccgggatttctgtgatgctggagtgaagaggaaaagaactgatgttcccaagtggatcagcatgatgaccgagtagagcatgtcccacctccagaaagtatttgataggtacaagagctacagcccatcaagagagagcatcaagaaagaggttaaaggagacctggaaaatgctttcctgaacctggtccagtgcattcagaacaagcccctgtattttgctgattggctgtactactccatgaagggccagggggctcgagataaggtcctgatcagaatcatcgtctcccgcagtgaagtggacatgttgaaaattaggtctgaattcaagagaaagtatggcatgtccccgtactattacatccagcaagacactaagaacgactacccaraaagcactgctgtacctgtgtggtggagatgactgaagcccaacatagcttgagcttccagaaacgg

SEQ ID NO: 8 - DNA, 1360 bp, Homo sapiens
cactgactcccagctggggaatgcagacatggagatgactctggagcgagcagggagtatgctcgatgcagaccagatgccgccgtccaggatttctgccgcagccactttcatacagcacgagtgcttccagaaatctgaagctgggaagagggttaaccagttttgtggcatccccaagcttctgcagctcctaaaagttcagaatgaagatgttcagcgagctgtgtggggggccttgagaaacttactatttgaagacaatgacaacaaattggaggtggctgaactaaatggggtaactcggctgctccaggtgctgaagcaaaccagagtcttggagactaaaaaacaactaacaggtttgctgtggaatttgtcatctaatgacaaactcaagaatctcatgataacagaagcattgcttatgctgaccgagaatataatcatctccttttctggatggcctgaaggagactacccaaaagcgaatggtttgctcgattttgacacagtctacaacccactggatgtctaagaaacatgagtgctgctggccctgrtaggagaaaagcaatgagaagatgtgaccgactcattgactcactggtccattatgtcagaggaaccattgcggattaccagccagatgacaaggccacggagaattgtgtgcacattcttcataacctctcctaccagctggaggtagagctcccagagaaatattcccagaatatctatattcaaaacccaaatgtccagactaacaacaaaaccggragtggaccaatgccgacatcagtggctcagacagtcgtccagaaggaaaatggcctgcagcacacccgaaagatggtgcatgtcagtgacccaagtgtgaaaaagmcagccaacttgctgctgaggaatctgtcccagaatctttctctgcagaataaaattgccaaagaaactctccccagtttggtctccatcattcctgatacagtcccgagtactgaccttctcattgaaactacagcctctgcctgttacatgttgaacaacgtaatccaaaacagttaccagaatgcacagcgccttcygaataccgggggcatccagaaaattatgaccatcagtgcaggcgatgcctatgcctccaacaaagcaagtaaagctgcttccatcctcctgtattctctgtaggcacacacggaactccatcatgcctacaagaaggctcagtttaagaagacagattttgtcaacagctggactgtcaaagcctaccactcccttaaagactgaggaaaatgacgaagtattctcagctgcaaaaaaatcccacaggaaaacacctatttttctactaccc

SEQ ID NO: 9 - DNA, 2806 bp, Homo sapiens
ggccgggcgcagtggctcacacctgtaatcccagcactttgggaggccgagtcaggcagattacctgagatcaggagttcgagaccagcctggccaacatggtttgctgtggaatttgtcatctaatgacaaactcaagaatctcatgataacagaagcattgcttatgctgaccgagaatataatcatctccttttctggatggcctgaaggagactacccaaaagcgaatggtttgctcgattttgacacagtctacaacccactggatgtctaagaaacatgagtgctgctggccctgrtaggagaaaagcaatgagaagatgtgaccgactcattgactcactggtccattatgtcagaggaaccattgcggattaccagccagatgacaaggccacggagaattgtgtgcacattcttcataacctctcctaccagctggaggtagagctcccagagaaatattcccagaatatctatattcaaaacccaaatgtccagactaacaacaaaagtattggatgttttggcagtcgaagcaggaaactaaaagagcaatactaggacatgccgatgccagaggaaaagagcaaccccaagggcgtggagtggctgtgacactccattgtgataaggatgtatctgtccttgatcgccaagagtgtcccaaactacacacaggaagcctccttaggcgctctccagaacctcacagccggragtggaccaatgccgacatcagtggctcagacagtcgtccagaaggaaaatggcctgcagcacacccgaaagatggtgcatgtcagtgacccaagtgtgaaaaagmcagccaacttgctgctgaggaatctgtcccagaatctttctctgcagaataaaattgccaaagaaactctccccagtttggtctccatcattcctgatacagtcccgagtactgaccttctcattgaaactacagcctctgcctgttacatgttgaacaacgtaatccaaaacagttaccagaatgcacagcgccttcygaataccgggggcatccagaaaattatgaccatcagtgcaggcgatgcctatgcctccaacaaagcaagtaaagctgcttccatcctcctgtattctctgtaggcacacacggaactccatcatgcctacaagaaggctcagtttaagaagacagattttgtcaacagctggactgtcaaagcctaccactcccttaaagactgaggaaaatgacgaagtattctcagctgcaaaaaaatcccacaggaaaacacctatttttctactacccagcccaagaaacctcaaaagcatgcctcgtttctatcattttctatttccatggtcccccgaatccagaaaacaagtayaacataatcttatgagtcttccagaagacttttgcaagcttgccaccagtagatactggtcacaggctctacaaatagtggtctttgttattagggcttatggtgcatggcctcctggaaccaaaatgtgaattcatgtggaatggactttgatccaataaataaggaaagaagttgttgcattactgggattttaaaagcttgatttacatttatattccttttctagttcccatgttttgtcactcatgtgcacattgcttcaccattgggccatgagtatattgttctgtagtgttgaaacagaatggaaatgacaagaaatatctgcagttatccaggagaaagtataatggcaaaattatttgtttctttgtttactttgtgctcgtttttatctccttaggtttttttcctctgatttttaaataaacttaagaaatttagattacagagtatgcatgactgtaagaaaaagaaattgagaggaagtgatcatagcaaattaaagaaayctttttctcccaaaacttaaagtaaaataaataaaaataaaaataaatcttttccccagagaaaggcaactgtgattataaagtttaaccttcccccaaacactgaatgaatgagatttttgctccggaaatactttacctataacaacaccattaaatccaaatctcttctaaacaatggcattccgtgtaatgcctttcctgtattttttaggccactgccctggactagtggaagaatggactctagtctttatctgcaagaggaactaaggccttctatcagactgyccggccagcctggggcactgaaaatacagctcattttaatgagttacattatcaaccagctttgcccagcatttaagaaatatcacagggccactaaatctcatatgatcttcttcaagccattattttaattcaagaaaactctagagaaaaaagtgaagaagtcatgttgaagaagatataagaatgtgtcaagaccatacagaaatgatatgagaaatactggtgttttaaaaggtgacatcatccagtgaaatgaatctatattaaatgttattttaactgcattatgattaaaaccattcatatagagttagtcttcacaactactattctgttatattttgttttttttttttttaaatctgacaacgtttgtcataagtaagataaggaaaaaaactcttcaactccttttggccagaaaagtgtaatagaaaataaatgttgaatatgtacttaagtctttattatatttgaaacttaaattttttttcagttttaaaagctgaatgaagatagcttaggtaactaacctagttcaaaatgaaatttagataccaatttttaaaatactggagagaatttatatgtctttttccagagttctgataataagca

SEQ ID NO: 10 - DNA, 1222 bp, Homo sapiens
atgcccaatctcttycgaaaagtatacagaaactctccaactacaacaaatgaaagcagattcatctgggcagcaggccctgagctaggtgctggctacaaggtggtgagagagatacttgctccctacttcccaaagaaaaggcccttgaagtctccagagaaggggggatataaggctactggaaatacctttctagatatgtgtcacctgtatgacatgtttgacattaagtgtgagttctcrgcagtcaaggacattgtcaaccacttctccyctcattaccaaacacatgaagcagggtatgacaactcaagcatccaggtggaaggaatgacacaaacagaacctgtctcctttagcttccaagactcaaagaagttggcaagaacaagcaccttacaaaaggcagcaaaaagggagccaagaagaaagtgatggatccattttctaagaaagattggtataatgtgaaagcatctgctatgttcaatataagaaatattggaaagacgctagttgccaggacccaaggaaccaaaattgcatccgatggcctcgagggtcgtgtgtttgaagtgagtcttgttgatttgcagaatgattaagttgcatttagaaaattcaaactgattactgaagatgttcagggcaaaaactgcctaacttccatggcatggatcttattcgtgacaaaatgtgttccatggtcaaaaaatggcagacaatgattgaagctcacgttgatgttaagactactcatggttacttgctttgtctgttctgtattggttttactaaaaaaagcaacaatcagatacggaagacctcttatgctcagcaccaacagatccgccaaatccagaagatgatggaaatcatgacccaagaggtgcagacaaatgacttgaaagaagtggtcaataaattgattctagayagcattggaaaagacatagaaaaggcttgccaatctatttaccttctccacgatgtctttgttagaaaagtaaaaatgctgaagaagctcaagtttgaattgggaaaactcatggagcttcatggtgaaggcagtagttctggaaaagccactggggacaagacaggtgctaaagtcgaatgagctgatggatatgaatgaccagtccaagaatctgtttaaagttcagacttataatagtggcaaataaaaagtcctatttgtgatgaaaaaaaataatga

SEQ ID NO: 11 - DNA, 1080 bp, Homo sapiens
ctctctgctcctcccgtaagacagacagctgcatcttgtcatgcagcaccagctgtatccctgagacaccayggtgaaggtgaagaccaaagtaaatggatttggccatgttgggtgtctggtcaccagggctgcttttaactttggcaaagtggatactgtcaccatcaatgaccccttcgttgacttcaactacatgatccacatggtccagtatgattccacccatggcaagttccatggcaccattaaagctgagaataggaagcttgtcatcaatggaaatcccattaccatcttctaagagcgagatcccaccaaaatcaaatggtgtgatgctggtgctgattatgttgtgtagtccactggcatcttcaataccatgagaaggctggagatgtcttagaagagggagccaaaagggtcatcatctctgccctttctgctgacacccccttgttcatgataggcatgaatcatgagaagtacaaaaacagcctcaagatcatcagcaaagcctcctgtaccaccaacttcttagcccccctggccaaggtcatccgtgacaactttggcatcatagaagaacttataaccacagtccatgccatcactgccacagaagaccctggatggctcctctgggaaactgtggcatgatggccatgtggctctccaggacatcatccctacatctactagtggtgccaaggctgtgggccaggttactcccgagctgaatgggaagctcattggcatggccttccatgtctccactgccaamktgttggtcatggacctgacttgccatctggagaaagctgccaaatatgatgacatcaagaaggtggtaaagcaggaattggaggccccctcatgggcatcctgggccacacgagcaccaggttgtctcctctgactttaacagcaacttccactcttctgccttcaatgctggggctggcattgccctcaacaatcactttgtcaacctcatttcctggtatgacaatgaatttggctacagcaacagggtggtggacctcatggcccacaaagcctccaaggagtaagacccca

SEQ ID NO: 12 - DNA, 1276 bp, Homo sapiens
atggctcctctgcgctccagctgcgtcgtctccgggatcgccgccgccttccacccgggctcgcctctgatgcccctgccagagccagctcctggtggacccatgtggagatgggaccaccagatcccatccttggagtcaccgaaggctttaagagggacaccaatagcaaaaagatgaatctgggagttagtgcctacagggaccacaacggaaagccttacagcatccacaaggcagaggcccagattgcagccaaaaatttggacgaggactacytctccattgggcggctggctgaattttgcaaggcatctgcagaagyagccttrggcgagaatagcgaagtctcgaaaagtggccggtttgtcactgtgcagaccatttctggaactagtgccttaaggatcagagctagttttctgcaaagatttcttaagttcagccaagatgtctttctgcccraaccaacctggggaagtcgcacacccatcttcagggatactggcatgcagctacaaggttatcgatactatgaccgcaagacttgcggttttgacttcacagacactgtggaggacatttcaaaaacaccagagcaaagtcttcttcttctgcatgcttgctcccataatcccacaggagtggaccctggtcccaagcagcagaaggaaatagcaacagtggtgaagaaaacaaaaatctctttgcactcttcgacatggcctaccaaggctttgccagtggcaatggtaacaaggatgcctgggctgtgcgccactctgccaattatacrccattgtcgctgccaatcatacaccaagaacatggtcttacacagtgagrgtgtggcaggcttcaccatggtttgcaaagacgcagatgaagccaagagggtagagtcacatttgaagatcttgatstgtcccatgtattccaaccctcccctcaatgggacccgtttgcttctaccattctgaatgctccagatttgtgaaaacaatggttgcaagaagtgaaaggcaaggcccatcgcatcattagcatgcaractcagctggtstctaacctcaagaaggagggttctacccactactggccacacatcactgcccaaattgacatgttttgtttcacagggttaaagcccgaacaggtggaaaggatgagcaaggagtcctccatctacgtgacaaaggacagctgcttctctgaggcaggggtcacctccagcaatgtgggctaccttgtccataccattcaccaggtcaccaag

SEQ ID NO: 13 - DNA, 1433 bp, Homo sapiens
ggttgtggcagcactgcctgaaagygtgagaccagactctaatccttatggttttccatgggagttggtgatatgtgcagctgtacatggattttttgctgttctctttttttgtgtggagaagttttagatcggttgggagtcggctttatgtgggaagagaaaaaaagcttgctgtaatgctttctggactaattgaagaaaagcataaactacttgaaaaatttagccatgttcaaaaagagtatgaaggctatgaagtagagtcatctttaaagaatgccagctttgagaaggaggcaacctgtgaaaagctaaacaggtccaattctgaacttgaggatgaaatacyctgtctagaaaaagagttaaaataagagaaatctaaacattctgaacaaggtgaattgatggtggatatttgcaaaaggatacagtctctagaagatgagtcaaaatccctcaaatgacaagtagctgaagccaaaatgaacttgacgatatttcaaatgaatgaagaacgactgaagatagcaataaaagatgctttgaatgaaaattctcaactccaggaaaacgagagacagcttttgcaagaagctgaggtatggaaagaacaaggcttctctgacactgggtccctgtcacctccatgggaacaggaccgtaggatgatgtttcttccaccaggacaatcatatcctgattcagctcttcctccacaaaggcaagacagattttattctaattctggcacactgtctggaccagcagaactcagaaggtttaatatgacttctttggataaagtggatgggtcaatgctttcagaaatggaatccagcagaaatgataccaaagatgaccttggtaatttaaatgtgcctgattcatctctccctgctgaaaatgaagcaactggcccttacttttctcctccacctcttgctccaatcagaggtccattgtttccgggggatacaaggrgcctgttcatgagaagaggacctcctttccccccacctcctccaggaaccatgtttggagcttctcaagattattttccacsaagggatttcccagatccaccacatgctccatttgcaatgagaaatgtctatccagcgaggcgtttcctccttaccttcccccaaaacctggatttttccccataaaccccacattctgaaggtagaagtgagttccctgcagggctgattctgccttcaaatgagcctrctactgaacatccagaaccacagcaagaaacctgacaatatttttgctctcttcaaaagtaattttgactgatctcattttcagtttaagtaactgctgttacttaagtgattacacttttgctcccactgaagcttaatggaattataattctcaggatagtgttttctaaataaagatgatttaaatatgaa

SEQ ID NO: 14 - DNA, 1267 bp, Homo sapiens
gcagattagctagccttagatagatgtaaagaagacaacctgactcttttctgaaacattcagagcatcctctaccccgaggatcatgggaattccctcatgttcctcctgctctgcctyaagcaccccttctttgctgcacagcaagaaacagttctgacagagcagacagtttgagatctgtaacattctaaygagaatatctctaaggagaatatttggcttttctcactttctctgtagagaaacaaattgtcattcttctcttacagaggggcagtagagtgtgtctgggtcagctgagtgactacatcaaagctcccagccttgaaaaacacatgctgttcccaggcctcaagatattgaaacattaattagataatttaaagtagcgttttcttctacaatgtctgaagaagtgamctaygygacactcacatttcaggattctgctggagcaaggaataaccgagatggaaataacctaagaaaaagagggcatccagctccatctcccatttggcgtcatgctgcyctgggtctggtaactctttgcctgatgttgctgattgggctggtgacrttggggatgatgtttttgcagatatctaatgacattaactcagattcagagaaattgagtcaacttcagaaaaccatccaacagcagcaggataacttatcccagcaactgggcaactccaacaacttgtccatggaggaggaatttctcaagtcacagatctccagtstactgaagaggcaggaacaaatggccatcaaactgtgccaagagctaatcattcatacttcagaccacagatgtaatccatgtcctaagatgtggcaatggtaccaaaatagttgctactattttacaacaaatgaggagaaaacctgggctaacagtagaaaggactgcatagacaagaactccaccctagtgaagatagacagtttggaagaaaaggattttcttatgtcacagccattactcatgttttcgttcttttggctgggattatcatgggactcctctggcagaagttggttctgggaagatggctctgttccctctccatccttatttagtactaaagaacttgaccagatcaatggatccaaaggatgtgcttattttcaaaaaggaaatatttatatttctcgctgtagtgctgaaattttttggatttgcgagaagacagctgccccagtgaagactgaggatttggattagtatgcttcttccaaattctccaagaagtaa

SEQ ID NO: 15 - DNA, 1987 bp, Homo sapiens
atctggcccctgcaggcgtggggttccacgtgggaggaaccagttacattcaaggatgcctctgtggccttcaccgaggaggagtgaggtcacctggactctgctcccaggaagctgtgcggagctgtgatgctgggcaactacagaaacttggtcttggagacttgaatgaaaattctgtggagaatcttcarcagaaaacacttcaggatctgttacatgagctttcctcctggctagttttggaaggcatggccagtacaattactggaagtcaggattgtattgtgaatcatcgaggggaagtggatggggagcctgaactagatatttccccttgtcaacagtggggagaagcatcttctcctatttccagaaacagggacagtgtgatgactcttcaaagtggttgtttcraaaacattgaaagtgaaacatatttgcctttgaaagtctcaagccaaatagacacacaagactcttcagtgaagttctgtaagaatgagcctcaggatcatcaggaaagcagacgtctctttgtaatggaagaaagcactgagagaaaagtgataaagggggaaagttgttcagagaaccttcaagttaaactggtgtctgatggacaagaactggcctcgccattgttaaatggtgaggcaacttgccagaatggccagttaaaagaatctttggatcccattgactgtaactgcaaagacattcatggatggaaatcacaggtggtcagttgtagtcagcagagagstcatacagaggagaaaccctgtgaccataataactgtgggaaaatacttaacaccagcccagatggtcatccatatgagaaaatccacactgcagagaaacaatacgaakgtagtcagtgtggtaagaacttcagtcaaagctcagagctactacttcatcagagagaccacacagaagaaaaaccctacaaatgtgagcaatgtgggaagggcttcacaaggagctcgagtctgcttatccatcaggcagtccacacagatgagaagccttataagtgtgasaagtgtgggaagggcttcaccaggagctcaagtctgctcatccatcatgccgtccatacaggcgaaaaaccttataaatgtgacaagtgtgggaagggctttagtcagagctccaaactgcacatccaccagcgagtccacactggagagaagccytatgagtgtgaggagtgtggtatgagcttcagtcagcgctcaaacctgcacatccaccagcgagtacacacaggagagaggccctacaagtgwggtgagtgtgggaagggcttcagtcagagctcgaaccttcacattcaccggtgcatccacacaggagagaagccttaccaatgctatgagtgtgggaagggtttcagccagagctcggatcttcgcatccatctcagagtccacactggagagaagccctatcactgtggcaagtgtgggaagggatttagccagagttccaaactcctcatccaccagagagtacatactggagagaagccctatgagtgcagcaagtgtgggaagggcttcagccagagctccaaccttcacakccaccagcgggttcacaagaaagatcctcgctaactgacattagcccattcaggtcttcacagcgctcatactgtaaaaactgttaaatatttagtatcactcttactttatattctacaaaggagagagatgtaagggttatttagatatgttccctcactgaaaaatcactcattcaaaatatttaagtatcaagcactttgttatgctgtacaatgaatggattgttcttgtttctcagatgggtagagtaaaagtgtctgtactttacaattcaactacwtgttctacccagcattttaacggcaagaactttatatttattctcaagcagggcatgtttccctttgttcacattctctgakaaattgaaactctggtttctcttcaaa

SEQ ID NO: 16 - DNA, 2389 bp, Homo sapiens
ctagtcccgattatggttattacagtttgatgaaatgtggctgagatcattggcactgtggagattaagaaatgtgaggtcagagtgttgggtaarttgttcctgcgagtgttaaggttgtcaggataatggtgggaatggggtgaagatgacaactcagcaatgacacaagaagagagtgacacagaaagattcagtagctgagaacttgagcgtagatatgttgtgggcaggagggaaatgatttggatggaagtagccaagtaagtgagaaaggaaagactttccaacaaaacttggcttagctcactcagatccctgagctgcaaacttcttctatacctttcttaccttttccagtgctgctgacttcaccccacttgcagggcatttgtgcagatggttgtttgttgaggaggaatgtgcttaatgttttaggaaccagttacattcaaggatgcctctgtggccttcaccgaggaggagtgaggtcacctggactctgctcccaggaagctgtgcggagctgtgatgctgggcaactacagaaacttggtcttggagacttgaatgaaaattctgtggagaatcttcarcagaaaacacttcaggatctgttacatgagctttcctcctggctagttttggaaggcatggccagtacaattactggaagtcaggattgtattgtgaatcatcgaggggaagtggatggggagcctgaactagatatttccccttgtcaacagtggggagaagcatcttctcctatttccagaaacagggacagtgtgatgactcttcaaagtggttgtttcraaaacattgaaagtgaaacatatttgcctttgaaagtctcaagccaaatagacacacaagactcttcagtgaagttctgtaagaatgagcctcaggatcatcaggaaagcagacgtctctttgtaatggaagaaagcactgagagaaaagtgataaagggggaaagttgttcagagaaccttcaagttaaactggtgtctgatggacaagaactggcctcgccattgttaaatggtgaggcaacttgccagaatggccagttaaaagaatctttggatcccattgactgtaactgcaaagacattcatggatggaaatcacaggtggtcagttgtagtcagcagagagstcatacagaggagaaaccctgtgaccataataactgtgggaaaatacttaacaccagcccagatggtcatccatatgagaaaatccacactgcagagaaacaatacgaakgtagtcagtgtggtaagaacttcagtcaaagctcagagctactacttcatcagagagaccacacagaagaaaaaccctacaaatgtgagcaatgtgggaagggcttcacaaggagctcgagtctgcttatccatcaggcagtccacacagatgagaagccttataagtgtgasaagtgtgggaagggcttcaccaggagctcaagtctgctcatccatcatgccgtccatacaggcgaaaaaccttataaatgtgacaagtgtgggaagggctttagtcagagctccaaactgcacatccaccagcgagtccacactggagagaagccytatgagtgtgaggagtgtggtatgagcttcagtcagcgctcaaacctgcacatccaccagcgagtacacacaggagagaggccctacaagtgwggtgagtgtgggaagggcttcagtcagagctcgaaccttcacattcaccggtgcatccacacaggagagaagccttaccaatgctatgagtgtgggaagggtttcagccagagctcggatcttcgcatccatctcagagtccacactggagagaagccctatcactgtggcaagtgtgggaagggatttagccagagttccaaactcctcatccaccagagagtacatactggagagaagccctatgagtgcagcaagtgtgggaagggcttcagccagagctccaaccttcacakccaccagcgggttcacaagaaagatcctcgctaactgacattagcccattcaggtcttcacagcgctcatactgtaaaaactgttaaatatttagtatcactcttactttatattctacaaaggagagagatgtaagggttatttagatatgttccctcactgaaaaatcactcattcaaaatatttaagtatcaagcactttgttatgctgtacaatgaatggattgttcttgtttctcagatgggtagagtaaaagtgtctgtactttacaattcaactacwtgttctacccagcattttaacggcaagaactttatatttattctcaagcagggcatgtttccctttgttcacattctctgakaaattgaaactctggtttctcttcaaa

SEQ ID NO: 17 - DNA, 2386 bp, Homo sapiens
ctagtcccgattatggttattacagtttgatgaaatgtggctgagatcattggcactgtggagattaagaaatgtgaggtcagagtgttgggtaaattgtrcctgcgagtgttaaggttgtcaggataatggtgggaatggggtgaagatgacaactcagcaatgacacaagaagagagtgacacagaaagattcagtagctgagaacttgagcgtagatatgttgtgggcaggagggaaatgatttggatggaagtagccaagtaagtgagaaaggaaagactttccaacaaaacttggcttagctcactcagatccctgagctgcaaacttcttctatacctttcttaccttttccagtgctgctgacttcaccccacttgcagggcatttgtgcagatggttgtttgttgaggaggaatgtgcttaatgttttaggaaccagttacattcaaggatgcctctgtggccttcaccgaggaggagtgaggtcacctggactctgctcccaggaagctgtgcggagctgtgatgctgggcaactacagaaacttggtcttggagacttgaatgaaaattctgtggagaatcttcarcagaaaacacttcaggatctgttacatgagctttcctcctggctagttttggaaggcatggccagtacaattactggaagtcaggattgtattgtgaatcatcgaggggaagtggatggggagcctgaactagatatttccccttgtcaacagtggggagaagcatcttctcctatttccagaaacagggacagtgtgatgactcttcaaagtggttgtttcraaaacattgaaagtgaaacatatttgcctttgaaagtctcaagccaaatagacacacaagactcttcagtgaagttctgtaagaatgagcctcaggatcatcaggaaagcagacgtctctttgtaatggaagaaagcactgagagaaaagtgataaagggggaaagttgttcagagaaccttcaagttaaactggtgtctgatggacaagaactggcctcgccattgttaaatggtgaggcaacttgccagaatggccagttaaaagaatctttggatcccattgactgtaactgcaaagacattcatggatggaaatcacaggtggtcagttgtagtcagcagagagstcatacagaggagaaaccctgtgaccataataactgtgggaaaatacttaacaccagcccagatggtcatccatatgagaaaatccacactgcagagaaacaatacgaakgtagtcagtgtggtaagaacttcagtcaaagctcagagctactacttcatcagagagaccacacagaagaaaaaccctacaaatgtgagcaatgtgggaagggcttcacaaggagctcgagtctgcttatccatcaggcagtccacacagatgagaagccttataagtgtgasaagtgtgggaagggcttcaccaggagctcaagtctgctcatccatcatgccgtccatacaggcgaaaaaccttataaatgtgacaagtgtgggaagggctttagtcagagctccaaactgcacatccaccagcgagtccacactggagagaagccytatgagtgtgaggagtgtggtatgagcttcagtcagcgctcaaacctgcacatccaccagcgagatcacacaggagagaggccctacaagtgwggtgagtgtgggaagggcttcagtcagagctcgaaccttcacattcaccggtgcatccacacaggagagaagccttaccaatgctatgagtgtgggaagggtttcagccagagctcggatcttcgcatccatctcagagtccacactggagagaagccctatcactgtggcaagtgtgggaagggatttagccagagttccaaactcctcatccaccagagagtacatactggagagaagccctatgagtgcagcaagtgtgggaagggcttcagccagagctccaaccttcacakccaccagcgggttcacaagaaagatcctcgctaactgacattagcccattcaggtcttcacagcgctcatactgtaaaaactgttaaatatttagtatcactcttactttatattcctacaaaggagagagatgtaagggttatttagatatgttccctcactgaaaaatcactcattcaaaatatttaagtatcaagcactttgttatgctgtacaatgaatggattgttcttgtttctcagatgggtagagtaaaagtgtctgtactttacaattcaactacwtgttctacccagcatttaacggcaagaactttatatttattctcaagcagggcatgtttccctttgttcacattctctgagaaattgaaactctggtttctcttc

SEQ ID NO: 18 - DNA, 1128 bp, Homo sapiens
taaaggggattagcttcaatgaagaccagcaaaaggaaaaggatcagcttggcaaagcccccaagaaggaaraagcagctgccctccacaaagacatttctggttcaggcaagaggtcactggagaagaaccaaattaatttttggaggaatcaaatgaccaagagatgggaaccaagcttaaactggaagaccactgttaattacaaagactatgctcagcaaaagaaatccaagaggacaaacacacaggaaaacttgaaaaaccaagaccatctgtttcacacggaagagcacaattacttcggaagagtgckgaaaagattgaggaaactgttagckatagctcctcagaaagtgaggaagatgaagaaccacctgaccatcgtcaggaagcaagtgcagatttgccatcagaatattggcaaattcagaagctggtgaaatatttaaagcaaaaggaaacagagtcaaaatggcagaagcaaaagatgggctaggaagcagaataccagagtaattagaagcacgatctttgacgttggaaagaccagttgagttgaaattctgccacttactcaatrgccttggatgactgatgatgctgtaccctaattctaaaggaagcaaggaacccccttttcagctaccttactgataagcacttatgttctgccttctgccatcctgatggttcrggttgtctgtcttactacctacttcttgagtagagagatcacattaaatttattgctgtatctcrcagggcatcttgctaatgtgcacaggctcgcctccctacctctgccctratggtgcgaaggggagagagcgaggttccttagtggcagggctttgctgttcttcactctcagccccctgaaagcagttcttcctgcctctgagcctgtctttccttctgctgttgacttctttcctactttttttgcatccctctctcttccttttcctgccgtctttcttgtagacatactagttgattgctgtatttgctgactttatatggayattattttctcccttggccaagattgttttaaaatcttgcaaggaaaatgtcttgcttttgatcacttctagcrattaaaggagatggtttgttaatgtc

SEQ ID NO: 19 - DNA, 3068 bp, Homo sapiens
atggcccctgctyacgtggcaactattgtggctactagtcaaggaggctcagcctctggagtgrgtcaaggatctgytccagctgacctctaacccccgggggccgcctgagccctggtcttccgctcctcccatctcccatgggaatctccccatgcccctattgccccagcagatccgggggactttgattacctgrgrccctctgcttcctcgcagatgtcagccccaccccaggaatyaactgaaaatttggttccattcctggacacggattcagctggagagctgcccctagggccagrgcagttctcagttgcacaccaggatttcaatgacaagctgactctgcaagaaaggctcccagaggtggttccaatgctggacagggatcagaaccagaccctagttcagcctcctcgcctcaaaagtaaggttcaaactgcagatctagatggggctgcaggtcatcaggcagatgaaatacttgttccactagacagtaaggtttcaaaaccaaccaaatttatttattgtttgtttcacccaggaacctgaagaaagatctagctcagcattggagcattgctgatattgttggaattccacagcaattatccaaaccacagcgttagaaacagactttgcaggatgaatattcgagtatggatacacagtatcctggcagcctgcctccagaactccgggtgaactcagatgagcctccagggycccctgagtaagttggactttctcaattccatctagagcctgaaactcaaaatccagagacccttgaagatatccagtcctcttcactccaggaagaagccccagagcagcttccacacctccttcttcaacccagcaggaggccccagctctgcctccagagtcctctatggagagtctagctcaaactctaccaaatcatgaggtgacagttcaacctccaggtgaggatcaagctcattataacttgcccaacattrcagttaaacctgcagatgtggaggttaccataacttcggagcctaccartgagaaagaatcttcccaagsccagcaggaggctccagttcagtttccagaggaggtggaaccttctgcaacccaacaccctgacgactacagctcctcctccagaacaccctgaggtgacacttccaccttcagacaagggtcgggctcagcattcaaacctgactcaagtcacacttccacctctggacctggagcttaccataactacagaacctactacagaggttaaaccgtctccaaccacggaggagacctcaactcagcctccagacctggggcttgccataactccagagcccactacagagactggacattctacagccctggagaagactacagctcctcatccagaccaggttcagactctgcatcgaaaactgactgaagtcacaggtccacctactgaactagaacctactcaggattcactggtgcagtctgaaagttacgcccaaaataaggctttaaccgcaccagaggaacagtaggcctccacaagcaccaacatatgtgagctctgtacctgcggaggtgagacgctgtcgtgtattgatctcagcccaaaacagaggctctgccaagtgcctgtgccagagcccracacctaccatggcaccttcaccaycttaaatttccaaggaaactatatttcwtacmttgatggaaatgtatggaaagcatacagttggaccgggaaactaattctcaawgaaaatwayttgactgaattacataacgattcatttaaaggcctgctatccctccagtatttagatttatcctgcaataaaatacagtctatcgaaagacatacatttgaaccactaccatttttgcagtttataaatcttggttgcaatttactcacagaactgagctttggaacatttcaggcctggcatggaatgcagtttttacacaagttaattctcaatcgcaatcctctgacaactgttgaagatccatatctctttaaattgtcagcatttaaatatctagacacgggaacaatgcaagtcccacttacaacaattgagaacattctcgtgatgactgttgaactggagaaactgatcttacctagccatatgacctgctgcctctgccaatttaaaaatagcactgaggctgtctgcaagacagtcaagctgcattgcagcagtgcatttctgacaaacaccatacattgtctgaagaagcatctgtagagaatccaggagtgttcatgaaggtgttacaagcccagaagaagcacacgagcactgagctgactattgagccggaggcagcctcagacagcaatggcatcaatttgtcaggctttgggagtgatcagtttgaaattcagctaacccaacagccacgttccctcatccccaacaacaatgtgagaaggctcatttctcatgttatccggaccttgaagatggactgctctgagacccatgtgcarttgacctgtgccaagctcatctccaggacaggcctcctgatgaagcttctcagtgagcagcaagaagtaaaggtgtccaaggcagaatgggatacggaccagtggaaaactgagaactatatcaatgacagcacagaagcccagaatgaacagaaagagcagaagtcgagtgagctcacaaaagaagttccaggatatggctataacaacaaactcatcttggcaatatttgtgaccgaaatactaacgactttgattataattttttgcctcattgagatttattctcaccgatggtcatcacaagaagatggagaaggattctcaaggggcattttcagatttctgycacagaggagatgctcttcacgaagtgagactcaggatgaatctttctcattcagacagccactctggcttaaagatatgtacaaacctctcagtgccacaagagtaaataaccaggcatggaagctgcacaagaagtcatctaatgaggatgagatccccatctgatgaggacagcgaaaccccaacagagaasggggaggagagtgaagccctgcca

SEQ ID NO: 20 - DNA, 1135 bp, Homo sapiens
ctctttatagccagtggcgtctgtgtctttaaatgcttactcaacagagacactgagtgttgctgtgtgtggaaggagtccatcttgatgactctggggtacagcagtgctttactgaaggttgagtctcatgctgaattcagtgcatttgcaaatactttgaaaatatgccaaaataaaaaaaaggaatactcagcgttcagccagtggaccgaagcagcgtctgttgcacagtacttccagttttatgrctgcatttctcaacagcagaacatgatgcaagattttgtgaggacagccacttaccacagagccgtcctccrgaatcacattgactttagagacaaggtggttctagatgttggttgtggatcaggaatcctgtcattttttgctgtacaggctggagctaggacagtttatgcagttgaagccagttcagtacattctggcaccccattttatctttttcagatgctagtgaaaaacaatcacctttcagacaagatcattgttttgccaggaaaaactgaagacgtctcacttcctgaggctgtagatrtgatcatttccgaaccaatgggatacatgctgttcaatgaacggatgctagagagttatcttcattccaaaaaatggctaaaatcaaatggaatgatgttcccgacattcagcgacatccacttggcccctttttctgatgaacagctctacgtggaacacttctccagagccaatttttggtaccagcaatgtttctatggggtcaatctgtccagtctccagggtgctacagtggatgaatacttcaggcagccaatagtagacacatttgatgttaggattttgatggctggaacagtcaaatacacagyaaactttatggatgcagaagaggaagatctacacagagtagaaattccctttgtgtttcagatggcagtctgggctcatccatggcctggcgttctggtttgatgtggcatttgttggatctctggtaactgtttggctgtcaacagccccagctgagcctctgactcattggtaccaggtgcagtgcctcctgcagactmctctctttgccaagraagggaagacactgtcagggaaagtgctgtttgtagccaataaa

SEQ ID NO: 21 - DNA, 3293 bp, Homo sapiens
cgagttggaagaggtgagtcctgtctcaaaatggaggtaaaaccgccgcctggttgcccccagcccgactccggcagtcgccgtcgccrctggggggaggagggccatgatccaaaggaaccagagcagctgagaaaactgtttattggtggtctgagctttgaaactacagatgatagtttaagagaacattttgagaaatggggcacactcacagattgtctggtaatgagagacccccaaacaaaacgttccaggggctttggttttgtgacttattcttgtgttacagaggtggatgcagcaatgcgtgctcgaccattcaaggttgatgggcgtgtagtggaaccaaagagagctgtttctagagaggattctgtgaagcctggtgcccatctaacagtgaagaaaatttttgttggcagtattaaagaagatacagaagaatataatttgagagactactttgaaaagtacggcaagattgaaaccatagaagttatggaagacaggcagagtggaaaaaagagaggatttgcttctgtaacttttgatgatcatgatacagttgataaaattgttgttcagaaataccacactattaatgggcataactgtgaagtgaaaaaggcccttgctaaacaagtgatgcagccggctggatcacagaggggtsgtggaggtggatctggcaattgtatgggtcrcagaggaaactttggaggtggtggaggtaattttggccgtgatggaaactttggtggaagaggaggctatggtggtggaggtggtggcagcagaggtagttatggaggaggtgatgtggatataatggattaggaggtgatggtggcaactatggcagtggtcctggttatagtagtagaggcgggtatggtggtggtggaccaggatatggaaaccaaggtggtggatatggtggcggtgttggaggatatgatggttacaatgaaggaggaaattttgrcggtrgtaactatggtggtggtgggaactataatgattttggaaattacagtggacaacagcaatcaaattmtggacacatgaaagggggcagttttggtggaagaagctcgggcagtccctatggtggtggttatggatctggtggtggaagtggtggatatggtagcagaaggttctaaaaacagcaggaaagggctacagttcttagcaggagagagagtgaggagttgtcaggaaagctacaggttactttgagacagtcgtcccaagtgcattagaggaactgtaaaaatctgtcacakaaggaacgatgatccataatcagaaaagttactgcagcttaaacaggaaacccttcttgttcaggactgtcatagccacagtttgcaggaagtgcagctatcgattaatgcaatgtagcgtcaattagatgtacattcctcaggtcttttatctgttgtagctttgtcttattctttttcttttcattacatcaggtatattgccctgtaaattgtggtagtggtaccaggaataaaaaattaaggaatttttaacttttcaatatctgtgtagttcagtttttctacattttagtacagaaactttaacaaaatgcagttttgaaggtgtttccttgtgagttaacaagtaaagaagatcaattgttaattactattttgtataaattttgctaaagttaactgtaaagaaacacctgctgacttgcagtttaaggggaatctattctccccatttccaaaccatgatatgaatggacgccgacatgtggagagaacagataatttgtgtgtttgcaatgtgtgttttaggtaaataggattgggtatttaaattagcatttgtgaatttaatagcattaagattaccttcaaataaaaaagtctcaaaatttctttttggtttttgtgcactttcttttaaaatgtaatcacatgattttagtgtgttagacttgctgagtcctagctgtgtttagaacatctccattctacatttaccttggtcaaatttgaactgctgccataggttttgggtgtaaagaatgtttactgccctccatttaaattctgaaaaggtatagtggatgttttccctctcctacattagaaaccattcttaaaaacttttcaaaatatagaaccattaagcctgctatatctgagcaaattagtgggtaccttttttccttttttaaagcacaagaggcccataaatcttgagttatttgcattagtttacattttttgatacaacttttcagaccaagagaataaaaatcatgcgttattaaacccctagctggctggcatgctttcctgtttgtactgtatacattttgctggatgaaaccaaggatagtttaggtataattgtccaaaataacctaactgcagcagaaatgtaggacagttgcttagtacaggcttctcacttcctacagacctgaattcaaatttggatagtctgagttattaaattcccaaagacaaagaacacactcttatttcttgtgtatatttcaacataaatcatgttgttaccaatttgttgggaaggccctggttgagaagagttttagataataaggctgtatatatatagatatatatagatatataccaatgtctatatatagagatattttatatatatatatacaggtatatatatgtgtgtgtatatatataggtatatacatatatacatatatatatatatatatatggatatatacccatgtctactgttttgcttcagctagtgcttacaatttcattcaagtcctgagtatgtgtcctgctgttactccttctttggtagttgaacgttgaattcaagtctttccttctgttttaagaagtactaagcaaacaagcaataaaaaggggaatggcgcatgctagtgtttgaatatgctctcttgttgctctaattctgtgcctccgtgcattaatatttggatgcatgcaatgccagcatggaaattggccttcacacttactgcagttttccagaaacactcacaagccaataaatgtaacagacattccatttttaatgggcatatatgtgaaaagcagtgtagaaaataggctaatattagaaaatggttaagtccttaataacttcaagtgtggttatataatggacactgtcaatgttcataacttaaacctgggtacctggtcaaaataatgcttgggaaacattaaaattgagctaaattgtctcaagttcttttattcatataaataaagtttaaatgaatgggggagatt

SEQ ID NO: 22 - DNA, 3356 bp, Homo sapiens
atattgatctcgagttggaagaggtgagtcctgtctcaaaatggaggtaaaaccgccgcctggttgcccccagcccgactccggcagtcgccgtcgccrctggggggaggagggccatgatccaaaggaaccagagcagctgagaaaactgtttattggtggtctgagctttgaaactacagatgatagtttaagagaacattttgagaaatggggcacactcacagattgtctggtaatgagagacccccaaacaaaacgttccaggggctttggttttgtgacttattcttgtgttacagaggtggatgcagcaatgcgtgctcgaccattcaaggttgatgggcgtgtagtggaaccaaagagagctgtttctagagaggattctgtgaagcctggtgcccatctaacagtgaagaaaatttttgttggcagtattaaagaagatacagaagaatataatttgagagactactttgaaaagtacggcaagattgaaaccatagaagttatggaagacaggcagagtggaaaaaagagaggatttgcttctgtaacttttgatgatcatgatacagttgataaaattgttgttcagaaataccacactattaatgggcataactgtgaagtgaaaaaggcccttgctaaacaagtgatgcagccggctggatcacagaggggtsgtggaggtggatctggcaattgtatgggtcrcagaggaaactttggaggtggtggaggtaattttggccgtgatggaaactttggtggaagaggaggctatggtggtggaggtggtggcagcagaggtagttatggaggaggtgatgtggatataatggattaggaggtgatggtggcaactatggcagtggtcctggttatagtagtagaggcgggtatggtggtggtggaccaggatatggaaaccaaggtggtggatatggtggcggtgttggaggatatgatggttacaatgaaggaggaaattttgrcggtrgtaactatggtggtggtgggaactataatgattttggaaattacagtggacaacagcaatcaaattmtggacacatgaaagggggcagttttggtggaagaagctcgggcagtccctatggtggtggttatggatctggtggtggaagtggtggatatggtagcagaaggttctaaaaacagcaggaaagggctacagttcttagcaggagagagagtgaggagttgtcaggaaagctacaggttactttgagacagtcgtcccaagtgcattagaggaactgtaaaaatctgtcacakaaggaacgatgatccataatcagaaaagttactgcagcttaaacaggaaacccttcttgttcaggactgtcatagccacagtttgcaggaagtgcagctatcgattaatgcaatgtagcgtcaattagatgtacattcctcaggtcttttatctgttgtagctttgtcttattctttttcttttcattacatcaggtatattgccctgtaaattgtggtagtggtaccaggaataaaaaattaaggaatttttaacttttcaatatctgtgtagttcagtttttctacattttagtacagaaactttaacaaaatgcagttttgaaggtgtttccttgtgagttaacaagtaaagaagatcaattgttaattactattttgtataaattttgctaaagttaactgtaaagaaacacctgctgacttgcagtttaaggggaatctattctccccatttccaaaccatgatatgaatggacgccgacatgtggagagaacagataatttgtgtgtttgcaatgtgtgttttaggtaaataggattgggtatttaaattagcatttgtgaatttaatagcattaagattaccttcaaataaaaaagtctcaaaatttctttttggtttttgtgcactttcttttaaaatgtaatcacatgattttagtgtgttagacttgctgagtcctagctgtgtttagaacatctccattctacatttaccttggtcaaatttgaactgctgccataggttttgggtgtaaagaatgtttactgccctccatttaaattctgaaaaggtatagtggatgttttccctctcctacattagaaaccattcttaaaaacttttcaaaatatagaaccattaagcctgctatatctgagcaaattagtgggtaccttttttccttttttaaagcacaagaggcccataaatcttgagttatttgcattagtttacattttttgatacaacttttcagaccaagagaataaaaatcatgcgttattaaacccctagctggctggcatgctttcctgtttgtactgtatacattttgctggatgaaaccaaggatagtttaggtataattgtccaaaataacctaactgcagcagaaatgtaggacagttgcttagtacaggcttctcacttcctacagacctgaattcaaatttggatagtctgagttattaaattcccaaagacaaagaacacactcttatttcttgtgtatatttcaacataaatcatgttgttaccaatttgttgggaaggccctggttgagaagagttttagataataaggatatatatatatatatatatggatatatacccatgtctactgttttgcttcagctagtgcttacaatttcattcaagtcctgagtatgtgtcctgctgttactccttctttggtagttgaacgttgaattcaagtctttccttctgttttaagaagtactaagcaaacaagcaataaaaaggggaatggcgcatgctagtgtttgaatatgctctcttgttgctctaattctgtgcctccgtgcattaatatttggatgcatgcaatgccagcatggaaattggccttcacacttactgcagttttccagaaacactcacaagccaataaatgtaacagacattccatttttaatgggcatatatgtgaaaagcagtgtagaaaataggctaatattagaaaatggttaagtccttaataacttcaagtgtggttatataatggacactgtcaatgttcataacttaaacctgggtacctggtcaaaataatgcttgggaaacattaaaattgagctaaattgtctcaagttcttttattcatataaataaagtttaaatgaatgggggagattgggccaggcacagtggctcacgcctgtaatcccagcactttgggakgctgaggtgggccgatcacctgagttcaagaccagcctgggcaacatagtgagaccttgcctaaaaaatacaaaaattagctgagcatggtgacacatgcctgtagtcccagctacttgggagg

SEQ ID NO: 23 - DNA, 3043 bp, Homo sapiens
cgagttggaagaggtgagtcctgtctcaaaatggaggtaaaaccgccgcctggttgcccccagcccgactccggcagtcgccgtcgccgctggggggaggrgggccatgatccaaaggaaccagagcagctgagaaaactgtttattggtggtctgagctttgaaactacagatgatagtttaagagaacattttgagaaatggggcacactcacagattgtctggtaatgagagacccccaaacaaaacgttccaggggctttggttttgtgacttattcttgtgttacagaggtggatgcagcaatcggtgctcgaccattcaaggttgatgggcgtgtagtggaaccaaagagagctgtttctagagaggattctgtgaagcctggtgcccatctaacagtgaagaaaatttttgttggcagtattaaagaagatacagaagaatataatttgagagactactttgaaaagtacggcaagattgaaaccatagaagttatggaagacaggcagagtggaaaaaagagaggatttgcttctgtaacttttgatgatcatgatacagttgataaaattgttgttcagaaataccacactattaatgggcataactgtgaagtgaaaaaggcccttgctaaacaagtgatgcagccggctggatcacagaggggtsgtggaggtggatctggcaattgtatgggtcrcagaggaaactttggaggtggtggaggtaattttggccgtgatggaaactttggtggaagaggaggctatggtggtggaggtggtggcagcagaggtagttatggaggaggtgatgtggatataatggattaggaggtgatggtggcaactatggcagtggtcctggttatagtagtagaggcgggtatggtggtggtggaccaggatatggaaaccaaggtggtggatatggtggcggtgttggaggatatgatggttacaatgaaggaggaaattttgrcggtrgtaactatggtggtggtgggaactataatgattttggaaattacagtggacaacagcaatcaaattmtggacacatgaaagggggcagttttggtggaagaagctcgggcagtccctatggtggtggttatggatctggtggtggaagtggtggatatggtagcagaaggttctaaaaacagcaggaaaagggctacagttcttagcaggagagagagtgaggagttgtcaggaaagctgcaggttactttgagacagtcgtcccaagtgcattagaggaactgtaaaaatctgtcacakaaggaacgatgatccataatcagaaaagttactgcagcttaaacaggaaacccttcttgttcaggactgtcatagccacagtttgcaaaaagtgcagctattgattaatgcaatgtagtgtcaattagatgtacattcctgaggttcttttatctgttgtagctttgtctttttctttttcttttcattacatcaggtatattgccctgtaaattgtggtagtggtaccaggaataaaaaattaaggaatttttaacttttcaatatttgtgtagttcagtttttctacattttagtacagaaactttaacaaaatgcagtttcgaaggtgtttccttgtgagttaacaagtaaagaagatcattgttaattactattttgtatgaattttgctaaagttaactgtaaagaaacacctgctgacttgcagtttaaggggaatctattctccccatttccaaaccatgatatgaatgggcgctgacatgtggagagaatagataatttgtgtgtttgcaatgtgtgttttagataaataggattgggtatttaaattagcatttgtgaatttaatagcattaagattaccttcaaatgaaaaaaaatctcaaaatttctatttggtttttgtgcattttcttttaaaatgtaatcatatgattttagtgtgttagacttgctgagtcctagctgtgtttagaacagaacatctctattctacatttaccttggtcaaatttgaactgctgccataggttttgggtgtaaagaatgtttactgccctccatttaaattctgaaaagggatggtggatgttttccctctcctacgttagaaaccattcttaaaaacttttgaaaatatagaaccattaagcctgctatatctgagcaaattagtgggtaaccttttttccttttttaaagcacaagaggcccataaatcttgagttatttgcattagtttacattttttgatacaacttttcagaccaagagaataaaaatcatgcgttattaaacccctagctggctggcatgctttcctgtttgtactgtatacattttgctggatgaaaccaagatagtttaggtataattgtccaaaataacctaactgcagcagaaatgtaggacagttgcttagtacaggcttctcacttcctacagacctgaattcaaatttggatagtctgagttattaaattcccaaagacaaagaacacactcttatttcttgtgtatatttcaacataaatcatgttgttaccaatttgttgggaaggccctggttgagaagagttttagataataaggctgtatatatatagatatatatagatatataccaatgtctatatatagagatattttatatatatatatacaggtatatatatgtgtgtgtatatatatatatgtatatacatatatacatatatatatatatatggatatatacatatatatatatatatggatatatacccatgtctactgttttgcttcagctagtgcttacaatttcattcaagtcctgagtatgtgtcctgctgttactccttctttggtagttgaaagttgaattcaagtctttccttctgttttaagaagtactaagcaaacaagcaataaaaaggggaatggcgcatgctagtgtttgaatatgctctcttgttgctctaattctgtgcctccgtgcattaatatttggatgcatgcaatgccacatggaaattggcctcatggc

SEQ ID NO: 24 - DNA, 2450 bp, Homo sapiens
agctcttatggaaggcatggcagaagatgagacagggaaagaggacagcacagagtcacagccagatcgtgactgagtgtatcactggacaggccatggctccacggtcccggcgacgaaggcacaagaaacctccctcatcagtggctcccatcatcatggccccaaccacaattgtgacccctgtgcctctgaccccctcaaaacctggccctagcattgacacacttggcttcttctccttggatgataatgttcctggcctatcgcagctgatccttcaaaagctgaacatgaaaagctatgaagaatataagttggtggtagatgggggtacccccgtatcaggctttggatttcgatgtcctcaagaaatgttccagaggatggaagacacatttcgattctgtgctcactgtagagcactccctagtgggctttcagactccaaggttctccggcactgtaagaggtgcagaaatgtctattactgtggtccagagtgccagaagtcagactggcccgcacacaggagggtttgtcaagagcttcgtcttgtggctgtggaccgtctcatggaatggcttctggtcacaggtgattttgttctaccctcaggaccttggccatggccacctgaagctgtacaggactgggactcctggttttctatgaaggggttacacctagatgctacattggatgctgtgctagttagtcatgctgtgaccaccttatgggccagtgtaggacggccaaggccagacccggatgtcctgcagggatctttgaagcggctgctgacagatgtcctgtcacggcccttgactctaggcctaggacttagggccttggggatagatgttaggaggactgggggaagcacagtgcatgtggttggtgcttcccatgtggagacattycttactcgcccaggggactatgatgagcttggttacatgtttcctgggcaccttggactccrtgtggtcatggtgggtgtagatgtagctactggcttttcacagagcacctcaacttcacccctggaacctggcacaattcagcttagtgcccacaggggcctctaccatgacttctgggaggagcaagtrgagaccgggcagacacaccatccagatttggtggcrgcattccatccaggttttcattcctccccagacttgatggaggcttggctgcccaccctgctgctacttcgtgactataagattcctacattgattactgtttacagccatcaggagttggtatcctctttgcagattctggtggaactggatacacacatcactgcctttgggkctaatcctttcatgtcccycaaacctgaacaggtctattccagtcccaacaagcagccagtatactgcagtgcatactatatcatgtttcttggaagcycctgtcagctggataataggcaattagaagagaaagtggayggcgggatttaaatagatcataactggacatctggaaaacggggagtttgtgatgaaattaccctgctaatgccaggttcttgcaaactttgaaaaacattatattctaaacctcatttactgtttgggtaaaaattctaagctgaatgagagtttctgtataacataactggtttctttcttyttttgagatggagtcttgctctgttgcccaggctggagtgcagcggcatgatctcgactcactgcagcctccgcctcctgggttcaagtggttctcctgcctcagcctccctagtagctgggattacaggtgcacaccaccacacctggctaatttttgtatttttagcagacagggtttcaccatgttggccaggctcgtatcaaacccttgaccccaggtgatctgcctgcctcagcctcccaaagttctgggattacaggcatgagccaccatgcccagccaatgtaactggtttctaagagtttagccacagtagcttctagagataggaaattagatttagtgggtgggaagaggccctgatgctggtctttccagagcttatagttgctaacacttttytttgtaaagaagtttaccttttgactggaaccagatggcactgagaaaaagaatgagaaccaccttattcttctgaaaaagactttcttctcatccagtaatttgggctaaaaaatggaaagatgttgatgacttgaagtgatgcaagaatggacaagtcagggaagtcattgggaacatggatgaggttgtaagcattggtacagtgtcctgtttcctgacttttttgagagaaatgtctacttttcctgttttctcttggggacttttgaccctagagtagccctggtgttatattttagatatcccaagctatatcagactttacctgaatatactggagttacttattatcccccattctataccccaataaactcagtttggggcttctt

SEQ ID NO: 25 - DNA, 238 bp, Homo sapiens
gcagatcctcgttcctagctgcctgccagcgtcctcggcccggccctgaggatggacccaggagatcccgctggtgaccctgccgctggcgagcgccaccgcatgggccrggaccccctcctgctcctgcaggccctgcagrccctgtggtccacgcgggagcggaagcaggctctcttgtcggaccttcgtctgtgacgctcagtcttcctcgctctttggcacctgcgtgtgtggt

SEQ ID NO: 26 - DNA, 1569 bp, Homo sapiens
cgtcttcagaaccaggccaggagccgctgcgttggggtttatgcttggatggtggacggccgtggatcctcgttcctagctgcctgccagcgtcctcggcccggccctgaggatggacccaggagatcccgctggtgaccctgccgctggcgagcgccaccgcatgggcacccacaggcttctacagcctcttctccacctaagcagagtgggatgttttcaaagtgcaacaccccagctagcagggcccctggaacagcctcggcgccccctggaacactaatggccctccctggaacagacacggcacccccaccgagaacagcctcggtgccccctggaacagcctcagcaccccckggaacactaatggccctccctggaacagacacggcacccccaccgagaacagcctcggtgccccctggaacagcctcagcaccccctggaacactaatggccctccctggaacagatacggccccccgccagaacagacatggtgcccgctggaacactaatggtcctccctggaacagcctcggtgccccctggaacactaatggccctccctggaacagacacggcgcccccccacagaatagcctcgatgccccctggaacagcctcggtgccccctggaacagcctcggtgccccctggaacagcctggtgctcctggaacagacacagcccccccagaacagacacagcaccccctggaacagcctggcgcttcctggaatggccacatccccccatcctttctgtgctgctttaggcatctgcccttacrtggttcgtgtccagctctgtcaacaaggccagctccacaagaggccccagctcagccctccccagtgggctcccctactcaggctctgggtcagcttcttcccaggaggtgtcctggcccctgtgctggccccgcctcgctgcctggacacctgtccgtgccaccctggtcactgagcaggacatccgcgtctgtggcccctgggaccctgcccccgacagccaggcctgggtttgtccttttaggtagagtgcctggtccaggtcattggaggagagtccacatggccacctctggcgtgttctagagaggccctcccgcgctgggtcaggaggcakcatcgggacaggagaagggggctgagctcctgttcctctctccctcccccgaggccaagaaacattcccatccgaatgtccactgcgctcacagattcctttcctcctaaaacttcagccttggccaggctcacggccaggattatggtggctcacgcctgtaatcccagtactgtgggaggccgaggcaggaggatcacgaggtcagaagatcgagaccatcctggccaacatggtgaaacycygtctctactaaaaatacaaaaattagctggacatggtggcgggcgcctgtattcccagctactggggaggctgaggcaggagaatggcttggaggcagtagaactgcttgaaccctggaggcggaggttacagttatccgaggttgtgtcattgcactccagcctggggaacagagcgagactccatctc

SEQ ID NO: 27 - DNA, 1504 bp, Homo sapiens
atcctcgttcctagctgcctgccagcgtcctcggcccggccctgaggatggacccaggagatcccgctggtgaccctgccgctggcgagcgccaccgcatgggcacccacaggcttctacagcctcttctccacctaagcagagtgggatgttttcaaagtgcaacaccccagctagcagggcccctggaacagcctcggcgccccctggaacactaatggccctccctggaacagacacggcacccccaccgagaacagcctcggtgccccctggaacagcctcagcaccccckggaacactaatggccctccctggaacagacacggcacccccaccgagaacagcctcggtgccccctggaacagcctcagcaccccctggaacactaatggccctccctggaacagatacggccccccgccagaacagacatggtgcccgctggaacactaatggtcctccctggaacagcctcggtgccccctggaacactaatggccctccctggaacagacacggcgcccccccacagaatagcctcgatgccccctggaacagcctcggtgccccctggaacagcctcggtgccccctggaacagcctggtgctcctggaacagacacagcccccccagaacagacacagcaccccctggaacagcctggcgcttcctggaatggccacatccccccatcctttctgtgctgctttaggcatctgcccttacrtggttcgtgtccagctctgtcaacaaggccagctccacaagaggccccagctcagccctccccagtgggctcccctactcaggctctgggtcagcttcttcccaggaggtgtcctggcccctgtgctggccccgcctcgctgcctggacacctgtccgtgccaccctggtcactgagcaggacatccgcgtctgtggcccctgggaccctgcccccgacagccaggcctgggtttgtccttttaggtagagtgcctggtccaggtcattggaggagagtccacatggccacctctggcgtgttctagagaggccctcccgcgctgggtcaggaggcakcatcgggacaggagaagggggctgagctcctgttcctctctccctcccccgaggccaagaaacattcccatccgaatgtccactgcgctcacagattcctttcctcctaaaacttcagccttggccaggctcacggccaggattatggtggctcacgcctgtaatcccagtactgtgggaggccgaggcaggaggatcacgaggtcagaagatcgagaccatcctggccaacatggtgaaacycygtctctactaaaaatacaaaaattagctggacatggtggcgggcgcctgtattcccagctactggggaggctgaggcaggagaatggcttggaggcagtagaactgcttgaaccctggaggcggaggttacagttatccgaggttgtgtcattgcactccagcctggggaacagagcgagactccatctc

SEQ ID NO: 28 - DNA, 2620 bp, Homo sapiens
cctgtctccgcgtggtgcgagcgctgcaccagcccctggctggtggttactgtccgaacggcgtggtgtggtcgctgactctctgggcgtgcagctccgcagccctgccggctcggttcgattgacttacgcaggattctcagcccttgcctgggagaacagttcaggagacagatggccccaagagcccagatccagggaccgctgacatttggggatgtggctgtggcctttaccyggattgagtggagacacctggatgctgctcagcgggccctgtacagggatgtgatgctggagaactatgggaatctggtgtctgtggggcttctctcttccaaaccaaaactaattactcagttggagcaaggggcagagccctggactgaggtgcgagaggctccatcaggcacacatgcagtcgaggattactggtttgaaacaaagatgtcagccctaaagcaaagcacttctgaagcatcygttctrggagagcgaacgaaaagtgtcatgatggaaaaaggcctggactgggagggcagaagctccacagagaagaactataagtgcaaggaatgtgggaaagtcttcaaatacaattcgtcctttattagccaccagagaaatcacaccagtgagaaaccacataaatgtaaagaatgtgggatcgcctttatgaacagttcatcccttttaaatcaccataaggttcatgcaggcaaacagccttatagatgtattgaatgtgggaagttcctgaagaagcactcaacgtttatcaaccatcagagaattcattctagggagaaaccccacaaatgcattgaatgtggaaaaactttcagaaagaactcaatccttttaagtcatcagagaattcatactggccagaaaccytacaaatgtaatgactgtgggaaagccttcrctcagaatgcagctcttactcgtcatgaaagaatacatagtggagagaagccttttaaatgtaacaagtgtgggagagctttcagggataattcaactgtgttggaacatcagaaaatccatactggtgagaagccatatcagtgtaatgaatgtggaaaagcctttaggaagagctcaactcttattagtcaccaaagaatgcatactggggagaaaccctatcactgcagtaaatgtggaaaatctttcaggtatagctcatcctttgctggtcatcagaaaactcacagtggaaataaaccgtatcagtgtcgtgactgtgggaaggcctttacaaagagctcaacccttactggacatcagagaattcatactggagaaaaaccctatcactgtaagaaatgtgggaaagcctttcggcacagctcaggccttgttgaacatcagagactccatactggggaaaaaccttataaatgtaatgaatgtgggaaagcttttccccgaagttcagcccttaagcaacataagaaaattcataataaagaaagagccatgaaatgtagttagtgtggcaaattgtgcagagtagtttattccttctgaccatcatagaggagacattaaataaattatgcatttaacagaaatactctgtacttctgagagaacacatcacttgtgaggatattcattgtgaggttctactagtgaaatatttgaagaaactaaatgtatgtcagtatggaagtagttatagcatactgtgtgctaattgaaaagaatgaggtggagctgtaaatactgtacaaagccaggcatggtggcatatgcctgtagtcccagttacttgggaggctgagacaggattgcttaagcccaggagtttgagtctgtaatgcactatgattgtgcatgtgaatagccactgcactccagcctgggcaacatagcaagactccatctctaagtaaaaaaatacaacagtagaaatatacccatgataatatacccaatatacccttgttaaagaagcaagtttcaggaaatctatattatatgcattcaaaaagacctggacaaataaagaccaatcttaacagcagttatctctctctctctctcttttttttttttttttaaaagaaactagctcttactctgtcacccaggctggagtgccatgtgatcatagctcactgtagttttgaacttgggcttgaacaaccttcccacttcagtctctggagtagctggggctacaggcacgtaccaccacactcagctaacagcagttatytttgatgaggatgtagtataggttgagcatccataactggaaaatctgaaatctgaagtgctccaaaatccaaaatttgtctgagcaccaacaggtacaaaattctacaccagaccttatgtgatgggttgcagttaaaatgcacccccggccgggcgcggtggctcacrcctgtaatcccagcactttgggaggccgaggcgggtggatcatgaggtcaggagatcgagaccatcctggctaacaaggtgaaaccccgtctctactaaaaatacaaaaaattagccgggcgcggtggcgggcgcctgtagtcccagctactcrggaggctgaggcaggagaatggcgtgaacctgggaagcggagcttgcagtgagccgagattgcacc

SEQ ID NO: 29 - DNA, 4011 bp, Homo sapiens
cctgtctctactaaaatacaaaaaattagctgggcatgatggcgggcacctataatctcagctactcgagaggctgaggcaggagaactgcttgaacctgggaggtggaggttgcagtgagccgagatcatgccactgcatgccagcctgggcgacggagcaagactgtttcaaaaaaaaaaagtttcgtgatttctttattcctttgcatagctgaaacaagtcttatcaaaagattgtgaaactgtaatcaaattagaacaaatatttaaaaaaatcttgtactgaagcattcattctattttttagagtttctgtgaattgttcaacaatattcccagtattatattcataggaaaacagataaacagcacaacatgagtgtttcctaccacatcaattttaatgaagacactttctatattaggatcctgtcatttatgaattgtttgtattttaaatttttttgtgtcttagcgacataaattgttaatcattgggatacatgtgtttactttcacccagtgaaaaattgcatgtctaagctcaacacaatctggtcatagagatgtctccacattgttcaaatggtctcttctgtgtagcattttaggaagttggatccaggagcagcaaggcgggccagatttctcctaactttattcttacctcctctttcccagcattacctttactcttcacatttttccaagatcagtagaaaatgaacagatcccaggtacctgtgtgggttccctcagacctggccccagtacttttgcctttccttgggagccatctgattcactgctggtttcagcagccaccaacatgccagtgactccgcagtcctcagcttcattacgggcttcccttctgagctccagaaccactcatccagctccctcctgaagatccctgcctgcccgttccacagacacttcgagcacaacatgtccgagacccctctagcccttaccttttgcccagcctctttctttgcacttcccagtctttgcaaatggcacctggatttacctggaggctcataaagraactctgggagataatttccccatctttcttttgcaccatgaatttgggaccaatatctcttaatgtcttattttgtaggatcaattcttctttccaggaaattctggaaagttgacctgatggagaagaaccaggaaaaccaagaccagcatttgaggaaagctggttttgtcaacaacaaaatactgatggaagacagaaatagtgttttaggagaaacatttaatataaattcaaaccttgttccaatgagaaaaatacctgataaatatgacttatgtataatgaacgtgaattatatttcagaattaattgttagtgataaacccaatgagtgtagtgaatgtgggaaaaaattctgtgagaagtcrtatctccaagtacatcagagaactcacacaggggagaaatcccatgagggtaaagaatgtggaaaaacctttgtttacaattcattcctcatagtacatcaaaggatacacataggtgtaagaccctatkaatgtaacgaatgtgggaaaacattctcacaaaagccagacttcacttatcatcagagaactcatactggagaaaggccctgtgaatgtaatgaatgtgggaagtctttctcagtgaagtcaaaacttattgtgcatcagagaactcacacaggggaaaaaccctatgaatgtaatgaatgtgggaaaaccttttcccagaagtcatctcttacagtacatcagagaacacacacaggggagaaaccatataaattcgaggattactggtttgaaacaaagatgtcagccctaaagcaaagcacttctgaagcatcygttctrggagagcgaacgaaaagtgtcatgatggaaaaaggcctggactgggagggcagaagctccacagagaagaactataagtgcaaggaatgtgggaaagtcttcaaatacaattcgtcctttattagccaccagagaaatcacaccagtgagaaaccacataaatgtaaagaatgtgggatcgcctttatgaacagttcatcccttttaaatcaccataaggttcatgcaggcaaacagccttatagatgtattgaatgtgggaagttcctgaagaagcactcaacgtttatcaaccatcagagaattcattctagggagaaaccccacaaatgcattgaatgtggaaaaactttcagaaagaactcaatccttttaagtcatcagagaattcatactggccagaaaccytacaaatgtaatgactgtgggaaagccttcrctcagaatgcagctcttactcgtcatgaaagaatacatagtggagagaagccttttaaatgtaacaagtgtgggagagctttcagggataattcaactgtgttggaacatcagaaaatccatactggtgagaagccatatcagtgtaatgaatgtggaaaagcctttaggaagagctcaactcttattagtcaccaaagaatgcatactggggagaaaccctatcactgcagtaaatgtggaaaatctttcaggtatagctcatcctttgctggtcatcagaaaactcacagtggaaataaaccgtatcagtgtcgtgactgtgggaaggcctttacaaagagctcaacccttactggacatcagagaattcatactggagaaaaaccctatcactgtaagaaatgtgggaaagcctttcggcacagctcaggccttgttgaacatcagagactccatactggggaaaaaccttataaatgtaatgaatgtgggaaagcttttccccgaagttcagcccttaagcaacataagaaaattcataataaagaaagagccatgaaatgtagttagtgtggcaaattgtgcagagtagtttattccttctgaccatcatagaggagacattaaataaattatgcatttaacagaaatactctgtacttctgagagaacacatcacttgtgaggatattcattgtgaggttctactagtgaaatatttgaagaaactaaatgtatgtcagtatggaagtagttatagcatactgtgtgctaattgaaaagaatgaggtggagctgtaaatactgtacaaagccaggcatggtggcatatgcctgtagtcccagttacttgggaggctgagacaggattgcttaagcccaggagtttgagtctgtaatgcactatgattgtgcatgtgaatagccactgcactccagcctgggcaacatagcaagactccatctctaagtaaaaaaatacaacagtagaaatatacccatgataatatacccaatatacccttgttaaagaagcaagtttcaggaaatctatattatatgcattcaaaaagacctggacaaataaagaccaatcttaacagcagttatctctctctctctctcttttttttttttttttaaaagaaactagctcttactctgtcacccaggctggagtgccatgtgatcatagctcactgtagttttgaacttgggcttgaacaaccttcccacttcagtctctggagtagctggggctacaggcacgtaccaccacactcagctaacagcagttatytttgatgaggatgtagtataggttgagcatccataactggaaaatctgaaatctgaagtgctccaaaatccaaaatttgtctgagcaccaacaggtacaaaattctacaccagaccttatgtgatgggttgcagttaaaatgcacccccggccgggcgcggtggctcacrcctgtaatcccagcactttgggaggccgaggcgggtggatcatgaggtcaggagatcgagaccatcctggctaacaaggtgaaaccccgtctctactaaaaatacaaaaaattagccgggcgcggtggcgggcgcctgtagtcccagctactcrggaggctgaggcaggagaatggcgtgaacctgggaagcggagcttgcagtgagccgagattgcacc

SEQ ID NO: 30 - DNA, 2637 bp, Homo sapiens
cctgtctccgcgtggtgcgagcgctgcaccagcccctggctggtggttactgtccgaacggcgtggtgtggtcgctgactctctgggcgtgcagctccgcagccctgccggctcggttcggttcgtgagcggccgggattgacttacgcaggattctcagcccttgcctgggagaacagttcaggagacagatggccccaagagcccagatccagggaccgctgacatttggggatgtggctgtggcctttaccyggattgagtggagacacctggatgctgctcagcgggccctgtacagggatgtgatgctggagaactatgggaatctggtgtctgtggggcttctctcttccaaaccaaaactaattactcagttggagcaaggggcagagccctggactgaggtgcgagaggctccatcaggcacacatgcagtcgaggattactggtttgaaacaaagatgtcagccctaaagcaaagcacttctgaagcatcygttctrggagagcgaacgaaaagtgtcatgatggaaaaaggcctggactgggagggcagaagctccacagagaagaactataagtgcaaggaatgtgggaaagtcttcaaatacaattcgtcctttattagccaccagagaaatcacaccagtgagaaaccacataaatgtaaagaatgtgggatcgcctttatgaacagttcatcccttttaaatcaccataaggttcatgcaggcaaacagccttatagatgtattgaatgtgggaagttcctgaagaagcactcaacgtttatcaaccatcagagaattcattctagggagaaaccccacaaatgcattgaatgtggaaaaactttcagaaagaactcaatccttttaagtcatcagagaattcatactggccagaaaccytacaaatgtaatgactgtgggaaagccttcrctcagaatgcagctcttactcgtcatgaaagaatacatagtggagagaagccttttaaatgtaacaagtgtgggagagctttcagggataattcaactgtgttggaacatcagaaaatccatactggtgagaagccatatcagtgtaatgaatgtggaaaagcctttaggaagagctcaactcttattagtcaccaaagaatgcatactggggagaaaccctatcactgcagtaaatgtggaaaatctttcaggtatagctcatcctttgctggtcatcagaaaactcacagtggaaataaaccgtatcagtgtcgtgactgtgggaaggcctttacaaagagctcaacccttactggacatcagagaattcatactggagaaaaaccctatcactgtaagaaatgtgggaaagcctttcggcacagctcaggccttgttgaacatcagagactccatactggggaaaaaccttataaatgtaatgaatgtgggaaagcttttccccgaagttcagcccttaagcaacataagaaaattcataataaagaaagagccatgaaatgtagttagtgtggcaaattgtgcagagtagtttattccttctgaccatcatagaggagacattaaataaattatgcatttaacagaaatactctgtacttctgagagaacacatcacttgtgaggatattcattgtgaggttctactagtgaaatatttgaagaaactaaatgtatgtcagtatggaagtagttatagcatactgtgtgctaattgaaaagaatgaggtggagctgtaaatactgtacaaagccaggcatggtggcatatgcctgtagtcccagttacttgggaggctgagacaggattgcttaagcccaggagtttgagtctgtaatgcactatgattgtgcatgtgaatagccactgcactccagcctgggcaacatagcaagactccatctctaagtaaaaaaatacaacagtagaaatatacccatgataatatacccaatatacccttgttaaagaagcaagtttcaggaaatctatattatatgcattcaaaaagacctggacaaataaagaccaatcttaacagcagttatctctctctctctctcttttttttttttttttaaaagaaactagctcttactctgtcacccaggctggagtgccatgtgatcatagctcactgtagttttgaacttgggcttgaacaaccttcccacttcagtctctggagtagctggggctacaggcacgtaccaccacactcagctaacagcagttatytttgatgaggatgtagtataggttgagcatccataactggaaaatctgaaatctgaagtgctccaaaatccaaaatttgtctgagcaccaacaggtacaaaattctacaccagaccttatgtgatgggttgcagttaaaatgcacccccggccgggcgcggtggctcacrcctgtaatcccagcactttgggaggccgaggcgggtggatcatgaggtcaggagatcgagaccatcctggctaacaaggtgaaaccccgtctctactaaaaatacaaaaaattagccgggcgcggtggcgggcgcctgtagtcccagctactcrggaggctgaggcaggagaatggcgtgaacctgggaagcggagcttgcagtgagccgagattgcacc

SEQ ID NO: 31 - DNA, 4183 bp, Homo sapiens
atggcgtcgcggccccgcccccggacgcccagccgcggtcccagcgaccttcgctttcgtggggaagccggactgcgccgtgtcttcctgaagaaggctgggggatcagtgtccttcagtgatgtggctgtgggcttcacccaggaggagtggcagcatctggactctgctcagaggacccsgtacagagacatgatgctggagaactacagcctcctcctctcagtgggatattgcattaccaaaccagaggkggtttgcaagttggagcatggacaggtgctgtggatattagaggaagagtccccaagtcagagccacctagactgctgcatagatgatgacctgatggagaagagacaggaaaatcaagaccagcatttgcagaaagttgattttgtcaacaataaaacactgactatggacagaaayggtgtattaggaaaaacattttctcttgacacaaaccccattctatcaagaaaaatacgtggcaactgtgactcatctggaatgaatttgaataatatttcagaattaattattagtaatagaagctcctttgtaaggaaccctgctgagtgtaatgtacgtgggaaatttctcctctgtatgaagcgtgagaatccttatgccagagggaaacctttggaatatgatggaaatgggaaagccgtctctcagaatgaggacttatttaggcatcagtatattcaaactcttaagcagtgttttgaatacaatcagtgtgggaaggcttttcatgaagaggcagyctgcagtacccataagagagaaagaatgcctataaaattaatcagtatgctagtacattttgctgtaagccaaagcattctgtatatcagaaaacagatacagaagaaaaactctatgaatgtagtgaatgtgggaaaaccttcagccataaatcctcttttatcctacagcagaggatacacagaggagagaaaccctatgaatgcactgaatgtgggaaaacttttggatataggtcatgccttgcagtacatcaaagaacacacacgggacaaaacctatgaatgtaatgaatgtggaaaaaacttctgtgagaagtcaaatcttcatgtacatcagagaacacacacaggagagaaaccctatggatgtaatgaatgtcagaaagcctttggtgataggtcagctctaaaagtacatcagagratacatactggcgagaaaccctatgagtggtattgcattagcaagccaaaggtggtcttcaagttgcagcaaggagaggaggcatggatattagaggaagagtcctcaagccaaagccactttgaattctggaaagttgacctgatggagaagaaccaggaaaaccaagaccagcatttgaggaaagctggttttgtcaacaacaaaatactgatggaagacagaaatagtgttttaggagaaacatttaatataaattcaaaccttgttccaatgagaaaaatacctgataaatatgacttatgtataatgaacgtgaattatatttcagaattaattgttagtgataaacccaatgagtgtagtgaatgtgggaaaaaattctgtgagaagtcrtatctccaagtacatcagagaactcacacaggggagaaatcccatgagggtaaagaatgtggaaaaacctttgtttacaattcattcctcatagtacatcaaaggatacacataggtgtaagaccctatkaatgtaacgaatgtgggaaaacattctcacaaaagccagacttcacttatcatcagagaactcatactggagaaaggccctgtgaatgtaatgaatgtgggaagtctttctcagtgaagtcaaaacttattgtgcatcagagaactcacacaggggaaaaaccctatgaatgtaatgaatgtgggaaaaccttttcccagaagtcatctcttacagtacatcagagaacacacacaggggagaaaccatataaattcgaggattactggtttgaaacaaagatgtcagccctaaagcaaagcacttctgaagcatcygttctrggagagcgaacgaaaagtgtcatgatggaaaaaggcctggactgggagggcagaagctccacagagaagaactataagtgcaaggaatgtgggaaagtcttcaaatacaattcgtcctttattagccaccagagaaatcacaccagtgagaaaccacataaatgtaaagaatgtgggatcgcctttatgaacagttcatcccttttaaatcaccataaggttcatgcaggcaaacagccttatagatgtattgaatgtgggaagttcctgaagaagcactcaacgtttatcaaccatcagagaattcattctagggagaaaccccacaaatgcattgaatgtggaaaaactttcagaaagaactcaatccttttaagtcatcagagaattcatactggccagaaaccytacaaatgtaatgactgtgggaaagccttcrctcagaatgcagctcttactcgtcatgaaagaatacatagtggagagaagccttttaaatgtaacaagtgtgggagagctttcagggataattcaactgtgttggaacatcagaaaatccatactggtgagaagccatatcagtgtaatgaatgtggaaaagcctttaggaagagctcaactcttattagtcaccaaagaatgcatactggggagaaaccctatcactgcagtaaatgtggaaaatctttcaggtatagctcatcctttgctggtcatcagaaaactcacagtggaaataaaccgtatcagtgtcgtgactgtgggaaggcctttacaaagagctcaacccttactggacatcagagaattcatactggagaaaaaccctatcactgtaagaaatgtgggaaagcctttcggcacagctcaggccttgttgaacatcagagactccatactggggaaaaaccttataaatgtaatgaatgtgggaaagcttttccccgaagttcagcccttaagcaacataagaaaattcataataaagaaagagccatgaaatgtagttagtgtggcaaattgtgcagagtagtttattccttctgaccatcatagaggagacattaaataaattatgcatttaacagaaatactctgtacttctgagagaacacatcacttgtgaggatattcattgtgaggttctactagtgaaatatttgaagaaactaaatgtatgtcagtatggaagtagttatagcatactgtgtgctaattgaaaagaatgaggtggagctgtaaatactgtacaaagccaggcatggtggcatatgcctgtagtcccagttacttgggaggctgagacaggattgcttaagcccaggagtttgagtctgtaatgcactatgattgtgcatgtgaatagccactgcactccagcctgggcaacatagcaagactccatctctaagtaaaaaaatacaacagtagaaatatacccatgataatatacccaatatacccttgttaaagaagcaagtttcaggaaatctatattatatgcattcaaaaagacctggacaaataaagaccaatcttaacagcagttatctctctctctctctcttttttttttttttttaaaagaaactagctcttactctgtcacccaggctggagtgccatgtgatcatagctcactgtagttttgaacttgggcttgaacaaccttcccacttcagtctctggagtagctggggctacaggcacgtaccaccacactcagctaacagcagttatytttgatgaggatgtagtataggttgagcatccataactggaaaatctgaaatctgaagtgctccaaaatccaaaatttgtctgagcaccaacaggtacaaaattctacaccagaccttatgtgatgggttgcagttaaaatgcacccccggccgggcgcggtggctcacrcctgtaatcccagcactttgggaggccgaggcgggtggatcatgaggtcaggagatcgagaccatcctggctaacaaggtgaaaccccgtctctactaaaaatacaaaaaattagccgggcgcggtggcgggcgcctgtagtcccagctactcrggaggctgaggcaggagaatggcgtgaacctgggaagcggagcttgcagtgagccgagattgcacc

SEQ ID NO: 32 - DNA, 2070 bp, Homo sapiens
cctgtctccgcgtggtgcgagcgctgcaccagcccctggctggtggttactgtccgaacggcgtggtgtggtcgctgactctctgggcgtgcagctccgcagccctgccggctcggttcggttcgtgagcggccgggattgacttacgcaggattctcagcccttgcctgggagaacagttcaggagacagatggcccccaagagcccagatccagggaccgctgacatttggggatgtggctgtggcctttaccyggattgagtggagacacctggatgctgctcagcgggccctgtacagggatgtgatgctggagaactatgggaatctggtgtctgtggggcttctctcttccaaaccaaaactaattactcagttggagcaaggggcagagccctggactgaggtgcgagaggctccatcaggcacacatgcagtcgaggattactggtttgaaacaaagatgtcagccctaaagcaaagcacttctgaagcatcygttctrggagagcgaacgaaaagtgtcatgatggaaaaaggcctggactgggagggcagaagctccacagagaagaactataagtgcaaggaatgtgggaaagtcttcaaatacaattcgtcctttattagccaccagagaaatcacaccagtgagaaaccacataaatgtaaagaatgtgggatcgcctttatgaacagttcatcccttttaaatcaccataaggttcatgcaggcaaacagccttatagatgtattgaatgtgggaagttcctgaagaagcactcaacgtttatcaaccatcagagaattcattctagggagaaaccccacaaatgcattgaatgtggaaaaactttcagaaagaactcaatccttttaagtcatcagagaattcatactggccagaaaccytacaaatgtaatgactgtgggaaagccttcrctcagaatgcagctcttactcgtcatgaaagaatacatagtggagagaagccttttaaatgtaacaagtgtgggagagctttcagggataattcaactgtgttggaacatcagaaaatccatactggtgagaagccatatcagtgtaatgaatgtggaaaagcctttaggaagagctcaactcttattagtcaccaaagaatgcatactggggagaaaccctatcactgcagtaaatgtggaaaatctttcaggtatagctcatcctttgctggtcatcagaaaactcacagtggaaataaaccgtatcagtgtcgtgactgtgggaaggcctttacaaagagctcaacccttactggacatcagagaattcatactggagaaaaaccctatcactgtaagaaatgtgggaaagcctttcggcacagctcaggccttgttgaacatcagagactccatactggggaaaaaccttataaatgtaatgaatgtgggaaagcttttccccgaagttcagcccttaagcaacataagaaaattcataataaagaaagagccatgaaatgtagttagtgtggcaaattgtgcagagtagtttattccttctgaccatcatagaggagacattaaataaattatgcatttaacagaaatactctgtacttctgagagaacacatcacttgtgaggatattcattgtgaggttctactagtgaaatatttgaagaaactaaatgtatgtcagtatggaagtacttatagcatactgtgtgctaattgaaaagaatgaggtggagctgtaaatactgtacaaagccaggcatggtggcatatgcctgtagtcccagttacttgggaggctgagacaggattgcttaagcccaggagtttgagtctgtaatgcactatgattgtgcatgtgaatagccactgcactccagcctgggcaacatagcaagactccatctctaagtaaaaaaatacaacagtagaagtatacccatgataatatacccaatatacccttgttaaagaagcaagtttcaggaaatctatattatatgcattcaaaaagacctggacaaataaagaccaatcttaacagcaaaaaaaaaaaaaaaaaa

SEQ ID NO: 33 - DNA, 1579 bp, Homo sapiens
cagcctcaaagggagagaagcgggaggtccaggagcaggaagatctcagctctgaaagcttgcagaatcctcctgagggagctggaggagactcgggacctgaactaccttctggaaagccacctgaggaagctcgctggcgaaggcagctcccacctgcccttaggtggagaccccctgggggacgtgtgtaaaccagtgcctgctaaggcccaccagccgcatgggaaatgcatgcaagatccgtctcctgccagcttgtccccaccagctcccccagctcctctggcctccaccctgtcaccaggcccgatgascttctcagagccttttggaccacactcaaccctgagtgcctccgggccaccagagcccttgcttcccctaaaatgcyctgcaacccagccacatgtggtttttcctccttcaccacagccgcatggtcccctggcctcctctccacctccacccgactccagcstggstggacttcagtgtggctccacaacatgcccygtcccccagagctcccctctacacaaccaggtgctgcctcctccaaccagggtgatctctggcctggggtgctccagcgatcccatctgggacctctattgctggagggaggctgccaccacctggggcctctccacctactcacatggcaaatcccagccacggcatcttcccgaccacmcctcagaggcttccttctggggagaccccacacccaagcacatggaggtaggtggctgcacattcatccaccctgacgtgcagaagctgctggagaccctcatcgccaagagagcactgatgaagatgtggcaggagaaagaaagaaaacgggccgaccacccgcacatgacatcactggggaaggagtgggacatcacgaccctaaatcccttctggaacrtgtcaacccagccacagcagctgccccgtcctcagcaagtctctgatgccacaaccgtggggaaccacttacagcaraaacgcagccagcttttctgggacctcccctctctcaatagcgagtccctggcgaccacagtctgggtttctaggaacccttcctcacagaatgcacactctgtaccactggataaagcctccacttctcttccaggtgaacctgaggttgaggcatcctcacagctttcccaggcaccgccccagccccaccacatggcccagccccaacatttcactccagcctggccccagtcccagcccccacctttggctgagatccagacccaggcccacctctcaccccctgtcccaagcctggggtgctcttctccaccccagattaggggctgtggggcatcttaccctacatcccaggagaggacacagtctgtcatccccactggaaaggagtatcttgaatggcccttgaagaagcgaccaaagtggaagagggttttgccctctctcctcraaaagtctcaggctgttctgagccagcccactgcccaccttccccaagagaggccggcctcctggagccccaagtcagcccccatccttcccggggttgtcaccagccctgagctcccagagcactggt

SEQ ID NO: 34 - DNA, 821 bp, Homo sapiens
agaaggagctcgagagcggccgcaggacaagcccgaggagcaggcgggcgctccaggggaaaaccacgcacaaaaccttcttcagagaaaagggaagctccaaacctgactgagacaaacggaggctcttgaaataaaaagaaaataccgcaggacaaacagcctcccgtccccgggcgcaggtcgcggtcacagtggtgacctgggattgctttcccaggactgcgagtcgggtttgggtttctcctccctgcattccacagctgctctggtcatcgcaacgtgtttattgatcactgaagaatctcaagttttgagacgaggaagaaacacccattaggtctccaagacagctgtgtttcacaaactttaaggagacagaaattttctcccctggaacctgtgaaaatgtcccttttccaaggaagtgaaggttaagaggtcccgttctcacagaccctcagkaatttcacttggctccgagctttgacctccgagagagccatggaaaagctgctgcggctgtgctgctggtactcctggctgctgctattttattacaactttcaggtgcgtggcgtctactccagatcgcaggaccatccaggatttcaggtgttggcgtctgcttcccattactggccactggagaatgtggatgggatccatgaacttcaggatacaactggagcgtcccgaacccacaagctcactgtgcttccttcccgtaatgctacttttgtgtattccaatgattctgcctactcaaatctctctgcaactgtagatattgtggaagggaaggtcaacaaaggcattta

SEQ ID NO: 35 - DNA, 598 bp, Homo sapiens
tcagatcttcttgacactcctgtcattcagctatgttgctaaagcactagctggaatttttatgaaaatatcaaccactcaaatagaaaggagatttgagatatcctcttctcttgttggtttaattgatggaagcttcgaaataggaaatttgtttgtgattgtatttgtaagttactttggatctaaactacacagaccgaagttaattggaattggttgttttcttatgggaactggaaaaaattcaacatcaaacttaccaaactgtttaattaatcaaatgttatcactcaatagaacacygtctgagataatagaaagaggttgtgtgaaggaatctgggtcacacatgtggatctatgtcttcatgggtaatatgcttcgtggcataggggaaacccccatagtaccattggggatttcttacattgatgattttgcaaaagaaggacattcttccttgtatttaggtactgtgaatgyaatgggaatgactggtctagtttttgcctttatgctgggatctctgtttgctaaaatgtatgtggatatcggatatgtggatctgagtaagtacaatcggaacgaggtaccr

SEQ ID NO: 36 - DNA, 1921 bp, Homo sapiens
ctttctgctgtttttcagatcttcttgacactcctgtcattcagctatgttgctaaagcactagctggaatttttatgaaaatatcaaccactcaaatagaaaggagatttgagatatcctcttctcttgttggtttaattgatggaagcttcgaaataggaaatttgtttgtgattgtatttgtaagttactttggatctaaactacacagaccgaagttaattggaattggttgttttcttatgggaactggaagtattttgatggctttaccacatttcttcatgggatattacaggtattctaaagaaaccaatattgatccatcagaaaattcaacatcaaacttaccaaactgtttaattaatcaaatgttatcactcaatagaacacygtctgagataatagaaagaggttgtgtgaaggaatctgggtcacacatgtggatctatgtcttcatgggtaatatgcttcgtggcataggggaaacccccatagtaccattggggatttcttacattgatgattttgcaaaagaaggacattcttccttgtatttaggtactgtgaatgyaatgggaatgactggtctagtttttgcctttatgctgggatctctgtttgctaaaatgtatgtggatatcggatatgtggatctgagcactatcaggataactcctaaggactctcgttgggttggagcttggtggcttggtttccttgtgtctggaatagtatccattatttcttctataccattctttttcttgcctctaaatccaaataaaccacagaaagaaaggaaagtttcactatwtttgcatgtgctaaaaactaatgataaaaggaatcaaatagctaatttgaccaaccgaagaaaatatattaccaaaaatgtgactggctttttccagtctttgaaaagcatccttaccaatcccctgtatgttatatttgtaatttttacattgttacacatgagcagctacattgcttctcttacttrtatcattaaaatggtggagcaacagtatggttggtctgcatctaagactaactttttgttgggagtcctcgccctacctrctgttgcaattggcatgttttcaggaggatatatcattaaaaaattcaaattgtctttagttggacttgccaaattggcattttgttctgcaacagtgcatctcttatctcaagttttatatttctttctaatctgtgaaagcaaatcagttgccggcctaaccttgacctatgatggaaatagtccagtaagatctcatgtagatgtaccactttcttattgcaactcagagtgcaattgtgatgaaagtcaatgggaacccgtctgtggaaacaatggaataacttacctgtcaccttgtctagcaggatgcaaatcttcaagtggtaataaagagcccatagtgytttataactgtagctgtgtggaagtaattggtctccagaacaaaaattactcagcgcacttgggtgaatgcccaagagatgatgcttgtacaaggaaatcttacgtttattttgtaattcaagtcttagatgctttcctctgtgcagttggacttacctcatattccgtgctggtgattaggaggtattctagttccaatatattttggggctctgattgatacaacgtgtatgaagtggtccaccaacagctgtggagcacgaggggcttgtaggatatataattccacatatttgggaagagccttcttcggcttgaaggtagccctaatatttccagtacttgttttacttactgkatttatttttgttgtaaggaaaaaatcccatggaaaggataccaaagtattagaaaatgaaagacaagtaatggatgaagcaaacttagaattcttaaacgacagtgaacattttgtaccttctgct

SEQ ID NO: 37 - DNA, 1014 bp, Homo sapiens
cttagtacagccctccaactctcagaaataatctgattggaagaggtgactggctttatccctacctgcattgatggtgtctctctcctccctcagggcaggcagcctagaattttaaaaaattactctcttctccttgggggaaggcctgaagacttgtatttgttgtgaagcctgaagaaaaaagcgccaccagttctcagggctcctctccactgtgactgggagctttgatgtgcccttttgatgttcctgccttgaggcagctggagaagattatcaaaagtagccttaacagttcagggtggagttgggggtgcagcaccataacacgtgggactgcacatccctcacagtaactcactgagatggggttgccgtagtgcaggtgggattgccaggtgccaggtgcccctactgcagcctgcacggaggggaccgtcattttcagactgtccttttagcaggacttcaatgtcaggcctccaaagaagtctacaaattccatcagtcagtaacggcttggagttccaaagcttatgactcaaaggtgatyagagcatggacctggggctagtctggattggtaactgctaaacttggatacatggcttctgatggccctgctggggagaccatgtggagagatggcatagagccagagattcacgttccaggagccctgactgtctcatctcagggaattgaatctccttgtgctccagaccctatgagaggatgccatcccctgctaccatctgactgcaacctcaggagacaccccaagccagaactgagcagccaagccactctcatattsttgacccatagacattgggagataaaaactgattgttgtcaattttagtcagtacattttagggcaatttgatgtcctagcaatagactagtatatttatccattgctgcatcttcttctgcttagattatgatgcatgttttttagctccaactagtatctaaacttgtcatggtctttgcttgaaagtttga

SEQ ID NO: 38 - DNA, 3053 bp, Homo sapiens
aggggtgtgacgtacatccggcgagtagctggcggtccmgggtgctgctggttagtgtgctctgagggagggtccgagcyagccgctgttttgccggaggagcccctcaggcctaagcattaataatgtctttcatctttgagtggatctacaatggcttcagcagtgtgctccagttcctaggactgtacaagaaatctggaaaacttgtattcttaggtttggataatgcaggcaaaaccactcttcttcacatgctcaaagatgacagattgggccaacatgttccaacactacatccgacatcagaagagctaacaattgctggaatgacctttacaacttttgatcttggtgggcacgagcaagcacgtcgcgtttggaaaaattatctcccagcaattaatgggattgtctttctggtggactgtgcagatcattctcgcctcgtggaatccaaagttgagcttaatgatatattgcagctcacttctcacactggcccctaatgctttaatgactgatgaaacaatatccaatgtgccaatccttatcttgggtaacaaaattgacagaacagatgcaatcagtgaagaaaaactccgtgagatatttgggctttatggacagaccacaggaaaggggaatgtgaccctgaaggagctgaatgctcgccccatggaagtgttcatgtgcagtgtgctcaaraggcaaggttacggcgagggtttccgctggctctcccagtatattgactgatgtttggacggtgaaaataaaagagttttacttctctggactgatcctattcacagcttcctcatgaacttttctaatagaacaaggaaagctctccaaccatgtctggcgttgagaagccaagagtctctgtcaactctctcattgcccagtggtgacatgtgctcttctccacactgttgggaggtaatgctgccccacgtgctggtgcaggtcagtatcctgggacttggaagctggcaggatttgccgggtaaagctgtatgccatcatggggcacctgaaaagaaaaacacgtctcaccactgtggttgattcaaaagaaagtgattctattttttaaagaaagcgttgttaatgtaattggtatccctcctaactttttgagttcacaatttacttggtccagagttttctattcttttttttttttaaactaatgaatgacatttagatacttcataaaattatgaacagatatggaggccagagctcatttgggtaaacttactcctgctgagttagcaggttggtgagagaagctcccctgagctcacctgtctctctgactgccttggagtaggtggcataaccttgtgcacagagaactagaaaaggggcagaaccccggccttgcagttgtggcaggtttccactgtggtaagctaggttcattcctcatcaaggaatgtgtagcagattgttcactgtggaggagttaattatagaatgggttattgttgttattcttactcatgaagttacagattttagccagtctttgcttttatacttttgtgaaatttaatttctctctatagcaccttcctttttcgttttcagttatcaaaagtgactttgacctcataaaagagttgagaacatctctcgtgtcacatactgcaggtgcatcagttacttttgcacagattctagggggacatttttctgaataggaagacaggacaaagttaacagcttaagggctcttaattctgtgagttgaggacttaaaagtattgtagcatttgtttggatccatgaaaaatgtattcagtgggctttaaaatttccatttgcagaatttggtctctcaggctgtttgggagctcttttttttacattttttctcctttgacacctattttattggtgtttaaagtaaaggttaacatctgtagcttttccaggtttttttttttttttttttttttttgrtatgaaattgtctttctccattgcagaaataagctagggaaacactaacccaaaaactttctgtagagctgttcctttggaggcagcatcacttattggcagtaaagactcagtataaaagcaccrgcatccctacttgggtgatggggattaattttatagcattccattttcctagtgccacatgtgaaattggattttgatgatcttaatctatattctacccttataataaaagatcaaaagatatatctcctatgaacagattggagataggagatgaaaagttgggaggatgtctttattctaatgtgagggtagggaaaatgtggataacattactggggtgarggaggcattgttctttagttggagttctcattyttattctccagtactgacttgtggggaaagcatactttttcactgccaggtactgaatgcagaggctcagtgaagtatatatgtgggaagtgcatgcatttcgtttattagcaaacatagctggattaagacaaagttgttggtttggaaaggggttaaagccttaagtgaacaaatctagctaacagtgaatgaactaggtaatataacttgcatatttttaatttcctttggttaaaggtcccccatacttctctgttcggagacatgagaagtatgattacttcagtgttagttttcttaatttttttttycccctatttgtcccttgtcactttgttgcaagctagaaatctgtgggttatacatagggcagctctttgtgaaagtggtttattccactggagaaaggggattgaaaatcagttagaaccaatgtatttcttgccccacggaacactattcctataagatagctgaaagaagctgctgtgaggagctcagctccaaacacaggatcagcmccttgtataggaattcccatgaattatgacttctcattctgttttatcagagtgcatatatgtcctacttcagsaaaagtaaaacagtcatttacgaaagaaagtcaatctgtatcctaagcattttaataaaaagttaaaacaaataygctatttcctttttttttt

SEQ ID NO: 39 - DNA, 3027 bp, Homo sapiens
cccggggaggggtgtgacgtacatccggcgagtagctggcggtccmgggtgctgctggttagtgtgctctgagggagggtccgagcyagccgctgttttgccggaggagcccctcaggccgtagtaagcattaataatgtctttcatctttgagtggatctacaatggcttcagcagtgtgctccagttcctaggactgtacaagaaatctggaaaacttgtattcttaggtttggataatgcaggcaaaaccactcttcttcacatgctcaaagatgacagattgggccaacatgttccaacactacatccgacatcagaagagctaacaattgctggaatgacctttacaacttttgatcttggtgggcacgagcaagcacgtcgcgtttggaaaaattatctcccagcaattaatgggattgtctttctggtggactgtgcagatcattctcgcctcgtggaatccaaagttgagcttaatgctttaatgactgatgaaacaatatccaatgtgccaatccttatcttgggtaacaaaattgacagaacagatgcaatcagtgaagaaaaactccgtgagatatttgggctttatggacagaccacaggaaaggggaatgtgaccctgaaggagctgaatgctcgccccatggaagtgttcatgtgcagtgtgctcaaraggcaaggttacggcgagggtttccgctggctctcccagtatattgactgatgtttggacggtgaaaataaaagagttttacttctctggactgatcctattcacagcttcctcatgaacttttctaatagaacaaggaaagctctccaaccatgtctggcgttgagaagccaagagtctctgtcaactctctcattgcccagtggtgacatgtgctcttctccacactgttgggaggtaatgctgccccacgtgctggtgcaggtcagtatcctgggacttggaagctggcaggatttgccgggtaaagctgtatgccatcatggggcacctgaaaagaaaaacacgtctcaccactgtggttgattcaaaagaaagtgattctattttttaaagaaagcgttgttaatgtaattggtatccctcctaactttttgagttcacaatttacttggtccagagttttctattcttttttttttttaaactaatgaatgacatttagatacttcataaaattatgaacagatatggaggccagagctcatttgggtaaacttactcctgctgagttagcaggttggtgagagaagctcccctgagctcacctgtctctctgactgccttggagtaggtggcataaccttgtgcacagagaactagaaaaggggcagaaccccggccttgcagttgtggcaggtttccactgtggtaagctaggttcattcctcatcaaggaatgtgtagcagattgttcactgtggaggagttaattatagaatgggttattgttgttattcttactcatgaagttacagattttagccagtctttgcttttatacttttgtgaaatttaatttctctctatagcaccttcctttttcgttttcagttatcaaaagtgactttgacctcataaaagagttgagaacatctctcgtgtcacatactgcaggtgcatcagttacttttgcacagattctagggggacatttttctgaataggaagacaggacaaagttaacagcttaagggctcttaattctgtgagttgaggacttaaaagtattgtagcatttgtttggatccatgaaaaatgtattcagtgggctttaaaatttccatttgcagaatttggtctctcaggctgtttgggagctcttttttttacattttttctcctttgacacctattttattggtgtttaaagtaaaggttaacatctgtagcttttccaggtttttttttttttttttttttttttgrtatgaaattgtctttctccattgcagaaataagctagggaaacactaacccaaaaactttctgtagagctgttcctttggaggcagcatcacttattggcagtaaagactcagtataaaagcaccrgcatccctacttgggtgatggggattaattttatagcattccattttcctagtgccacatgtgaaattggattttgatgatcttaatctatattctacccttataataaaagatcaaaagatatatctcctatgaacagattggagataggagatgaaaagttgggaggatgtctttattctaatgtgagggtagggaaaatgtggataacattactggggtgarggaggcattgttctttagttggagttctcattyttattctccagtactgacttgtggggaaagcatactttttcactgccaggtactgaatgcagaggctcagtgaagtatatatgtgggaagtgcatgcatttcgtttattagcaaacatagctggattaagacaaagttgttggtttggaaaggggttaaagccttaagtgaacaaatctagctaacagtgaatgaactaggtaatataacttgcatatttttaatttcctttggttaaaggtcccccatacttctctgttcggagacatgagaagtatgattacttcagtgttagttttcttaatttttttttycccctatttgtcccttgtcactttgttgcaagctagaaatctgtgggttatacatagggcagctctttgtgaaagtggtttattccactggagaaaggggattgaaaatcagttagaaccaatgtatttcttgccccacggaacactattcctataagatagctgaaagaagctgctgtgaggagctcagctccaaacacaggatcagcmccttgtataggaattcccatgaattatgacttctcattctgttttatcagagtgcatatatgtcctacttcagsaaaagtaaaacagtcatttacgaaagaaagtcaatctgtatcctaagcattttaataaaaagttaaaacaaataygctatttcctttttttttt

SEQ ID NO: 40 - DNA, 3016 bp, Homo sapiens
aggggtgtgacgtacatccggcgagtagctggcggtccmgggtgctgctggttagtgtgctctgagggagggtccgagcyagccgctgttttgccggaggagcccctcaggcctaagcattaataatgtctttcatctttgagtggatctacaatggcttcagcagtgtgctccagttcctaggactgtacaagaaatctggaaaacttgtattcttaggtttggataatgcaggcaaaaccactcttcttcacatgctcaaagatgacagattgggccaacatgttccaacactacatccgacatcagaagagctaacaattgctggaatgacctttacaacttttgatcttggtgggcacgagcaagcacgtcgcgtttggaaaaattatctcccagcaattaatgggattgtctttctggtggactgtgcagatcattctcgcctcgtggaatccaaagttgagcttaatgctttaatgactgatgaaacaatatccaatgtgccaatccttatcttgggtaacaaaattgacagaacagatgcaatcagtgaagaaaaactccgtgagatatttgggctttatggacagaccacaggaaaggggaatgtgaccctgaaggagctgaatgctcgccccatggaagtgttcatgtgcagtgtgctcaaraggcaaggttacggcgagggtttccgctggctctcccagtatattgactgatgtttggacggtgaaaataaaagagttttacttctctggactgatcctattcacagcttcctcatgaacttttctaatagaacaaggaaagctctccaaccatgtctggcgttgagaagccaagagtctctgtcaactctctcattgcccagtggtgacatgtgctcttctccacactgttgggaggtaatgctgccccacgtgctggtgcaggtcagtatcctgggacttggaagctggcaggatttgccgggtaaagctgtatgccatcatggggcacctgaaaagaaaaacacgtctcaccactgtggttgattcaaaagaaagtgattctattttttaaagaaagcgttgttaatgtaattggtatccctcctaactttttgagttcacaatttacttggtccagagttttctattcttttttttttttaaactaatgaatgacatttagatacttcataaaattatgaacagatatggaggccagagctcatttgggtaaacttactcctgctgagttagcaggttggtgagagaagctcccctgagctcacctgtctctctgactgccttggagtaggtggcataaccttgtgcacagagaactagaaaaggggcagaaccccggccttgcagttgtggcaggtttccactgtggtaagctaggttcattcctcatcaaggaatgtgtagcagattgttcactgtggaggagttaattatagaatgggttattgttgttattcttactcatgaagttacagattttagccagtctttgcttttatacttttgtgaaatttaatttctctctatagcaccttcctttttcgttttcagttatcaaaagtgactttgacctcataaaagagttgagaacatctctcgtgtcacatactgcaggtgcatcagttacttttgcacagattctagggggacatttttctgaataggaagacaggacaaagttaacagcttaagggctcttaattctgtgagttgaggacttaaaagtattgtagcatttgtttggatccatgaaaaatgtattcagtgggctttaaaatttccatttgcagaatttggtctctcaggctgtttgggagctcttttttttacattttttctcctttgacacctattttattggtgtttaaagtaaaggttaacatctgtagcttttccaggtttttttttttttttttttttttttgrtatgaaattgtctttctccattgcagaaataagctagggaaacactaacccaaaaactttctgtagagctgttcctttggaggcagcatcacttattggcagtaaagactcagtataaaagcaccrgcatccctacttgggtgatggggattaattttatagcattccattttcctagtgccacatgtgaaattggattttgatgatcttaatctatattctacccttataataaaagatcaaaagatatatctcctatgaacagattggagataggagatgaaaagttgggaggatgtctttattctaatgtgagggtagggaaaatgtggataacattactggggtgarggaggcattgttctttagttggagttctcattyttattctccagtactgacttgtggggaaagcatactttttcactgccaggtactgaatgcagaggctcagtgaagtatatatgtgggaagtgcatgcatttcgtttattagcaaacatagctggattaagacaaagttgttggtttggaaaggggttaaagccttaagtgaacaaatctagctaacagtgaatgaactaggtaatataacttgcatatttttaatttcctttggttaaaggtcccccatacttctctgttcggagacatgagaagtatgattacttcagtgttagttttcttaatttttttttycccctatttgtcccttgtcactttgttgcaagctagaaatctgtgggttatacatagggcagctctttgtgaaagtggtttattccactggagaaaggggattgaaaatcagttagaaccaatgtatttcttgccccacggaacactattcctataagatagctgaaagaagctgctgtgaggagctcagctccaaacacaggatcagcmccttgtataggaattcccatgaattatgacttctcattctgttttatcagagtgcatatatgtcctacttcagsaaaagtaaaacagtcatttacgaaagaaagtcaatctgtatcctaagcattttaataaaaagttaaaacaaataygctatttcctttttttttt

SEQ ID NO: 41 - DNA, 2965 bp, Homo sapiens
cccggggaggggtgtgacgtacatccggcgagtagctggcggtccmgggtgctgctggttagtgtgctctgagggagggtccgagcyagccgctgttttgccggaggagcccctcaggccgtagtaagcattaataatgtctttcatctttgagtggatctacaatggcttcagcagtgtgctccagttcctaggactgtacaagaaatctggaaaacttgtattcttaggtttggataatgcaggcaaaaccactcttcttcacatgctcaaagatgacagattgggccaacatgttccaacactacatccgacatcagaagagctaacaattgctggaatgacctttacaacttttgatcttggtgggcacgagcaaggtaaatcattctcgcctcgtggaatccaaagttgagcttaatgctttaatgactgatgaaacaatatccaatgtgccaatccttatcttgggtaacaaaattgacagaacagatgcaatcagtgaagaaaaactccgtgagatatttgggctttatggacagaccacaggaaaggggaatgtgaccctgaaggagctgaatgctcgccccatggaagtgttcatgtgcagtgtgctcaaraggcaaggttacggcgagggtttccgctggctctcccagtatattgactgatgtttggacggtgaaaataaaagagttttacttctctggactgatcctattcacagcttcctcatgaacttttctaatagaacaaggaaagctctccaaccatgtctggcgttgagaagccaagagtctctgtcaactctctcattgcccagtggtgacatgtgctcttctccacactgttgggaggtaatgctgccccacgtgctggtgcaggtcagtatcctgggacttggaagctggcaggatttgccgggtaaagctgtatgccatcatggggcacctgaaaagaaaaacacgtctcaccactgtggttgattcaaaagaaagtgattctattttttaaagaaagcgttgttaatgtaattggtatccctcctaactttttgagttcacaatttacttggtccagagttttctattcttttttttttttaaactaatgaatgacatttagatacttcataaaattatgaacagatatggaggccagagctcatttgggtaaacttactcctgctgagttagcaggttggtgagagaagctcccctgagctcacctgtctctctgactgccttggagtaggtggcataaccttgtgcacagagaactagaaaaggggcagaaccccggccttgcagttgtggcaggtttccactgtggtaagctaggttcattcctcatcaaggaatgtgtagcagattgttcactgtggaggagttaattatagaatgggttattgttgttattcttactcatgaagttacagattttagccagtctttgcttttatacttttgtgaaatttaatttctctctatagcaccttcctttttcgttttcagttatcaaaagtgactttgacctcataaaagagttgagaacatctctcgtgtcacatactgcaggtgcatcagttacttttgcacagattctagggggacatttttctgaataggaagacaggacaaagttaacagcttaagggctcttaattctgtgagttgaggacttaaaagtattgtagcatttgtttggatccatgaaaaatgtattcagtgggctttaaaatttccatttgcagaatttggtctctcaggctgtttgggagctcttttttttacattttttctcctttgacacctattttattggtgtttaaagtaaaggttaacatctgtagcttttccaggtttttttttttttttttttttttttgrtatgaaattgtctttctccattgcagaaataagctagggaaacactaacccaaaaactttctgtagagctgttcctttggaggcagcatcacttattggcagtaaagactcagtataaaagcaccrgcatccctacttgggtgatggggattaattttatagcattccattttcctagtgccacatgtgaaattggattttgatgatcttaatctatattctacccttataataaaagatcaaaagatatatctcctatgaacagattggagataggagatgaaaagttgggaggatgtctttattctaatgtgagggtagggaaaatgtggataacattactggggtgarggaggcattgttctttagttggagttctcattyttattctccagtactgacttgtggggaaagcatactttttcactgccaggtactgaatgcagaggctcagtgaagtatatatgtgggaagtgcatgcatttcgtttattagcaaacatagctggattaagacaaagttgttggtttggaaaggggttaaagccttaagtgaacaaatctagctaacagtgaatgaactaggtaatataacttgcatatttttaatttcctttggttaaaggtcccccatacttctctgttcggagacatgagaagtatgattacttcagtgttagttttcttaatttttttttycccctatttgtcccttgtcactttgttgcaagctagaaatctgtgggttatacatagggcagctctttgtgaaagtggtttattccactggagaaaggggattgaaaatcagttagaaccaatgtatttcttgccccacggaacactattcctataagatagctgaaagaagctgctgtgaggagctcagctccaaacacaggatcagcmccttgtataggaattcccatgaattatgacttctcattctgttttatcagagtgcatatatgtcctacttcagsaaaagtaaaacagtcatttacgaaagaaagtcaatctgtatcctaagcattttaataaaaagttaaaacaaataygctatttcctttttttttt

SEQ ID NO: 42 - DNA, 3041 bp, Homo sapiens
aagtagcacggattgctcatccgatccgtgccgccgcagggagtgtgtcaagttacagaggcgccggaatcggcccctgmgctcctcgccagccgccacgacccacctctgcccatggggccctccrtgtgcgccccttcgcccggggactgaaactgactggcccgggagacacgaggcgcccagaaggactgacagcgcggcaccaactgctctgcagacacttgaagggaaagactgggcggagagaaggagagccggtcagattcccctaactttcctggacttggaamgttcttcgaaataacttttttctyacctaggtgtaccccaattaccgctggttgtgctttttcggcacttcctctcctactgctaatttttccgtcctctttgccgggagcagcggaaagggacgttttccagcgatacaagccctttccccctgccycgcagtttggatagagccttttggcagcggctgtcgcctttatttattctatttatttatttattggttctcaagacgcgagaggatggtagcggagcgcacccacaaagcggcagccaccggtgcccgcggccctggggagttgggcgcgcccgggacggtggctctggtggcggcgcgggcggagcgcggcgcacggctgccgagtccagggtcgtgcgggctgctgacgctggccctctgctcgctggcactcagcctgctcgcccactttcggacggccgagctgcaggcccgggtgctgcgcctggaagcggagcgcggggagcagcaaatggagacrgctattttgggacgagtcaatcaactgctggacgagaaatggaagctccactcaaggaggcgccgggaggccccaaagacatctccaggatgtaactgcccaccagggtcccactggaagacccggactcccaggtcaaccaggmactagaggtttccctggatttccgggtcccattgggctggacggcaaaccgggccacccaggaccaaagggcgacatgggtctgacgggtcccccaggacagccgggaccccagggacaaaaaggagaaaagggtcagtgtggagagtacccacaccgggagtgcctaagcagcatgccagcagctctgcgctccagccarataattgccctgaagctgctgcctctcctcaattcagtgcgactggctccacccccggtcataaaaaggcggacrttccagggcgaacagagccaggccagcatccaaggtccaccagggcccccaggcccccctggaccaagtggacctctggggcacccaggactgccagggcctatggggccacctggcttacctgggcctcctggaccaaagggagacccagggatccagggctaccacggccggaagggagaacggggcatgccagggatgccaggcaagcatggagccaagggggcgcccggaattgcsgtggctgggatgaagggtgagccagggatcccaggaaccaagggtgagaagggggctgaaggctcccctgggcttcctggcctcctggggcagaagggagagaaaggcgatgctggcaactccattggaggaggcagaggggaacctggccctccagggctccctgggcccccagggccaaagggagaagcaggtgtcgatggccaggttggccccccagggcagccaggagacaagggggagcgtggagcagctggagaacagggaccagatggccccaagggctccaagggagaaccagggaaaggagagatggtggattacaatggaaacatcaatgaggctctccaggagatccggacgctggccttgatggggcctcctggtcttcctgggcaaattggcccacctggagctccagggattccaggccagaagggggagattggactgccaggccctccaggacacgatggggaaaagggacctcgcggtaaaccaggagacatgggccctcctggtccccaaggccccccaggaaaggatggacctccaggagtgaagggagaaaacgggcasccagggagcccaggagagaagggggaaaaaggggagacaggacaagcaggctcaccgggagagaaaggagaagccggggagaagggcaatccaggagcagaggttcctgggctgccagggccagaggggcctcccggacctccggggctccaaggtgttcctggaccaaagggggaagcaggactagatggagcaaaaggagagaaaggcttccagggagaaaaaggagaccgtggtcccctgggactacccggagcttcaggtttggacggcaggcctgggccaccgggtactccaggaccaattggagttccaggcccagcgggaccaaagggcgagaggggcagcaaaggagaccctgggatgacaggaccaacgggagcagctgggcttcctggtttacatggaccacccggggacaagggaaaccggggggagagggggaagaaaggctctagagggcctaaaggggataagggagaccaaggagcgcctggattagatgccccctgcccattgggcgaagatggcttaccagtccaaggctgctggaacaagtgatgcctctaaccttggattggcctgtgtgtgtgtttgtacatagaatatttatttttatacagttttcactttttgaaaatgccagaagtatgatgcatcttacagattattaaaaaagaaagaaaaacctgcatattttgtacagaaaatatcaacctcttcccttttgtttacaagatgttttgtataagcctatgtctctaatacattttttgtttggtcgtaatgtmtgcatgatatttgtgcacatttattaagtatcgaagsttaataaattattgtgtcctggtgccaaagggggccagccagaactgaggtgctggctagctcatgtgtgaattcacataaatgtagaggtccatgatatttgctaagctaggtgtgtctaagagtattttaaacccttatggattttcattattaaaggaaatgaaacatggcaattc

SEQ ID NO: 43 - DNA, 2950 bp, Homo sapiens
aagtagcacggattgctcatccgatccgtgccgccgcagggagtgtgtcaagttacagaggcgccggaatcggcccctgmgctcctcgccagccgccacgacccacctctgcccatggggccctccrtgtgcgccccttcgcccggggactgaaactgactggcccgggagacacgaggcgcccagaaggactgacagcgcggcaccaactgctctgcagacacttgaagggaaagactgggcggagagaaggagagccggtcagattcccctaactttcctggacttggaamgttcttcgaaataacttttttctyacctaggtgtaccccaattaccgctggttgtgctttttcggcacttcctctcctactgctaatttttccgtcctctttgccgggagcagcggaaagggacgttttccagcgatacaagccctttccccctgccycgcagtttggatagagccttttggcagcggctgtcgcctttatttattctatttatttatttattggttctcaagacgcgagaggatggtagcggagcgcacccacaaagcggcagccaccggtgcccgcggccctggggagttgggcgcgcccgggacggtggctctggtggcggcgcgggcggagcgcggcgcacggctgccgagtccagggtcgtgcgggctgctgacgctggccctctgctcgctggcactcagcctgctcgcccactttcggacggccgagctgcaggcccgggtgctgcgcctggaagcggagcgcggggagcagcaaatggagacrgctattttgggacgagtcaatcaactgctggacgagaaatggaagctccactcaaggaggcgccgggaggccccaaagacatctccaggatgtaactgcccaccaggcgagaaggggtcccccggagacgctgggctgtccatcattggtccccgcggcccccctggtcaaccaggmactagaggtttccctggatttccgggtcccattgggctggacggcaaaccgggccacccaggaccaaagggcgacatgggtctgacgggtcccccaggacagccgggaccccagggacaaaaaggagaaaagggtcagtgtggagagtacccacaccggggcgaacagagccaggccagcatccaaggtccaccagggcccccaggcccccctggaccaagtggacctctggggcacccaggactgccagggcctatggggccacctggcttacctgggcctcctggaccaaagggagacccagggatccagggctaccacggccggaagggagaacggggcatgccagggatgccaggcaagcatggagccaagggggcgcccggaattgcsgtggctgggatgaagggtgagccagggatcccaggaaccaagggtgagaagggggctgaaggctcccctgggcttcctggcctcctggggcagaagggagagaaaggcgatgctggcaactccattggaggaggcagaggggaacctggccctccagggctccctgggcccccagggccaaagggagaagcaggtgtcgatggccaggttggccccccagggcagccaggagacaagggggagcgtggagcagctggagaacagggaccagatggccccaagggctccaagggagaaccagggaaaggagagatggtggattacaatggaaacatcaatgaggctctccaggagatccggacgctggccttgatggggcctcctggtcttcctgggcaaattggcccacctggagctccagggattccaggccagaagggggagattggactgccaggccctccaggacacgatggggaaaagggacctcgcggtaaaccaggagacatgggccctcctggtccccaaggccccccaggaaaggatggacctccaggagtgaagggagaaaacgggcasccagggagcccaggagagaagggggaaaaaggggagacaggacaagcaggctcaccgggagagaaaggagaagccggggagaagggcaatccaggagcagaggttcctgggctgccagggccagaggggcctcccggacctccggggctccaaggtgttcctggaccaaagggggaagcaggactagatggagcaaaaggagagaaaggcttccagggagaaaaaggagaccgtggtcccctgggactacccggagcttcaggtttggacggcaggcctgggccaccgggtactccaggaccaattggagttccaggcccagcgggaccaaagggcgagaggggcagcaaaggagaccctgggatgacaggaccaacgggagcagctgggcttcctggtttacatggaccacccggggacaagggaaaccggggggagagggggaagaaaggctctagagggcctaaaggggataagggagaccaaggagcgcctggattagatgccccctgcccattgggcgaagatggcttaccagtccaaggctgctggaacaagtgatgcctctaaccttggattggcctgtgtgtgtgtttgtacatagaatatttatttttatacagttttcactttttgaaaatgccagaagtatgatgcatcttacagattattaaaaaagaaagaaaaacctgcatattttgtacagaaaatatcaacctcttcccttttgtttacaagatgttttgtataagcctatgtctctaatacattttttgtttggtcgtaatgtmtgcatgatatttgtgcacatttattaagtatcgaagsttaataaattattgtgtcctggtgccaaagggggccagccagaactgaggtgctggctagctcatgtgtgaattcacataaatgtagaggtccatgatatttgctaagctaggtgtgtctaagagtattttaaacccttatggattttcattattaaaggaaatgaaacatggcaattc

SEQ ID NO: 44 - DNA, 3035 bp, Homo sapiens
aagtagcacggattgctcatccgatccgtgccgccgcagggagtgtgtcaagttacagaggcgccggaatcggcccctgmgctcctcgccagccgccacgacccacctctgcccatggggccctccrtgtgcgccccttcgcccggggactgaaactgactggcccgggagacacgaggcgcccagaaggactgacagcgcggcaccaactgctctgcagacacttgaagggaaagactgggcggagagaaggagagccggtcagattcccctaactttcctggacttggaamgttcttcgaaataacttttttctyacctaggtgtaccccaattaccgctggttgtgctttttcggcacttcctctcctactgctaatttttccgtcctctttgccgggagcagcggaaagggacgttttccagcgatacaagccctttccccctgccycgcagtttggatagagccttttggcagcggctgtcgcctttatttattctatttatttatttattggttctcaagacgcgagaggatggtagcggagcgcacccacaaagcggcagccaccggtgcccgcggccctggggagttgggcgcgcccgggacggtggctctggtggcggcgcgggcggagcgcggcgcacggctgccgagtccagggtcgtgcgggctgctgacgctggccctctgctcgctggcactcagcctgctcgcccactttcggacggccgagctgcaggcccgggtgctgcgcctggaagcggagcgcggggagcagcaaatggagacrgctattttgggacgagtcaatcaactgctggacgagaaatggaagctccactcaaggaggcgccgggaggccccaaagacatctccaggatgtaactgcccaccagggtcccactggaagacccggactcccaggggacaaaggtgccattgggatgcctggacgtgtggggtcccccggagacgctgggctgtccatcattggtccccgcggcccccctggtcaaccaggmactagaggtttccctggatttccgggtcccattgggctggacggcaaaccgggccacccaggaccaaagggcgacatgggtctgacgggtcccccaggacagccgggaccccagggacaaaaaggagaaaagggtcagtgtggagagtacccacaccggctgctgcctctcctcaattcagtgcgactggctccacccccggtcataaaaaggcggacrttccagggcgaacagagccaggccagcatccaaggtccaccagggcccccaggcccccctggaccaagtggacctctggggcacccaggactgccagggcctatggggccacctggcttacctgggcctcctggaccaaagggagacccagggatccagggctaccacggccggaagggagaacggggcatgccagggatgccaggcaagcatggagccaagggggcgcccggaattgcsgtggctgggatgaagggtgagccagggatcccaggaaccaagggtgagaagggggctgaaggctcccctgggcttcctggcctcctggggcagaagggagagaaaggcgatgctggcaactccattggaggaggcagaggggaacctggccctccagggctccctgggcccccagggccaaagggagaagcaggtgtcgatggccaggttggccccccagggcagccaggagacaagggggagcgtggagcagctggagaacagggaccagatggccccaagggctccaagggagaaccagggaaaggagagatggtggattacaatggaaacatcaatgaggctctccaggagatccggacgctggccttgatggggcctcctggtcttcctgggcaaattggcccacctggagctccagggattccaggccagaagggggagattggactgccaggccctccaggacacgatggggaaaagggacctcgcggtaaaccaggagacatgggccctcctggtccccaaggccccccaggaaaggatggacctccaggagtgaagggagaaaacgggcasccagggagcccaggagagaagggggaaaaaggggagacaggacaagcaggctcaccgggagagaaaggagaagccggggagaagggcaatccaggagcagaggttcctgggctgccagggccagaggggcctcccggacctccggggctccaaggtgttcctggaccaaagggggaagcaggactagatggagcaaaaggagagaaaggcttccagggagaaaaaggagaccgtggtcccctgggactacccggtactccaggaccaattggagttccaggcccagcgggaccaaagggcgagaggggcagcaaaggagaccctgggatgacaggaccaacgggagcagctgggcttcctggtttacatggaccacccggggacaagggaaaccggggggagagggggaagaaaggctctagagggcctaaaggggataagggagaccaaggagcgcctggattagatgccccctgcccattgggcgaagatggcttaccagtccaaggctgctggaacaagtgatgcctctaaccttggattggcctgtgtgtgtgtttgtacatagaatatttatttttatacagttttcactttttgaaaatgccagaagtatgatgcatcttacagattattaaaaaagaaagaaaaacctgcatattttgtacagaaaatatcaacctcttcccttttgtttacaagatgttttgtataagcctatgtctctaatacattttttgtttggtcgtaatgtmtgcatgatatttgtgcacatttattaagtatcgaagsttaataaattattgtgtcctggtgccaaagggggccagccagaactgaggtgctggctagctcatgtgtgaattcacataaatgtagaggtccatgatatttgctaagctaggtgtgtctaagagtattttaaacccttatggattttcattattaaaggaaatgaaacatggcaattc

SEQ ID NO: 45 - DNA, 3136 bp, Homo sapiens
aagtagcacggattgctcatccgatccgtgccgccgcagggagtgtgtcaagttacagaggcgccggaatcggcccctgmgctcctcgccagccgccacgacccacctctgcccatggggccctccrtgtgcgccccttcgcccggggactgaaactgactggcccgggagacacgaggcgcccagaaggactgacagcgcggcaccaactgctctgcagacacttgaagggaaagactgggcggagagaaggagagccggtcagattcccctaactttcctggacttggaamgttcttcgaaataacttttttctyacctaggtgtaccccaattaccgctggttgtgctttttcggcacttcctctcctactgctaatttttccgtcctctttgccgggagcagcggaaagggacgttttccagcgatacaagccctttccccctgccycgcagtttggatagagccttttggcagcggctgtcgcctttatttattctatttatttatttattggttctcaagacgcgagaggatggtagcggagcgcacccacaaagcggcagccaccggtgcccgcggccctggggagttgggcgcgcccgggacggtggctctggtggcggcgcgggcggagcgcggcgcacggctgccgagtccagggtcgtgcgggctgctgacgctggccctctgctcgctggcactcagcctgctcgcccactttcggacggccgagctgcaggcccgggtgctgcgcctggaagcggagcgcggggagcagcaaatggagacrgctattttgggacgagtcaatcaactgctggacgagaaatggaagctccactcaaggaggcgccgggaggccccaaagacatctccaggatgtaactgcccaccagcatttcagggtcccactggaagacccggactcccaggggacaaaggtgccattgggatgcctggacgtgtggggtcccccggagacgctgggctgtccatcattggtccccgcggcccccctggtcaaccaggmactagaggtttccctggatttccgggtcccattgggctggacggcaaaccgggccacccaggaccaaagggcgacatgggtctgacgggtcccccaggacagccgggaccccagggacaaaaaggagaaaagggtcagtgtggagagtacccacaccgggagtgcctaagcagcatgccagcagctctgcgctccagccarataattgccctgaagctgctgcctctcctcaattcagtgcgactggctccacccccggtcataaaaaggcggacrttccagggcgaacagagccaggccagcatccaaggtccaccagggcccccaggcccccctggaccaagtggacctctggggcacccaggactgccagggcctatggggccacctggcttacctgggcctcctggaccaaagggagacccagggatccagggctaccacggccggaagggagaacggggcatgccagggatgccaggcaagcatggagccaagggggcgcccggaattgcsgtggctgggatgaagggtgagccagggatcccaggaaccaagggtgagaagggggctgaaggctcccctgggcttcctggcctcctggggcagaagggagagaaaggcgatgctggcaactccattggaggaggcagaggggaacctggccctccagggctccctgggcccccagggccaaagggagaagcaggtgtcgatggccaggttggccccccagggcagccaggagacaagggggagcgtggagcagctggagaacagggaccagatggccccaagggctccaagggagaaccagggaaaggagagatggtggattacaatggaaacatcaatgaggctctccaggagatccggacgctggccttgatggggcctcctggtcttcctgggcaaattggcccacctggagctccagggattccaggccagaagggggagattggactgccaggccctccaggacacgatggggaaaagggacctcgcggtaaaccaggagacatgggccctcctggtccccaaggccccccaggaaaggatggacctccaggagtgaagggagaaaacgggcasccagggagcccaggagagaagggggaaaaaggggagacaggacaagcaggctcaccgggagagaaaggagaagccggggagaagggcaatccaggagcagaggttcctgggctgccagggccagaggggcctcccggacctccggggctccaaggtgttcctggaccaaagggggaagcaggactagatggagcaaaaggagagaaaggcttccagggagaaaaaggagaccgtggtcccctgggactacccggagcttcaggtttggacggcaggcctgggccaccgggtactccaggaccaattggagttccaggcccagcgggaccaaagggcgagaggggcagcaaaggagaccctgggatgacaggaccaacgggagcagctgggcttcctggtttacatggaccacccggggacaagggaaaccggggggagagggggaagaaaggctctagagggcctaaaggggataagggagaccaaggagcgcctggattagatgccccctgcccattgggcgaagatggcttaccagtccaaggctgctggaacaagtgatgcctctaaccttggattggcctgtgtgtgtgtttgtacatagaatatttatttttatacagttttcactttttgaaaatgccagaagtatgatgcatcttacagattattaaaaaagaaagaaaaacctgcatattttgtacagaaaatatcaacctcttcccttttgtttacaagatgttttgtataagcctatgtctctaatacattttttgtttggtcgtaatgtmtgcatgatatttgtgcacatttattaagtatcgaagsttaataaattattgtgtcctggtgccaaagggggccagccagaactgaggtgctggctagctcatgtgtgaattcacataaatgtagaggtccatgatatttgctaagctaggtgtgtctaagagtattttaaacccttatggattttcattattaaaggaaatgaaacatggcaattc

SEQ ID NO: 46 - DNA, 3062 bp, Homo sapiens
aagtagcacggattgctcatccgatccgtgccgccgcagggagtgtgtcaagttacagaggcgccggaatcggcccctgmgctcctcgccagccgccacgacccacctctgcccatggggccctccrtgtgcgccccttcgcccggggactgaaactgactggcccgggagacacgaggcgcccagaaggactgacagcgcggcaccaactgctctgcagacacttgaagggaaagactgggcggagagaaggagagccggtcagattcccctaactttcctggacttggaamgttcttcgaaataacttttttctyacctaggtgtaccccaattaccgctggttgtgctttttcggcacttcctctcctactgctaatttttccgtcctctttgccgggagcagcggaaagggacgttttccagcgatacaagccctttccccctgccycgcagtttggatagagccttttggcagcggctgtcgcctttatttattctatttatttatttattggttctcaagacgcgagaggatggtagcggagcgcacccacaaagcggcagccaccggtgcccgcggccctggggagttgggcgcgcccgggacggtggctctggtggcggcgcgggcggagcgcggcgcacggctgccgagtccagggtcgtgcgggctgctgacgctggccctctgctcgctggcactcagcctgctcgcccactttcggacggccgagctgcaggcccgggtgctgcgcctggaagcggagcgcggggagcagcaaatggagacrgctattttgggacgagtcaatcaactgctggacgagaaatggaagctccactcaaggaggcgccgggaggccccaaagacatctccaggatgtaactgcccaccagggtcccactggaagacccggactcccaggggacaaaggtgccattgggatgcctggacgtgtggggtcccccggagacgctgggctgtccatcattggtccccgcggcccccctggtcaaccaggmactagaggtttccctggatttccgggtcccattgggctggacggcaaaccgggccacccaggaccaaagggcgacatgggtctgacgggtcccccaggacagccgggaccccagggacaaaaaggagaaaagggtcagtgtggagagtacccacaccgggagtgcctaagcagcatgccagcagctctgcgctccagccarataattgccctgaagggcgaacagagccaggccagcatccaaggtccaccagggcccccaggcccccctggaccaagtggacctctggggcacccaggactgccagggcctatggggccacctggcttacctgggcctcctggaccaaagggagacccagggatccagggctaccacggccggaagggagaacggggcatgccagggatgccaggcaagcatggagccaagggggcgcccggaattgcsgtggctgggatgaagggtgagccagggatcccaggaaccaagggtgagaagggggctgaaggctcccctgggcttcctggcctcctggggcagaagggagagaaaggcgatgctggcaactccattggaggaggcagaggggaacctggccctccagggctccctgggcccccagggccaaagggagaagcaggtgtcgatggccaggttggccccccagggcagccaggagacaagggggagcgtggagcagctggagaacagggaccagatggccccaagggctccaagggagaaccagggaaaggagagatggtggattacaatggaaacatcaatgaggctctccaggagatccggacgctggccttgatggggcctcctggtcttcctgggcaaattggcccacctggagctccagggattccaggccagaagggggagattggactgccaggccctccaggacacgatggggaaaagggacctcgcggtaaaccaggagacatgggccctcctggtccccaaggccccccaggaaaggatggacctccaggagtgaagggagaaaacgggcasccagggagcccaggagagaagggggaaaaaggggagacaggacaagcaggctcaccgggagagaaaggagaagccggggagaagggcaatccaggagcagaggttcctgggctgccagggccagaggggcctcccggacctccggggctccaaggtgttcctggaccaaagggggaagcaggactagatggagcaaaaggagagaaaggcttccagggagaaaaaggagaccgtggtcccctgggactacccggagcttcaggtttggacggcaggcctgggccaccgggtactccaggaccaattggagttccaggcccagcgggaccaaagggcgagaggggcagcaaaggagaccctgggatgacaggaccaacgggagcagctgggcttcctggtttacatggaccacccggggacaagggaaaccggggggagagggggaagaaaggctctagagggcctaaaggggataagggagaccaaggagcgcctggattagatgccccctgcccattgggcgaagatggcttaccagtccaaggctgctggaacaagtgatgcctctaaccttggattggcctgtgtgtgtgtttgtacatagaatatttatttttatacagttttcactttttgaaaatgccagaagtatgatgcatcttacagattattaaaaaagaaagaaaaacctgcatattttgtacagaaaatatcaacctcttcccttttgtttacaagatgttttgtataagcctatgtctctaatacattttttgtttggtcgtaatgtmtgcatgatatttgtgcacatttattaagtatcgaagsttaataaattattgtgtcctggtgccaaagggggccagccagaactgaggtgctggctagctcatgtgtgaattcacataaatgtagaggtccatgatatttgctaagctaggtgtgtctaagagtattttaaacccttatggattttcattattaaaggaaatgaaacatggcaattc

SEQ ID NO: 47 - DNA, 2807 bp, Homo sapiens
aagtagcacggattgctcatccgatccgtgccgccgcagggagtgtgtcaagttacagaggcgccggaatcggcccctgmgctcctcgccagccgccacgacccacctctgcccatggggccctccrtgtgcgccccttcgcccggggactgaaactgactggcccgggagacacgaggcgcccagaaggactgacagcgcggcaccaactgctctgcagacacttgaagggaaagactgggcggagagaaggagagccggtcagattcccctaactttcctggacttggaamgttcttcgaaataacttttttctyacctaggtgtaccccaattaccgctggttgtgctttttcggcacttcctctcctactgctaatttttccgtcctctttgccgggagcagcggaaagggacgttttccagcgatacaagccctttccccctgccycgcagtttggatagagccttttggcagcggctgtcgcctttatttattctatttatttatttattggttctcaagacgcgagaggatggtagcggagcgcacccacaaagcggcagccaccggtgcccgcggccctggggagttgggcgcgcccgggacggtggctctggtggcggcgcgggcggagcgcggcgcacggctgccgagtccagggtcgtgcgggctgctgacgctggccctctgctcgctggcactcagcctgctcgcccactttcggacggccgagctgcaggcccgggtgctgcgcctggaagcggagcgcggggagcagcaaatggagacrgctattttgggacgagtcaatcaactgctggacgagaaatggaagctccactcaaggaggcgccgggaggccccaaagacatctccaggatgtaactgcccaccagggtcccactggaagacccggactcccaggtcaaccaggmactagaggtttccctggatttccgggtcccattgggctggacggcaaaccgggccacccaggaccaaagggcgacatgggtctgacgggtcccccaggacagccgggaccccagggacaaaaaggagaaaagggtcagtgtggagagtacccacaccgggagtgcctaagcagcatgccagcagctctgcgctccagccarataattgccctgaagggcgaacagagccaggccagcatccaaggtccaccagggcccccaggcccccctggaccaagtggacctctggggcacccaggactgccagggcctatggggccacctggcttacctgggcctcctggaccaaagggagacccagggatccagggctaccacggccggaagggagaacggggcatgccagggatgccaggcaagcatggagccaagggggcgcccggaattgcsgtggctgggatgaagggtgagccagggatcccaggaaccaagggtgagaagggggctgaaggctcccctgggcttcctggcctcctggggcagaagggagagaaaggcgatgctggcaactccattggaggaggcagaggggaacctggccctccagggctccctgggcccccagggccaaagggagaagcaggtgtcgatggccaggttggccccccagggcagccaggagacaagggggagcgtggagcagctggagaacagggaccagatggccccaagggctccaagggagaaccagggaaaggagagatggtggattacaatggaaacatcaatgaggctctccaggagatccggacgctggccttgatggggcctcctggtcttcctgggcaaattggcccacctggagctccagggattccaggccagaagggggagattggactgccaggccctccaggacacgatggggaaaagggacctcgcggtaaaccaggagacatgggccctcctggtccccaaggccccccaggaaaggatggacctccaggagtgaagggagaaaacgggcasccagggagcccaggagagaagggggaaaaaggggagacaggacaagcaggctcaccggttcctgggctgccagggccagaggggcctcccggacctccggggctccaaggtgttcctggaccaaagggggaagcaggactagatggagcaaaaggagagaaaggcttccagggagaaaaaggagaccgtggtcccctgggactacccggtactccaggaccaattggagttccaggcccagcgggaccaaagggcgagaggggcagcaaaggagaccctgggatgacaggaccaacgggagcagctgggcttcctggtttacatggaccacccggggacaagggaaaccggggcgaagatggcttaccagtccaaggctgctggaacaagtgatgcctctaaccttggattggcctgtgtgtgtgtttgtacatagaatatttatttttatacagttttcactttttgaaaatgccagaagtatgatgcatcttacagattattaaaaaagaaagaaaaacctgcatattttgtacagaaaatatcaacctcttcccttttgtttacaagatgttttgtataagcctatgtctctaatacattttttgtttggtcgtaatgtmtgcatgatatttgtgcacatttattaagtatcgaagsttaataaattattgtgtcctggtgccaaagggggccagccagaactgaggtgctggctagctcatgtgtgaattcacataaatgtagaggtccatgatatttgctaagctaggtgtgtctaagagtattttaaacccttatggattttcattattaaaggaaatgaaacatggcaattc

SEQ ID NO: 48 - DNA, 2949 bp, Homo sapiens
aagtagcacggattgctcatccgatccgtgccgccgcagggagtgtgtcaagttacagaggcgccggaatcggcccctgmgctcctcgccagccgccacgacccacctctgcccatggggccctccrtgtgcgccccttcgcccggggactgaaactgactggcccgggagacacgaggcgcccagaaggactgacagcgcggcaccaactgctctgcagacacttgaagggaaagactgggcggagagaaggagagccggtcagattcccctaactttcctggacttggaamgttcttcgaaataacttttttctyacctaggtgtaccccaattaccgctggttgtgctttttcggcacttcctctcctactgctaatttttccgtcctctttgccgggagcagcggaaagggacgttttccagcgatacaagccctttccccctgccycgcagtttggatagagccttttggcagcggctgtcgcctttatttattctatttatttatttattggttctcaagacgcgagaggatggtagcggagcgcacccacaaagcggcagccaccggtgcccgcggccctggggagttgggcgcgcccgggacggtggctctggtggcggcgcgggcggagcgcggcgcacggctgccgagtccagggtcgtgcgggctgctgacgctggccctctgctcgctggcactcagcctgctcgcccactttcggacggccgagctgcaggcccgggtgctgcgcctggaagcggagcgcggggagcagcaaatggagacrgctattttgggacgagtcaatcaactgctggacgagaaatggaagctccactcaaggaggcgccgggaggccccaaagacatctccaggatgtaactgcccaccaggtaagcagggtcccccggagacgctgggctgtccatcattggtccccgcggcccccctggtcaaccaggmactagaggtttccctggatttccgggtcccattgggctggacggcaaaccgggccacccaggaccaaagggcgacatgggtctgacgggtcccccaggacagccgggaccccagggacaaaaaggagaaaagggtcagtgtggagagtacccacaccggggcgaacagagccaggccagcatccaaggtccaccagggcccccaggcccccctggaccaagtggacctctggggcacccaggactgccagggcctatggggccacctggcttacctgggcctcctggaccaaagggagacccagggatccagggctaccacggccggaagggagaacggggcatgccagggatgccaggcaagcatggagccaagggggcgcccggaattgcsgtggctgggatgaagggtgagccagggatcccaggaaccaagggtgagaagggggctgaaggctcccctgggcttcctggcctcctggggcagaagggagagaaaggcgatgctggcaactccattggaggaggcagaggggaacctggccctccagggctccctgggcccccagggccaaagggagaagcaggtgtcgatggccaggttggccccccagggcagccaggagacaagggggagcgtggagcagctggagaacagggaccagatggccccaagggctccaagggagaaccagggaaaggagagatggtggattacaatggaaacatcaatgaggctctccaggagatccggacgctggccttgatggggcctcctggtcttcctgggcaaattggcccacctggagctccagggattccaggccagaagggggagattggactgccaggccctccaggacacgatggggaaaagggacctcgcggtaaaccaggagacatgggccctcctggtccccaaggccccccaggaaaggatggacctccaggagtgaagggagaaaacgggcasccagggagcccaggagagaagggggaaaaaggggagacaggacaagcaggctcaccgggagagaaaggagaagccggggagaagggcaatccaggagcagaggttcctgggctgccagggccagaggggcctcccggacctccggggctccaaggtgttcctggaccaaagggggaagcaggactagatggagcaaaaggagagaaaggcttccagggagaaaaaggagaccgtggtcccctgggactacccggagcttcaggtttggacggcaggcctgggccaccgggtactccaggaccaattggagttccaggcccagcgggaccaaagggcgagaggggcagcaaaggagaccctgggatgacaggaccaacgggagcagctgggcttcctggtttacatggaccacccggggacaagggaaaccggggggagagggggaagaaaggctctagagggcctaaaggggataagggagaccaaggagcgcctggattagatgccccctgcccattgggcgaagatggcttaccagtccaaggctgctggaacaagtgatgcctctaaccttggattggcctgtgtgtgtgtttgtacatagaatatttatttttatacagttttcactttttgaaaatgccagaagtatgatgcatcttacagattattaaaaaagaaagaaaaacctgcatattttgtacagaaaatatcaacctcttcccttttgtttacaagatgttttgtataagcctatgtctctaatacattttttgtttggtcgtaatgtmtgcatgatatttgtgcacatttattaagtatcgaagsttaataaattattgtgtcctggtgccaaagggggccagccagaactgaggtgctggctagctcatgtgtgaattcacataaatgtagaggtccatgatatttgctaagctaggtgtgtctaagagtattttaaacccttatggattttcattattaaaggaaatgaaacatggcaattc

SEQ ID NO: 49 - DNA, 3100 bp, Homo sapiens
aagtagcacggattgctcatccgatccgtgccgccgcagggagtgtgtcaagttacagaggcgccggaatcggcccctgmgctcctcgccagccgccacgacccacctctgcccatggggccctccrtgtgcgccccttcgcccggggactgaaactgactggcccgggagacacgaggcgcccagaaggactgacagcgcggcaccaactgctctgcagacacttgaagggaaagactgggcggagagaaggagagccggtcagattcccctaactttcctggacttggaamgttcttcgaaataacttttttctyacctaggtgtaccccaattaccgctggttgtgctttttcggcacttcctctcctactgctaatttttccgtcctctttgccgggagcagcggaaagggacgttttccagcgatacaagccctttccccctgccycgcagtttggatagagccttttggcagcggctgtcgcctttatttattctatttatttatttattggttctcaagacgcgagaggatggtagcggagcgcacccacaaagcggcagccaccggtgcccgcggccctggggagttgggcgcgcccgggacggtggctctggtggcggcgcgggcggagcgcggcgcacggctgccgagtccagggtcgtgcgggctgctgacgctggccctctgctcgctggcactcagcctgctcgcccactttcggacggccgagctgcaggcccgggtgctgcgcctggaagcggagcgcggggagcagcaaatggagacrgctattttgggacgagtcaatcaactgctggacgagaaatggaagctccactcaaggaggcgccgggaggccccaaagacatctccaggatgtaactgcccaccaggtgctggtaacccgaggggtcccactggaagacccggactcccaggggacaaaggtgccattgggatgcctggacgtgtggggtcccccggagacgctgggctgtccatcattggtccccgcggcccccctggtcaaccaggmactagaggtttccctggatttccgggtcccattgggctggacggcaaaccgggccacccaggaccaaagggcgacatgggtctgacgggtcccccaggacagccgggaccccagggacaaaaaggagaaaagggtcagtgtggagagtacccacaccgggagtgcctaagcagcatgccagcagctctgcgctccagccarataattgccctgaagctgctgcctctcctcaattcagtgcgactggctccacccccggtcataaaaaggcggacrttccagggcgaacagagccaggccagcatccaaggtccaccagggcccccaggcccccctggaccaagtggacctctggggcacccaggactgccagggcctatggggccacctggcttacctgggcctcctggaccaaagggagacccagggatccagggctaccacggccggaagggagaacggggcatgccagggatgccaggcaagcatggagccaagggggcgcccggaattgcsgtggctgggatgaagggtgagccagggatcccaggaaccaagggtgagaagggggctgaaggctcccctgggcttcctggcctcctggggcagaagggagagaaaggcgatgctggcaactccattggaggaggcagaggggaacctggccctccagggctccctgggcccccagggccaaagggagaagcaggtgtcgatggccaggttggccccccagggcagccaggagacaagggggagcgtggagcagctggagaacagggaccagatggccccaagggctccaagggagaaccagggaaaggagagatggtggattacaatggaaacatcaatgaggctctccaggagatccggacgctggccttgatggggcctcctggtcttcctgggcaaattggcccacctggagctccagggattccaggccagaagggggagattggactgccaggccctccaggacacgatggggaaaagggacctcgcggtaaaccaggagacatgggccctcctggtccccaaggccccccaggaaaggatggacctccaggagtgaagggagaaaacgggcasccagggagcccaggagagaagggggaaaaaggggagacaggacaagcaggctcaccggttcctgggctgccagggccagaggggcctcccggacctccggggctccaaggtgttcctggaccaaagggggaagcaggactagatggagcaaaaggagagaaaggcttccagggagaaaaaggagaccgtggtcccctgggactacccggagcttcaggtttggacggcaggcctgggccaccgggtactccaggaccaattggagttccaggcccagcgggaccaaagggcgagaggggcagcaaaggagaccctgggatgacaggaccaacgggagcagctgggcttcctggtttacatggaccacccggggacaagggaaaccggggggagagggggaagaaaggctctagagggcctaaaggggataagggagaccaaggagcgcctggattagatgccccctgcccattgggcgaagatggcttaccagtccaaggctgctggaacaagtgatgcctctaaccttggattggcctgtgtgtgtgtttgtacatagaatatttatttttatacagttttcactttttgaaaatgccagaagtatgatgcatcttacagattattaaaaaagaaagaaaaacctgcatattttgtacagaaaatatcaacctcttcccttttgtttacaagatgttttgtataagcctatgtctctaatacattttttgtttggtcgtaatgtmtgcatgatatttgtgcacatttattaagtatcgaagsttaataaattattgtgtcctggtgccaaagggggccagccagaactgaggtgctggctagctcatgtgtgaattcacataaatgtagaggtccatgatatttgctaagctaggtgtgtctaagagtattttaaacccttatggattttcattattaaaggaaatgaaacatggcaattc

SEQ ID NO: 50 - DNA, 3083 bp, Homo sapiens
aagtagcacggattgctcatccgatccgtgccgccgcagggagtgtgtcaagttacagaggcgccggaatcggcccctgmgctcctcgccagccgccacgacccacctctgcccatggggccctccrtgtgcgccccttcgcccggggactgaaactgactggcccgggagacacgaggcgcccagaaggactgacagcgcggcaccaactgctctgcagacacttgaagggaaagactgggcggagagaaggagagccggtcagattcccctaactttcctggacttggaamgttcttcgaaataacttttttctyacctaggtgtaccccaattaccgctggttgtgctttttcggcacttcctctcctactgctaatttttccgtcctctttgccgggagcagcggaaagggacgttttccagcgatacaagccctttccccctgccycgcagtttggatagagccttttggcagcggctgtcgcctttatttattctatttatttatttattggttctcaagacgcgagaggatggtagcggagcgcacccacaaagcggcagccaccggtgcccgcggccctggggagttgggcgcgcccgggacggtggctctggtggcggcgcgggcggagcgcggcgcacggctgccgagtccagggtcgtgcgggctgctgacgctggccctctgctcgctggcactcagcctgctcgcccactttcggacggccgagctgcaggcccgggtgctgcgcctggaagcggagcgcggggagcagcaaatggagacrgctattttgggacgagtcaatcaactgctggacgagaaatggaagctccactcaaggaggcgccgggaggccccaaagacatctccaggatgtaactgcccaccagggtcccactggaagacccggactcccaggggacaaaggtgccattgggatgcctggacgtgtggggtcccccggagacgctgggctgtccatcattggtccccgcggcccccctggtcaaccaggmactagaggtttccctggatttccgggtcccattgggctggacggcaaaccgggccacccaggaccaaagggcgacatgggtctgacgggtcccccaggacagccgggaccccagggacaaaaaggagaaaagggtcagtgtggagagtacccacaccgggagtgcctaagcagcatgccagcagctctgcgctccagccarataattgccctgaagctgctgcctctcctcaattcagtgcgactggctccacccccggtcataaaaaggcggacrttccagggcgaacagagccaggccagcatccaaggtccaccagggcccccaggcccccctggaccaagtggacctctggggcacccaggactgccagggcctatggggccacctggcttacctgggcctcctggaccaaagggagacccagggatccagggctaccacggccggaagggagaacggggcatgccagggatgccaggcaagcatggagccaagggggcgcccggaattgcsgtggctgggatgaagggtgagccagggatcccaggaaccaagggtgagaagggggctgaaggctcccctgggcttcctggcctcctggggcagaagggagagaaaggcgatgctggcaactccattggaggaggcagaggggaacctggccctccagggctccctgggcccccagggccaaagggagaagcaggtgtcgatggccaggttggccccccagggcagccaggagacaagggggagcgtggagcagctggagaacagggaccagatggccccaagggctccaagggagaaccagggaaaggagagatggtggattacaatggaaacatcaatgaggctctccaggagatccggacgctggccttgatggggcctcctggtcttcctgggcaaattggcccacctggagctccagggattccaggccagaagggggagattggactgccaggccctccaggacacgatggggaaaagggacctcgcggtaaaccaggagacatgggccctcctggtccccaaggccccccaggaaaggatggacctccaggagtgaagggagaaaacgggcasccagggagcccaggagagaagggggaaaaaggggagacaggacaagcaggctcaccggttcctgggctgccagggccagaggggcctcccggacctccggggctccaaggtgttcctggaccaaagggggaagcaggactagatggagcaaaaggagagaaaggcttccagggagaaaaaggagaccgtggtcccctgggactacccggagcttcaggtttggacggcaggcctgggccaccgggtactccaggaccaattggagttccaggcccagcgggaccaaagggcgagaggggcagcaaaggagaccctgggatgacaggaccaacgggagcagctgggcttcctggtttacatggaccacccggggacaagggaaaccggggggagagggggaagaaaggctctagagggcctaaaggggataagggagaccaaggagcgcctggattagatgccccctgcccattgggcgaagatggcttaccagtccaaggctgctggaacaagtgatgcctctaaccttggattggcctgtgtgtgtgtttgtacatagaatatttatttttatacagttttcactttttgaaaatgccagaagtatgatgcatcttacagattattaaaaaagaaagaaaaacctgcatattttgtacagaaaatatcaacctcttcccttttgtttacaagatgttttgtataagcctatgtctctaatacattttttgtttggtcgtaatgtmtgcatgatatttgtgcacatttattaagtatcgaagsttaataaattattgtgtcctggtgccaaagggggccagccagaactgaggtgctggctagctcatgtgtgaattcacataaatgtagaggtccatgatatttgctaagctaggtgtgtctaagagtattttaaacccttatggattttcattattaaaggaaatgaaacatggcaattc

SEQ ID NO: 51 - DNA, 2974 bp, Homo sapiens
aagtagcacggattgctcatccgatccgtgccgccgcagggagtgtgtcaagttacagaggcgccggaatcggcccctgmgctcctcgccagccgccacgacccacctctgcccatggggccctccrtgtgcgccccttcgcccggggactgaaactgactggcccgggagacacgaggcgcccagaaggactgacagcgcggcaccaactgctctgcagacacttgaagggaaagactgggcggagagaaggagagccggtcagattcccctaactttcctggacttggaamgttcttcgaaataacttttttctyacctaggtgtaccccaattaccgctggttgtgctttttcggcacttcctctcctactgctaatttttccgtcctctttgccgggagcagcggaaagggacgttttccagcgatacaagccctttccccctgccycgcagtttggatagagccttttggcagcggctgtcgcctttatttattctatttatttatttattggttctcaagacgcgagaggatggtagcggagcgcacccacaaagcggcagccaccggtgcccgcggccctggggagttgggcgcgcccgggacggtggctctggtggcggcgcgggcggagcgcggcgcacggctgccgagtccagggtcgtgcgggctgctgacgctggccctctgctcgctggcactcagcctgctcgcccactttcggacggccgagctgcaggcccgggtgctgcgcctggaagcggagcgcggggagcagcaaatggagacrgctattttgggacgagtcaatcaactgctggacgagaaatggaagctccactcaaggaggcgccgggaggccccaaagacatctccaggatgtaactgcccaccagggagtaaagggccaaccaggcgagaaggmactagaggtttccctggatttccgggtcccattgggctggacggcaaaccgggccacccaggaccaaagggcgacatgggtctgacgggtcccccaggacagccgggaccccagggacaaaaaggagaaaagggtcagtgtggagagtacccacaccggctgctgcctctcctcaattcagtgcgactggctccacccccggtcataaaaaggcggacrttccagggcgaacagagccaggccagcatccaaggtccaccagggcccccaggcccccctggaccaagtggacctctggggcacccaggactgccagggcctatggggccacctggcttacctgggcctcctggaccaaagggagacccagggatccagggctaccacggccggaagggagaacggggcatgccagggatgccaggcaagcatggagccaagggggcgcccggaattgcsgtggctgggatgaagggtgagccagggatcccaggaaccaagggtgagaagggggctgaaggctcccctgggcttcctggcctcctggggcagaagggagagaaaggcgatgctggcaactccattggaggaggcagaggggaacctggccctccagggctccctgggcccccagggccaaagggagaagcaggtgtcgatggccaggttggccccccagggcagccaggagacaagggggagcgtggagcagctggagaacagggaccagatggccccaagggctccaagggagaaccagggaaaggagagatggtggattacaatggaaacatcaatgaggctctccaggagatccggacgctggccttgatggggcctcctggtcttcctgggcaaattggcccacctggagctccagggattccaggccagaagggggagattggactgccaggccctccaggacacgatggggaaaagggacctcgcggtaaaccaggagacatgggccctcctggtccccaaggccccccaggaaaggatggacctccaggagtgaagggagaaaacgggcasccagggagcccaggagagaagggggaaaaaggggagacaggacaagcaggctcaccgggagagaaaggagaagccggggagaagggcaatccaggagcagaggttcctgggctgccagggccagaggggcctcccggacctccggggctccaaggtgttcctggaccaaagggggaagcaggactagatggagcaaaaggagagaaaggcttccagggagaaaaaggagaccgtggtcccctgggactacccggagcttcaggtttggacggcaggcctgggccaccgggtactccaggaccaattggagttccaggcccagcgggaccaaagggcgagaggggcagcaaaggagaccctgggatgacaggaccaacgggagcagctgggcttcctggtttacatggaccacccggggacaagggaaaccggggggagagggggaagaaaggctctagagggcctaaaggggataagggagaccaaggagcgcctggattagatgccccctgcccattgggcgaagatggcttaccagtccaaggctgctggaacaagtgatgcctctaaccttggattggcctgtgtgtgtgtttgtacatagaatatttatttttatacagttttcactttttgaaaatgccagaagtatgatgcatcttacagattattaaaaaagaaagaaaaacctgcatattttgtacagaaaatatcaacctcttcccttttgtttacaagatgttttgtataagcctatgtctctaatacattttttgtttggtcgtaatgtmtgcatgatatttgtgcacatttattaagtatcgaagsttaataaattattgtgtcctggtgccaaagggggccagccagaactgaggtgctggctagctcatgtgtgaattcacataaatgtagaggtccatgatatttgctaagctaggtgtgtctaagagtattttaaacccttatggattttcattattaaaggaaatgaaacatggcaattc

SEQ ID NO: 52 - DNA, 3109 bp, Homo sapiens
aagtagcacggattgctcatccgatccgtgccgccgcagggagtgtgtcaagttacagaggcgccggaatcggcccctgmgctcctcgccagccgccacgacccacctctgcccatggggccctccrtgtgcgccccttcgcccggggactgaaactgactggcccgggagacacgaggcgcccagaaggactgacagcgcggcaccaactgctctgcagacacttgaagggaaagactgggcggagagaaggagagccggtcagattcccctaactttcctggacttggaamgttcttcgaaataacttttttctyacctaggtgtaccccaattaccgctggttgtgctttttcggcacttcctctcctactgctaatttttccgtcctctttgccgggagcagcggaaagggacgttttccagcgatacaagccctttccccctgccycgcagtttggatagagccttttggcagcggctgtcgcctttatttattctatttatttatttattggttctcaagacgcgagaggatggtagcggagcgcacccacaaagcggcagccaccggtgcccgcggccctggggagttgggcgcgcccgggacggtggctctggtggcggcgcgggcggagcgcggcgcacggctgccgagtccagggtcgtgcgggctgctgacgctggccctctgctcgctggcactcagcctgctcgcccactttcggacggccgagctgcaggcccgggtgctgcgcctggaagcggagcgcggggagcagcaaatggagacrgctattttgggacgagtcaatcaactgctggacgagaaatggaagctccactcaaggaggcgccgggaggccccaaagacatctccaggatgtaactgcccaccaggtgctggtaacccgaggggtcccactggaagacccggactcccaggggacaaaggtgccattgggatgcctggacgtgtggggtcccccggagacgctgggctgtccatcattggtccccgcggcccccctggtcaaccaggmactagaggtttccctggatttccgggtcccattgggctggacggcaaaccgggccacccaggaccaaagggcgacatgggtctgacgggtcccccaggacagccgggaccccagggacaaaaaggagaaaagggtcagtgtggagagtacccacaccgggagtgcctaagcagcatgccagcagctctgcgctccagccarataattgccctgaagctgctgcctctcctcaattcagtgcgactggctccacccccggtcataaaaaggcggacrttccagggcgaacagagccaggccagcatccaaggtccaccagggcccccaggcccccctggaccaagtggacctctggggcacccaggactgccagggcctatggggccacctggcttacctgggcctcctggaccaaagggagacccagggatccagggctaccacggccggaagggagaacggggcatgccagggatgccaggcaagcatggagccaagggggcgcccggaattgcsgtggctgggatgaagggtgagccagggatcccaggaaccaagggtgagaagggggctgaaggctcccctgggcttcctggcctcctggggcagaagggagagaaaggcgatgctggcaactccattggaggaggcagaggggaacctggccctccagggctccctgggcccccagggccaaagggagaagcaggtgtcgatggccaggttggccccccagggcagccaggagacaagggggagcgtggagcagctggagaacagggaccagatggccccaagggctccaagggagaaccagggaaaggagagatggtggattacaatggaaacatcaatgaggctctccaggagatccggacgctggccttgatggggcctcctggtcttcctgggcaaattggcccacctggagctccagggattccaggccagaagggggagattggactgccaggccctccaggacacgatggggaaaagggacctcgcggtaaaccaggagacatgggccctcctggtccccaaggccccccaggaaaggatggacctccaggagtgaagggagaaaacgggcasccagggagcccaggagagaagggggaaaaaggggagacaggacaagcaggctcaccgggagagaaaggagaagccggggagaagggcaatccaggagcagaggttcctgggctgccagggccagaggggcctcccggacctccggggctccaaggtgttcctggaccaaagggggaagcaggactagatggagcaaaaggagagaaaggcttccagggagaaaaaggagaccgtggtcccctgggactacccggtactccaggaccaattggagttccaggcccagcgggaccaaagggcgagaggggcagcaaaggagaccctgggatgacaggaccaacgggagcagctgggcttcctggtttacatggaccacccggggacaagggaaaccggggggagagggggaagaaaggctctagagggcctaaaggggataagggagaccaaggagcgcctggattagatgccccctgcccattgggcgaagatggcttaccagtccaaggctgctggaacaagtgatgcctctaaccttggattggcctgtgtgtgtgtttgtacatagaatatttatttttatacagttttcactttttgaaaatgccagaagtatgatgcatcttacagattattaaaaaagaaagaaaaacctgcatattttgtacagaaaatatcaacctcttcccttttgtttacaagatgttttgtataagcctatgtctctaatacattttttgtttggtcgtaatgtmtgcatgatatttgtgcacatttattaagtatcgaagsttaataaattattgtgtcctggtgccaaagggggccagccagaactgaggtgctggctagctcatgtgtgaattcacataaatgtagaggtccatgatatttgctaagctaggtgtgtctaagagtattttaaacccttatggattttcattattaaaggaaatgaaacatggcaattc

SEQ ID NO: 53 - DNA, 3092 bp, Homo sapiens
aagtagcacggattgctcatccgatccgtgccgccgcagggagtgtgtcaagttacagaggcgccggaatcggcccctgmgctcctcgccagccgccacgacccacctctgcccatggggccctccrtgtgcgccccttcgcccggggactgaaactgactggcccgggagacacgaggcgcccagaaggactgacagcgcggcaccaactgctctgcagacacttgaagggaaagactgggcggagagaaggagagccggtcagattcccctaactttcctggacttggaamgttcttcgaaataacttttttctyacctaggtgtaccccaattaccgctggttgtgctttttcggcacttcctctcctactgctaatttttccgtcctctttgccgggagcagcggaaagggacgttttccagcgatacaagccctttccccctgccycgcagtttggatagagccttttggcagcggctgtcgcctttatttattctatttatttatttattggttctcaagacgcgagaggatggtagcggagcgcacccacaaagcggcagccaccggtgcccgcggccctggggagttgggcgcgcccgggacggtggctctggtggcggcgcgggcggagcgcggcgcacggctgccgagtccagggtcgtgcgggctgctgacgctggccctctgctcgctggcactcagcctgctcgcccactttcggacggccgagctgcaggcccgggtgctgcgcctggaagcggagcgcggggagcagcaaatggagacrgctattttgggacgagtcaatcaactgctggacgagaaatggaagctccactcaaggaggcgccgggaggccccaaagacatctccaggatgtaactgcccaccagggtcccactggaagacccggactcccaggggacaaaggtgccattgggatgcctggacgtgtggggtcccccggagacgctgggctgtccatcattggtccccgcggcccccctggtcaaccaggmactagaggtttccctggatttccgggtcccattgggctggacggcaaaccgggccacccaggaccaaagggcgacatgggtctgacgggtcccccaggacagccgggaccccagggacaaaaaggagaaaagggtcagtgtggagagtacccacaccgggagtgcctaagcagcatgccagcagctctgcgctccagccarataattgccctgaagctgctgcctctcctcaattcagtgcgactggctccacccccggtcataaaaaggcggacrttccagggcgaacagagccaggccagcatccaaggtccaccagggcccccaggcccccctggaccaagtggacctctggggcacccaggactgccagggcctatggggccacctggcttacctgggcctcctggaccaaagggagacccagggatccagggctaccacggccggaagggagaacggggcatgccagggatgccaggcaagcatggagccaagggggcgcccggaattgcsgtggctgggatgaagggtgagccagggatcccaggaaccaagggtgagaagggggctgaaggctcccctgggcttcctggcctcctggggcagaagggagagaaaggcgatgctggcaactccattggaggaggcagaggggaacctggccctccagggctccctgggcccccagggccaaagggagaagcaggtgtcgatggccaggttggccccccagggcagccaggagacaagggggagcgtggagcagctggagaacagggaccagatggccccaagggctccaagggagaaccagggaaaggagagatggtggattacaatggaaacatcaatgaggctctccaggagatccggacgctggccttgatggggcctcctggtcttcctgggcaaattggcccacctggagctccagggattccaggccagaagggggagattggactgccaggccctccaggacacgatggggaaaagggacctcgcggtaaaccaggagacatgggccctcctggtccccaaggccccccaggaaaggatggacctccaggagtgaagggagaaaacgggcasccagggagcccaggagagaagggggaaaaaggggagacaggacaagcaggctcaccgggagagaaaggagaagccggggagaagggcaatccaggagcagaggttcctgggctgccagggccagaggggcctcccggacctccggggctccaaggtgttcctggaccaaagggggaagcaggactagatggagcaaaaggagagaaaggcttccagggagaaaaaggagaccgtggtcccctgggactacccggtactccaggaccaattggagttccaggcccagcgggaccaaagggcgagaggggcagcaaaggagaccctgggatgacaggaccaacgggagcagctgggcttcctggtttacatggaccacccggggacaagggaaaccggggggagagggggaagaaaggctctagagggcctaaaggggataagggagaccaaggagcgcctggattagatgccccctgcccattgggcgaagatggcttaccagtccaaggctgctggaacaagtgatgcctctaaccttggattggcctgtgtgtgtgtttgtacatagaatatttatttttatacagttttcactttttgaaaatgccagaagtatgatgcatcttacagattattaaaaaagaaagaaaaacctgcatattttgtacagaaaatatcaacctcttcccttttgtttacaagatgttttgtataagcctatgtctctaatacattttttgtttggtcgtaatgtmtgcatgatatttgtgcacatttattaagtatcgaagsttaataaattattgtgtcctggtgccaaagggggccagccagaactgaggtgctggctagctcatgtgtgaattcacataaatgtagaggtccatgatatttgctaagctaggtgtgtctaagagtattttaaacccttatggattttcattattaaaggaaatgaaacatggcaattc

SEQ ID NO: 54 - DNA, 2986 bp, Homo sapiens
aagtagcacggattgctcatccgatccgtgccgccgcagggagtgtgtcaagttacagaggcgccggaatcggcccctgmgctcctcgccagccgccacgacccacctctgcccatggggccctccrtgtgcgccccttcgcccggggactgaaactgactggcccgggagacacgaggcgcccagaaggactgacagcgcggcaccaactgctctgcagacacttgaagggaaagactgggcggagagaaggagagccggtcagattcccctaactttcctggacttggaamgttcttcgaaataacttttttctyacctaggtgtaccccaattaccgctggttgtgctttttcggcacttcctctcctactgctaatttttccgtcctctttgccgggagcagcggaaagggacgttttccagcgatacaagccctttccccctgccycgcagtttggatagagccttttggcagcggctgtcgcctttatttattctatttatttatttattggttctcaagacgcgagaggatggtagcggagcgcacccacaaagcggcagccaccggtgcccgcggccctggggagttgggcgcgcccgggacggtggctctggtggcggcgcgggcggagcgcggcgcacggctgccgagtccagggtcgtgcgggctgctgacgctggccctctgctcgctggcactcagcctgctcgcccactttcggacggccgagctgcaggcccgggtgctgcgcctggaagcggagcgcggggagcagcaaatggagacrgctattttgggacgagtcaatcaactgctggacgagaaatggaagctccactcaaggaggcgccgggaggccccaaagacatctccaggatgtaactgcccaccaggtgctggtaacccgaggggtcccactggaagacccggactcccagggtcccccggagacgctgggctgtccatcattggtccccgcggcccccctggtcaaccaggmactagaggtttccctggatttccgggtcccattgggctggacggcaaaccgggccacccaggaccaaagggcgacatgggtctgacgggtcccccaggacagccgggaccccagggacaaaaaggagaaaagggtcagtgtggagagtacccacaccggggcgaacagagccaggccagcatccaaggtccaccagggcccccaggcccccctggaccaagtggacctctggggcacccaggactgccagggcctatggggccacctggcttacctgggcctcctggaccaaagggagacccagggatccagggctaccacggccggaagggagaacggggcatgccagggatgccaggcaagcatggagccaagggggcgcccggaattgcsgtggctgggatgaagggtgagccagggatcccaggaaccaagggtgagaagggggctgaaggctcccctgggcttcctggcctcctggggcagaagggagagaaaggcgatgctggcaactccattggaggaggcagaggggaacctggccctccagggctccctgggcccccagggccaaagggagaagcaggtgtcgatggccaggttggccccccagggcagccaggagacaagggggagcgtggagcagctggagaacagggaccagatggccccaagggctccaagggagaaccagggaaaggagagatggtggattacaatggaaacatcaatgaggctctccaggagatccggacgctggccttgatggggcctcctggtcttcctgggcaaattggcccacctggagctccagggattccaggccagaagggggagattggactgccaggccctccaggacacgatggggaaaagggacctcgcggtaaaccaggagacatgggccctcctggtccccaaggccccccaggaaaggatggacctccaggagtgaagggagaaaacgggcasccagggagcccaggagagaagggggaaaaaggggagacaggacaagcaggctcaccgggagagaaaggagaagccggggagaagggcaatccaggagcagaggttcctgggctgccagggccagaggggcctcccggacctccggggctccaaggtgttcctggaccaaagggggaagcaggactagatggagcaaaaggagagaaaggcttccagggagaaaaaggagaccgtggtcccctgggactacccggagcttcaggtttggacggcaggcctgggccaccgggtactccaggaccaattggagttccaggcccagcgggaccaaagggcgagaggggcagcaaaggagaccctgggatgacaggaccaacgggagcagctgggcttcctggtttacatggaccacccggggacaagggaaaccggggggagagggggaagaaaggctctagagggcctaaaggggataagggagaccaaggagcgcctggattagatgccccctgcccattgggcgaagatggcttaccagtccaaggctgctggaacaagtgatgcctctaaccttggattggcctgtgtgtgtgtttgtacatagaatatttatttttatacagttttcactttttgaaaatgccagaagtatgatgcatcttacagattattaaaaaagaaagaaaaacctgcatattttgtacagaaaatatcaacctcttcccttttgtttacaagatgttttgtataagcctatgtctctaatacattttttgtttggtcgtaatgtmtgcatgatatttgtgcacatttattaagtatcgaagsttaataaattattgtgtcctggtgccaaagggggccagccagaactgaggtgctggctagctcatgtgtgaattcacataaatgtagaggtccatgatatttgctaagctaggtgtgtctaagagtattttaaacccttatggattttcattattaaaggaaatgaaacatggcaattc

SEQ ID NO: 55 - DNA, 3094 bp, Homo sapiens
aagtagcacggattgctcatccgatccgtgccgccgcagggagtgtgtcaagttacagaggcgccggaatcggcccctgmgctcctcgccagccgccacgacccacctctgcccatggggccctccrtgtgcgccccttcgcccggggactgaaactgactggcccgggagacacgaggcgcccagaaggactgacagcgcggcaccaactgctctgcagacacttgaagggaaagactgggcggagagaaggagagccggtcagattcccctaactttcctggacttggaamgttcttcgaaataacttttttctyacctaggtgtaccccaattaccgctggttgtgctttttcggcacttcctctcctactgctaatttttccgtcctctttgccgggagcagcggaaagggacgttttccagcgatacaagccctttccccctgccycgcagtttggatagagccttttggcagcggctgtcgcctttatttattctatttatttatttattggttctcaagacgcgagaggatggtagcggagcgcacccacaaagcggcagccaccggtgcccgcggccctggggagttgggcgcgcccgggacggtggctctggtggcggcgcgggcggagcgcggcgcacggctgccgagtccagggtcgtgcgggctgctgacgctggccctctgctcgctggcactcagcctgctcgcccactttcggacggccgagctgcaggcccgggtgctgcgcctggaagcggagcgcggggagcagcaaatggagacrgctattttgggacgagtcaatcaactgctggacgagaaatggaagctccactcaaggaggcgccgggaggccccaaagacatctccaggatgtaactgcccaccaggtgctggtaacccgaggggtcccactggaagacccggactcccaggggacaaaggtgccattgggatgcctggacgtgtgggtcaaccaggmactagaggtttccctggatttccgggtcccattgggctggacggcaaaccgggccacccaggaccaaagggcgacatgggtctgacgggtcccccaggacagccgggaccccagggacaaaaaggagaaaagggtcagtgtggagagtacccacaccgggagtgcctaagcagcatgccagcagctctgcgctccagccarataattgccctgaagctgctgcctctcctcaattcagtgcgactggctccacccccggtcataaaaaggcggacrttccagggcgaacagagccaggccagcatccaaggtccaccagggcccccaggcccccctggaccaagtggacctctggggcacccaggactgccagggcctatggggccacctggcttacctgggcctcctggaccaaagggagacccagggatccagggctaccacggccggaagggagaacggggcatgccagggatgccaggcaagcatggagccaagggggcgcccggaattgcsgtggctgggatgaagggtgagccagggatcccaggaaccaagggtgagaagggggctgaaggctcccctgggcttcctggcctcctggggcagaagggagagaaaggcgatgctggcaactccattggaggaggcagaggggaacctggccctccagggctccctgggcccccagggccaaagggagaagcaggtgtcgatggccaggttggccccccagggcagccaggagacaagggggagcgtggagcagctggagaacagggaccagatggccccaagggctccaagggagaaccagggaaaggagagatggtggattacaatggaaacatcaatgaggctctccaggagatccggacgctggccttgatggggcctcctggtcttcctgggcaaattggcccacctggagctccagggattccaggccagaagggggagattggactgccaggccctccaggacacgatggggaaaagggacctcgcggtaaaccaggagacatgggccctcctggtccccaaggccccccaggaaaggatggacctccaggagtgaagggagaaaacgggcasccagggagcccaggagagaagggggaaaaaggggagacaggacaagcaggctcaccgggagagaaaggagaagccggggagaagggcaatccaggagcagaggttcctgggctgccagggccagaggggcctcccggacctccggggctccaaggtgttcctggaccaaagggggaagcaggactagatggagcaaaaggagagaaaggcttccagggagaaaaaggagaccgtggtcccctgggactacccggagcttcaggtttggacggcaggcctgggccaccgggtactccaggaccaattggagttccaggcccagcgggaccaaagggcgagaggggcagcaaaggagaccctgggatgacaggaccaacgggagcagctgggcttcctggtttacatggaccacccggggacaagggaaaccggggggagagggggaagaaaggctctagagggcctaaaggggataagggagaccaaggagcgcctggattagatgccccctgcccattgggcgaagatggcttaccagtccaaggctgctggaacaagtgatgcctctaaccttggattggcctgtgtgtgtgtttgtacatagaatatttatttttatacagttttcactttttgaaaatgccagaagtatgatgcatcttacagattattaaaaaagaaagaaaaacctgcatattttgtacagaaaatatcaacctcttcccttttgtttacaagatgttttgtataagcctatgtctctaatacattttttgtttggtcgtaatgtmtgcatgatatttgtgcacatttattaagtatcgaagsttaataaattattgtgtcctggtgccaaagggggccagccagaactgaggtgctggctagctcatgtgtgaattcacataaatgtagaggtccatgatatttgctaagctaggtgtgtctaagagtattttaaacccttatggattttcattattaaaggaaatgaaacatggcaattc

SEQ ID NO: 56 - DNA, 3022 bp, Homo sapiens
aagtagcacggattgctcatccgatccgtgccgccgcagggagtgtgtcaagttacagaggcgccggaatcggcccctgmgctcctcgccagccgccacgacccacctctgcccatggggccctccrtgtgcgccccttcgcccggggactgaaactgactggcccgggagacacgaggcgcccagaaggactgacagcgcggcaccaactgctctgcagacacttgaagggaaagactgggcggagagaaggagagccggtcagattcccctaactttcctggacttggaamgttcttcgaaataacttttttctyacctaggtgtaccccaattaccgctggttgtgctttttcggcacttcctctcctactgctaatttttccgtcctctttgccgggagcagcggaaagggacgttttccagcgatacaagccctttccccctgccycgcagtttggatagagccttttggcagcggctgtcgcctttatttattctatttatttatttattggttctcaagacgcgagaggatggtagcggagcgcacccacaaagcggcagccaccggtgcccgcggccctggggagttgggcgcgcccgggacggtggctctggtggcggcgcgggcggagcgcggcgcacggctgccgagtccagggtcgtgcgggctgctgacgctggccctctgctcgctggcactcagcctgctcgcccactttcggacggccgagctgcaggcccgggtgctgcgcctggaagcggagcgcggggagcagcaaatggagacrgctattttgggacgagtcaatcaactgctggacgagaaatggaagctccactcaaggaggcgccgggaggccccaaagacatctccaggatgtaactgcccaccaggtgctggtaacccgaggggtcccactggaagacccggactcccaggggacaaaggtgccattgggatgcctggacgtgtggggtcccccggagacgctgggctgtccatcattggtccccgcggcccccctggtcaaccaggmactagaggtttccctggatttccgggtcccattgggctggacggcaaaccgggccacccaggaccaaagggcgacatgggtctgacgggtcccccaggacagccgggaccccagggacaaaaaggagaaaagggtcagtgtggagagtacccacaccggggcgaacagagccaggccagcatccaaggtccaccagggcccccaggcccccctggaccaagtggacctctggggcacccaggactgccagggcctatggggccacctggcttacctgggcctcctggaccaaagggagacccagggatccagggctaccacggccggaagggagaacggggcatgccagggatgccaggcaagcatggagccaagggggcgcccggaattgcsgtggctgggatgaagggtgagccagggatcccaggaaccaagggtgagaagggggctgaaggctcccctgggcttcctggcctcctggggcagaagggagagaaaggcgatgctggcaactccattggaggaggcagaggggaacctggccctccagggctccctgggcccccagggccaaagggagaagcaggtgtcgatggccaggttggccccccagggcagccaggagacaagggggagcgtggagcagctggagaacagggaccagatggccccaagggctccaagggagaaccagggaaaggagagatggtggattacaatggaaacatcaatgaggctctccaggagatccggacgctggccttgatggggcctcctggtcttcctgggcaaattggcccacctggagctccagggattccaggccagaagggggagattggactgccaggccctccaggacacgatggggaaaagggacctcgcggtaaaccaggagacatgggccctcctggtccccaaggccccccaggaaaggatggacctccaggagtgaagggagaaaacgggcasccagggagcccaggagagaagggggaaaaaggggagacaggacaagcaggctcaccgggagagaaaggagaagccggggagaagggcaatccaggagcagaggttcctgggctgccagggccagaggggcctcccggacctccggggctccaaggtgttcctggaccaaagggggaagcaggactagatggagcaaaaggagagaaaggcttccagggagaaaaaggagaccgtggtcccctgggactacccggagcttcaggtttggacggcaggcctgggccaccgggtactccaggaccaattggagttccaggcccagcgggaccaaagggcgagaggggcagcaaaggagaccctgggatgacaggaccaacgggagcagctgggcttcctggtttacatggaccacccggggacaagggaaaccggggggagagggggaagaaaggctctagagggcctaaaggggataagggagaccaaggagcgcctggattagatgccccctgcccattgggcgaagatggcttaccagtccaaggctgctggaacaagtgatgcctctaaccttggattggcctgtgtgtgtgtttgtacatagaatatttatttttatacagttttcactttttgaaaatgccagaagtatgatgcatcttacagattattaaaaaagaaagaaaaacctgcatattttgtacagaaaatatcaacctcttcccttttgtttacaagatgttttgtataagcctatgtctctaatacattttttgtttggtcgtaatgtmtgcatgatatttgtgcacatttattaagtatcgaagsttaataaattattgtgtcctggtgccaaagggggccagccagaactgaggtgctggctagctcatgtgtgaattcacataaatgtagaggtccatgatatttgctaagctaggtgtgtctaagagtattttaaacccttatggattttcattattaaaggaaatgaaacatggcaattc

SEQ ID NO: 57 - DNA, 3086 bp, Homo sapiens
aagtagcacggattgctcatccgatccgtgccgccgcagggagtgtgtcaagttacagaggcgccggaatcggcccctgmgctcctcgccagccgccacgacccacctctgcccatggggccctccrtgtgcgccccttcgcccggggactgaaactgactggcccgggagacacgaggcgcccagaaggactgacagcgcggcaccaactgctctgcagacacttgaagggaaagactgggcggagagaaggagagccggtcagattcccctaactttcctggacttggaamgttcttcgaaataacttttttctyacctaggtgtaccccaattaccgctggttgtgctttttcggcacttcctctcctactgctaatttttccgtcctctttgccgggagcagcggaaagggacgttttccagcgatacaagccctttccccctgccycgcagtttggatagagccttttggcagcggctgtcgcctttatttattctatttatttatttattggttctcaagacgcgagaggatggtagcggagcgcacccacaaagcggcagccaccggtgcccgcggccctggggagttgggcgcgcccgggacggtggctctggtggcggcgcgggcggagcgcggcgcacggctgccgagtccagggtcgtgcgggctgctgacgctggccctctgctcgctggcactcagcctgctcgcccactttcggacggccgagctgcaggcccgggtgctgcgcctggaagcggagcgcggggagcagcaaatggagacrgctattttgggacgagtcaatcaactgctggacgagaaatggaagctccactcaaggaggcgccgggaggccccaaagacatctccaggatgtaactgcccaccagggtcccactggaagacccggactcccaggggacaaaggtgccattgggatgcctggacgtgtggggtcccccggagacgctgggctgtccatcattggtccccgcggcccccctggtcaaccaggmactagaggtttccctggatttccgggtcccattgggctggacggcaaaccgggccacccaggaccaaagggcgacatgggtctgacgggtcccccaggacagccgggaccccagggacaaaaaggagaaaagggtcagtgtggagagtacccacaccgggagtgcctaagcagcatgccagcagctctgcgctccagccarataattgccctgaagctgctgcctctcctcaattcagtgcgactggctccacccccggtcataaaaaggcggacrttccagggcgaacagagccaggccagcatccaaggtccaccagggcccccaggcccccctggaccaagtggacctctggggcacccaggactgccagggcctatggggccacctggcttacctgggcctcctggaccaaagggagacccagggatccagggctaccacggccggaagggagaacggggcatgccagggatgccaggcaagcatggagccaagggggcgcccggaattgcsgtggctgggatgaagggtgagccagggatcccaggaaccaagggtgagaagggggctgaaggctcccctgggcttcctggcctcctggggcagaagggagagaaaggcgatgctggcaactccattggaggaggcagaggggaacctggccctccagggctccctgggcccccagggccaaagggagaagcaggtgtcgatggccaggttggccccccagggcagccaggagacaagggggagcgtggagcagctggagaacagggaccagatggccccaagggctccaagggagaaccagggaaaggagagatggtggattacaatggaaacatcaatgaggctctccaggagatccggacgctggccttgatggggcctcctggtcttcctgggcaaattggcccacctggagctccagggattccaggccagaagggggagattggactgccaggccctccaggacacgatggggaaaagggacctcgcggtaaaccaggagacatgggccctcctggtccccaaggccccccaggaaaggatggacctccaggagtgaagggagaaaacgggcasccagggagcccaggagagaagggggaaaaaggggagacaggacaagcaggctcaccgggagagaaaggagaagccggggagaagggcaatccaggagcagaggggctccaaggtgttcctggaccaaagggggaagcaggactagatggagcaaaaggagagaaaggcttccagggagaaaaaggagaccgtggtcccctgggactacccggagcttcaggtttggacggcaggcctgggccaccgggtactccaggaccaattggagttccaggcccagcgggaccaaagggcgagaggggcagcaaaggagaccctgggatgacaggaccaacgggagcagctgggcttcctggtttacatggaccacccggggacaagggaaaccggggggagagggggaagaaaggctctagagggcctaaaggggataagggagaccaaggagcgcctggattagatgccccctgcccattgggcgaagatggcttaccagtccaaggctgctggaacaagtgatgcctctaaccttggattggcctgtgtgtgtgtttgtacatagaatatttatttttatacagttttcactttttgaaaatgccagaagtatgatgcatcttacagattattaaaaaagaaagaaaaacctgcatattttgtacagaaaatatcaacctcttcccttttgtttacaagatgttttgtataagcctatgtctctaatacattttttgtttggtcgtaatgtmtgcatgatatttgtgcacatttattaagtatcgaagsttaataaattattgtgtcctggtgccaaagggggccagccagaactgaggtgctggctagctcatgtgtgaattcacataaatgtagaggtccatgatatttgctaagctaggtgtgtctaagagtattttaaacccttatggattttcattattaaaggaaatgaaacatggcaattc

SEQ ID NO: 58 - DNA, 3058 bp, Homo sapiens
aagtagcacggattgctcatccgatccgtgccgccgcagggagtgtgtcaagttacagaggcgccggaatcggcccctgmgctcctcgccagccgccacgacccacctctgcccatggggccctccrtgtgcgccccttcgcccggggactgaaactgactggcccgggagacacgaggcgcccagaaggactgacagcgcggcaccaactgctctgcagacacttgaagggaaagactgggcggagagaaggagagccggtcagattcccctaactttcctggacttggaamgttcttcgaaataacttttttctyacctaggtgtaccccaattaccgctggttgtgctttttcggcacttcctctcctactgctaatttttccgtcctctttgccgggagcagcggaaagggacgttttccagcgatacaagccctttccccctgccycgcagtttggatagagccttttggcagcggctgtcgcctttatttattctatttatttatttattggttctcaagacgcgagaggatggtagcggagcgcacccacaaagcggcagccaccggtgcccgcggccctggggagttgggcgcgcccgggacggtggctctggtggcggcgcgggcggagcgcggcgcacggctgccgagtccagggtcgtgcgggctgctgacgctggccctctgctcgctggcactcagcctgctcgcccactttcggacggccgagctgcaggcccgggtgctgcgcctggaagcggagcgcggggagcagcaaatggagacrgctattttgggacgagtcaatcaactgctggacgagaaatggaagctccactcaaggaggcgccgggaggccccaaagacatctccaggatgtaactgcccaccaggtgctggtaacccgaggggtcccactggaagacccggactcccaggtcaaccaggmactagaggtttccctggatttccgggtcccattgggctggacggcaaaccgggccacccaggaccaaagggcgacatgggtctgacgggtcccccaggacagccgggaccccagggacaaaaaggagaaaagggtcagtgtggagagtacccacaccgggagtgcctaagcagcatgccagcagctctgcgctccagccarataattgccctgaagctgctgcctctcctcaattcagtgcgactggctccacccccggtcataaaaaggcggacrttccagggcgaacagagccaggccagcatccaaggtccaccagggcccccaggcccccctggaccaagtggacctctggggcacccaggactgccagggcctatggggccacctggcttacctgggcctcctggaccaaagggagacccagggatccagggctaccacggccggaagggagaacggggcatgccagggatgccaggcaagcatggagccaagggggcgcccggaattgcsgtggctgggatgaagggtgagccagggatcccaggaaccaagggtgagaagggggctgaaggctcccctgggcttcctggcctcctggggcagaagggagagaaaggcgatgctggcaactccattggaggaggcagaggggaacctggccctccagggctccctgggcccccagggccaaagggagaagcaggtgtcgatggccaggttggccccccagggcagccaggagacaagggggagcgtggagcagctggagaacagggaccagatggccccaagggctccaagggagaaccagggaaaggagagatggtggattacaatggaaacatcaatgaggctctccaggagatccggacgctggccttgatggggcctcctggtcttcctgggcaaattggcccacctggagctccagggattccaggccagaagggggagattggactgccaggccctccaggacacgatggggaaaagggacctcgcggtaaaccaggagacatgggccctcctggtccccaaggccccccaggaaaggatggacctccaggagtgaagggagaaaacgggcasccagggagcccaggagagaagggggaaaaaggggagacaggacaagcaggctcaccgggagagaaaggagaagccggggagaagggcaatccaggagcagaggttcctgggctgccagggccagaggggcctcccggacctccggggctccaaggtgttcctggaccaaagggggaagcaggactagatggagcaaaaggagagaaaggcttccagggagaaaaaggagaccgtggtcccctgggactacccggagcttcaggtttggacggcaggcctgggccaccgggtactccaggaccaattggagttccaggcccagcgggaccaaagggcgagaggggcagcaaaggagaccctgggatgacaggaccaacgggagcagctgggcttcctggtttacatggaccacccggggacaagggaaaccggggggagagggggaagaaaggctctagagggcctaaaggggataagggagaccaaggagcgcctggattagatgccccctgcccattgggcgaagatggcttaccagtccaaggctgctggaacaagtgatgcctctaaccttggattggcctgtgtgtgtgtttgtacatagaatatttatttttatacagttttcactttttgaaaatgccagaagtatgatgcatcttacagattattaaaaaagaaagaaaaacctgcatattttgtacagaaaatatcaacctcttcccttttgtttacaagatgttttgtataagcctatgtctctaatacattttttgtttggtcgtaatgtmtgcatgatatttgtgcacatttattaagtatcgaagsttaataaattattgtgtcctggtgccaaagggggccagccagaactgaggtgctggctagctcatgtgtgaattcacataaatgtagaggtccatgatatttgctaagctaggtgtgtctaagagtattttaaacccttatggattttcattattaaaggaaatgaaacatggcaattc

SEQ ID NO: 59 - DNA, 3088 bp, Homo sapiens
aagtagcacggattgctcatccgatccgtgccgccgcagggagtgtgtcaagttacagaggcgccggaatcggcccctgmgctcctcgccagccgccacgacccacctctgcccatggggccctccrtgtgcgccccttcgcccggggactgaaactgactggcccgggagacacgaggcgcccagaaggactgacagcgcggcaccaactgctctgcagacacttgaagggaaagactgggcggagagaaggagagccggtcagattcccctaactttcctggacttggaamgttcttcgaaataacttttttctyacctaggtgtaccccaattaccgctggttgtgctttttcggcacttcctctcctactgctaatttttccgtcctctttgccgggagcagcggaaagggacgttttccagcgatacaagccctttccccctgccycgcagtttggatagagccttttggcagcggctgtcgcctttatttattctatttatttatttattggttctcaagacgcgagaggatggtagcggagcgcacccacaaagcggcagccaccggtgcccgcggccctggggagttgggcgcgcccgggacggtggctctggtggcggcgcgggcggagcgcggcgcacggctgccgagtccagggtcgtgcgggctgctgacgctggccctctgctcgctggcactcagcctgctcgcccactttcggacggccgagctgcaggcccgggtgctgcgcctggaagcggagcgcggggagcagcaaatggagacrgctattttgggacgagtcaatcaactgctggacgagaaatggaagctccactcaaggaggcgccgggaggccccaaagacatctccaggatgtaactgcccaccaggtgctggtaacccgaggggtcccactggaagacccggactcccaggggacaaaggtgccattgggatgcctggacgtgtggggtcccccggagacgctgggctgtccatcattggtccccgcggcccccctggtcaaccaggmactagaggtttccctggatttccgggtcccattgggctggacggcaaaccgggccacccaggaccaaagggcgacatgggtctgacgggtcccccaggacagccgggaccccagggacaaaaaggagaaaagggtcagtgtggagagtacccacaccggctgctgcctctcctcaattcagtgcgactggctccacccccggtcataaaaaggcggacrttccagggcgaacagagccaggccagcatccaaggtccaccagggcccccaggcccccctggaccaagtggacctctggggcacccaggactgccagggcctatggggccacctggcttacctgggcctcctggaccaaagggagacccagggatccagggctaccacggccggaagggagaacggggcatgccagggatgccaggcaagcatggagccaagggggcgcccggaattgcsgtggctgggatgaagggtgagccagggatcccaggaaccaagggtgagaagggggctgaaggctcccctgggcttcctggcctcctggggcagaagggagagaaaggcgatgctggcaactccattggaggaggcagaggggaacctggccctccagggctccctgggcccccagggccaaagggagaagcaggtgtcgatggccaggttggccccccagggcagccaggagacaagggggagcgtggagcagctggagaacagggaccagatggccccaagggctccaagggagaaccagggaaaggagagatggtggattacaatggaaacatcaatgaggctctccaggagatccggacgctggccttgatggggcctcctggtcttcctgggcaaattggcccacctggagctccagggattccaggccagaagggggagattggactgccaggccctccaggacacgatggggaaaagggacctcgcggtaaaccaggagacatgggccctcctggtccccaaggccccccaggaaaggatggacctccaggagtgaagggagaaaacgggcasccagggagcccaggagagaagggggaaaaaggggagacaggacaagcaggctcaccgggagagaaaggagaagccggggagaagggcaatccaggagcagaggttcctgggctgccagggccagaggggcctcccggacctccggggctccaaggtgttcctggaccaaagggggaagcaggactagatggagcaaaaggagagaaaggcttccagggagaaaaaggagaccgtggtcccctgggactacccggagcttcaggtttggacggcaggcctgggccaccgggtactccaggaccaattggagttccaggcccagcgggaccaaagggcgagaggggcagcaaaggagaccctgggatgacaggaccaacgggagcagctgggcttcctggtttacatggaccacccggggacaagggaaaccggggggagagggggaagaaaggctctagagggcctaaaggggataagggagaccaaggagcgcctggattagatgccccctgcccattgggcgaagatggcttaccagtccaaggctgctggaacaagtgatgcctctaaccttggattggcctgtgtgtgtgtttgtacatagaatatttatttttatacagttttcactttttgaaaatgccagaagtatgatgcatcttacagattattaaaaaagaaagaaaaacctgcatattttgtacagaaaatatcaacctcttcccttttgtttacaagatgttttgtataagcctatgtctctaatacattttttgtttggtcgtaatgtmtgcatgatatttgtgcacatttattaagtatcgaagsttaataaattattgtgtcctggtgccaaagggggccagccagaactgaggtgctggctagctcatgtgtgaattcacataaatgtagaggtccatgatatttgctaagctaggtgtgtctaagagtattttaaacccttatggattttcattattaaaggaaatgaaacatggcaattc

SEQ ID NO: 60 - DNA, 3005 bp, Homo sapiens
aagtagcacggattgctcatccgatccgtgccgccgcagggagtgtgtcaagttacagaggcgccggaatcggcccctgmgctcctcgccagccgccacgacccacctctgcccatggggccctccrtgtgcgccccttcgcccggggactgaaactgactggcccgggagacacgaggcgcccagaaggactgacagcgcggcaccaactgctctgcagacacttgaagggaaagactgggcggagagaaggagagccggtcagattcccctaactttcctggacttggaamgttcttcgaaataacttttttctyacctaggtgtaccccaattaccgctggttgtgctttttcggcacttcctctcctactgctaatttttccgtcctctttgccgggagcagcggaaagggacgttttccagcgatacaagccctttccccctgccycgcagtttggatagagccttttggcagcggctgtcgcctttatttattctatttatttatttattggttctcaagacgcgagaggatggtagcggagcgcacccacaaagcggcagccaccggtgcccgcggccctggggagttgggcgcgcccgggacggtggctctggtggcggcgcgggcggagcgcggcgcacggctgccgagtccagggtcgtgcgggctgctgacgctggccctctgctcgctggcactcagcctgctcgcccactttcggacggccgagctgcaggcccgggtgctgcgcctggaagcggagcgcggggagcagcaaatggagacrgctattttgggacgagtcaatcaactgctggacgagaaatggaagctccactcaaggaggcgccgggaggccccaaagacatctccaggatgtaactgcccaccagggtcccactggaagacccggactcccaggggacaaaggtgccattgggatgcctggacgtgtggggtcccccggagacgctgggctgtccatcattggtccccgcggcccccctggtcaaccaggmactagaggtttccctggatttccgggtcccattgggctggacggcaaaccgggccacccaggaccaaagggcgacatgggtctgacgggtcccccaggacagccgggaccccagggacaaaaaggagaaaagggtcagtgtggagagtacccacaccggggcgaacagagccaggccagcatccaaggtccaccagggcccccaggcccccctggaccaagtggacctctggggcacccaggactgccagggcctatggggccacctggcttacctgggcctcctggaccaaagggagacccagggatccagggctaccacggccggaagggagaacggggcatgccagggatgccaggcaagcatggagccaagggggcgcccggaattgcsgtggctgggatgaagggtgagccagggatcccaggaaccaagggtgagaagggggctgaaggctcccctgggcttcctggcctcctggggcagaagggagagaaaggcgatgctggcaactccattggaggaggcagaggggaacctggccctccagggctccctgggcccccagggccaaagggagaagcaggtgtcgatggccaggttggccccccagggcagccaggagacaagggggagcgtggagcagctggagaacagggaccagatggccccaagggctccaagggagaaccagggaaaggagagatggtggattacaatggaaacatcaatgaggctctccaggagatccggacgctggccttgatggggcctcctggtcttcctgggcaaattggcccacctggagctccagggattccaggccagaagggggagattggactgccaggccctccaggacacgatggggaaaagggacctcgcggtaaaccaggagacatgggccctcctggtccccaaggccccccaggaaaggatggacctccaggagtgaagggagaaaacgggcasccagggagcccaggagagaagggggaaaaaggggagacaggacaagcaggctcaccgggagagaaaggagaagccggggagaagggcaatccaggagcagaggttcctgggctgccagggccagaggggcctcccggacctccggggctccaaggtgttcctggaccaaagggggaagcaggactagatggagcaaaaggagagaaaggcttccagggagaaaaaggagaccgtggtcccctgggactacccggagcttcaggtttggacggcaggcctgggccaccgggtactccaggaccaattggagttccaggcccagcgggaccaaagggcgagaggggcagcaaaggagaccctgggatgacaggaccaacgggagcagctgggcttcctggtttacatggaccacccggggacaagggaaaccggggggagagggggaagaaaggctctagagggcctaaaggggataagggagaccaaggagcgcctggattagatgccccctgcccattgggcgaagatggcttaccagtccaaggctgctggaacaagtgatgcctctaaccttggattggcctgtgtgtgtgtttgtacatagaatatttatttttatacagttttcactttttgaaaatgccagaagtatgatgcatcttacagattattaaaaaagaaagaaaaacctgcatattttgtacagaaaatatcaacctcttcccttttgtttacaagatgttttgtataagcctatgtctctaatacattttttgtttggtcgtaatgtmtgcatgatatttgtgcacatttattaagtatcgaagsttaataaattattgtgtcctggtgccaaagggggccagccagaactgaggtgctggctagctcatgtgtgaattcacataaatgtagaggtccatgatatttgctaagctaggtgtgtctaagagtattttaaacccttatggattttcattattaaaggaaatgaaacatggcaattc

SEQ ID NO: 61 - DNA, 3092 bp, Homo sapiens
aagtagcacggattgctcatccgatccgtgccgccgcagggagtgtgtcaagttacagaggcgccggaatcggcccctgmgctcctcgccagccgccacgacccacctctgcccatggggccctccrtgtgcgccccttcgcccggggactgaaactgactggcccgggagacacgaggcgcccagaaggactgacagcgcggcaccaactgctctgcagacacttgaagggaaagactgggcggagagaaggagagccggtcagattcccctaactttcctggacttggaamgttcttcgaaataacttttttctyacctaggtgtaccccaattaccgctggttgtgctttttcggcacttcctctcctactgctaatttttccgtcctctttgccgggagcagcggaaagggacgttttccagcgatacaagccctttccccctgccycgcagtttggatagagccttttggcagcggctgtcgcctttatttattctatttatttatttattggttctcaagacgcgagaggatggtagcggagcgcacccacaaagcggcagccaccggtgcccgcggccctggggagttgggcgcgcccgggacggtggctctggtggcggcgcgggcggagcgcggcgcacggctgccgagtccagggtcgtgcgggctgctgacgctggccctctgctcgctggcactcagcctgctcgcccactttcggacggccgagctgcaggcccgggtgctgcgcctggaagcggagcgcggggagcagcaaatggagacrgctattttgggacgagtcaatcaactgctggacgagaaatggaagctccactcaaggaggcgccgggaggccccaaagacatctccaggatgtaactgcccaccagggtcccactggaagacccggactcccagggtcccccggagacgctgggctgtccatcattggtccccgcggcccccctggtcaaccaggmactagaggtttccctggatttccgggtcccattgggctggacggcaaaccgggccacccaggaccaaagggcgacatgggtctgacgggtcccccaggacagccgggaccccagggacaaaaaggagaaaagggtcagtgtggagagtacccacaccgggagtgcctaagcagcatgccagcagctctgcgctccagccarataattgccctgaagctgctgcctctcctcaattcagtgcgactggctccacccccggtcataaaaaggcggacrttccagggcgaacagagccaggccagcatccaaggtccaccagggcccccaggcccccctggaccaagtggacctctggggcacccaggactgccagggcctatggggccacctggcttacctgggcctcctggaccaaagggagacccagggatccagggctaccacggccggaagggagaacggggcatgccagggatgccaggcaagcatggagccaagggggcgcccggaattgcsgtggctgggatgaagggtgagccagggatcccaggaaccaagggtgagaagggggctgaaggctcccctgggcttcctggcctcctggggcagaagggagagaaaggcgatgctggcaactccattggaggaggcagaggggaacctggccctccagggctccctgggcccccagggccaaagggagaagcaggtgtcgatggccaggttggccccccagggcagccaggagacaagggggagcgtggagcagctggagaacagggaccagatggccccaagggctccaagggagaaccagggaaaggagagatggtggattacaatggaaacatcaatgaggctctccaggagatccggacgctggccttgatggggcctcctggtcttcctgggcaaattggcccacctggagctccagggattccaggccagaagggggagattggactgccaggccctccaggacacgatggggaaaagggacctcgcggtaaaccaggagacatgggccctcctggtccccaaggccccccaggaaaggatggacctccaggagtgaagggagaaaacgggcasccagggagcccaggagagaagggggaaaaaggggagacaggacaagcaggctcaccgggagagaaaggagaagccggggagaagggcaatccaggagcagaggttcctgggctgccagggccagaggggcctcccggacctccggggctccaaggtgttcctggaccaaagggggaagcaggactagatggagcaaaaggagagaaaggcttccagggagaaaaaggagaccgtggtcccctgggactacccggagcttcaggtttggacggcaggcctgggccaccgggtactccaggaccaattggagttccaggcccagcgggaccaaagggcgagaggggcagcaaaggagaccctgggatgacaggaccaacgggagcagctgggcttcctggtttacatggaccacccggggacaagggaaaccggggggagagggggaagaaaggctctagagggcctaaaggggataagggagaccaaggagcgcctggattagatgccccctgcccattgggcgaagatggcttaccagtccaaggctgctggaacaagtgatgcctctaaccttggattggcctgtgtgtgtgtttgtacatagaatatttatttttatacagttttcactttttgaaaatgccagaagtatgatgcatcttacagattattaaaaaagaaagaaaaacctgcatattttgtacagaaaatatcaacctcttcccttttgtttacaagatgttttgtataagcctatgtctctaatacattttttgtttggtcgtaatgtmtgcatgatatttgtgcacatttattaagtatcgaagsttaataaattattgtgtcctggtgccaaagggggccagccagaactgaggtgctggctagctcatgtgtgaattcacataaatgtagaggtccatgatatttgctaagctaggtgtgtctaagagtattttaaacccttatggattttcattattaaaggaaatgaaacatggcaattc

SEQ ID NO: 62 - DNA, 2955 bp, Homo sapiens
aagtagcacggattgctcatccgatccgtgccgccgcagggagtgtgtcaagttacagaggcgccggaatcggcccctgmgctcctcgccagccgccacgacccacctctgcccatggggccctccrtgtgcgccccttcgcccggggactgaaactgactggcccgggagacacgaggcgcccagaaggactgacagcgcggcaccaactgctctgcagacacttgaagggaaagactgggcggagagaaggagagccggtcagattcccctaactttcctggacttggaamgttcttcgaaataacttttttctyacctaggtgtaccccaattaccgctggttgtgctttttcggcacttcctctcctactgctaatttttccgtcctctttgccgggagcagcggaaagggacgttttccagcgatacaagccctttccccctgccycgcagtttggatagagccttttggcagcggctgtcgcctttatttattctatttatttatttattggttctcaagacgcgagaggatggtagcggagcgcacccacaaagcggcagccaccggtgcccgcggccctggggagttgggcgcgcccgggacggtggctctggtggcggcgcgggcggagcgcggcgcacggctgccgagtccagggtcgtgcgggctgctgacgctggccctctgctcgctggcactcagcctgctcgcccactttcggacggccgagctgcaggcccgggtgctgcgcctggaagcggagcgcggggagcagcaaatggagacrgctattttgggacgagtcaatcaactgctggacgagaaatggaagctccactcaaggaggcgccgggaggccccaaagacatctccaggatgtaactgcccaccaggtaagcaggtcaaccaggmactagaggtttccctggatttccgggtcccattgggctggacggcaaaccgggccacccaggaccaaagggcgacatgggtctgacgggtcccccaggacagccgggaccccagggacaaaaaggagaaaagggtcagtgtggagagtacccacaccgggagtgcctaagcagcatgccagcagctctgcgctccagccarataattgccctgaagggcgaacagagccaggccagcatccaaggtccaccagggcccccaggcccccctggaccaagtggacctctggggcacccaggactgccagggcctatggggccacctggcttacctgggcctcctggaccaaagggagacccagggatccagggctaccacggccggaagggagaacggggcatgccagggatgccaggcaagcatggagccaagggggcgcccggaattgcsgtggctgggatgaagggtgagccagggatcccaggaaccaagggtgagaagggggctgaaggctcccctgggcttcctggcctcctggggcagaagggagagaaaggcgatgctggcaactccattggaggaggcagaggggaacctggccctccagggctccctgggcccccagggccaaagggagaagcaggtgtcgatggccaggttggccccccagggcagccaggagacaagggggagcgtggagcagctggagaacagggaccagatggccccaagggctccaagggagaaccagggaaaggagagatggtggattacaatggaaacatcaatgaggctctccaggagatccggacgctggccttgatggggcctcctggtcttcctgggcaaattggcccacctggagctccagggattccaggccagaagggggagattggactgccaggccctccaggacacgatggggaaaagggacctcgcggtaaaccaggagacatgggccctcctggtccccaaggccccccaggaaaggatggacctccaggagtgaagggagaaaacgggcasccagggagcccaggagagaagggggaaaaaggggagacaggacaagcaggctcaccgggagagaaaggagaagccggggagaagggcaatccaggagcagaggttcctgggctgccagggccagaggggcctcccggacctccggggctccaaggtgttcctggaccaaagggggaagcaggactagatggagcaaaaggagagaaaggcttccagggagaaaaaggagaccgtggtcccctgggactacccggagcttcaggtttggacggcaggcctgggccaccgggtactccaggaccaattggagttccaggcccagcgggaccaaagggcgagaggggcagcaaaggagaccctgggatgacaggaccaacgggagcagctgggcttcctggtttacatggaccacccggggacaagggaaaccggggggagagggggaagaaaggctctagagggcctaaaggggataagggagaccaaggagcgcctggattagatgccccctgcccattgggcgaagatggcttaccagtccaaggctgctggaacaagtgatgcctctaaccttggattggcctgtgtgtgtgtttgtacatagaatatttatttttatacagttttcactttttgaaaatgccagaagtatgatgcatcttacagattattaaaaaagaaagaaaaacctgcatattttgtacagaaaatatcaacctcttcccttttgtttacaagatgttttgtataagcctatgtctctaatacattttttgtttggtcgtaatgtmtgcatgatatttgtgcacatttattaagtatcgaagsttaataaattattgtgtcctggtgccaaagggggccagccagaactgaggtgctggctagctcatgtgtgaattcacataaatgtagaggtccatgatatttgctaagctaggtgtgtctaagagtattttaaacccttatggattttcattattaaaggaaatgaaacatggcaattc

SEQ ID NO: 63 - DNA, 3103 bp, Homo sapiens
aagtagcacggattgctcatccgatccgtgccgccgcagggagtgtgtcaagttacagaggcgccggaatcggcccctgmgctcctcgccagccgccacgacccacctctgcccatggggccctccrtgtgcgccccttcgcccggggactgaaactgactggcccgggagacacgaggcgcccagaaggactgacagcgcggcaccaactgctctgcagacacttgaagggaaagactgggcggagagaaggagagccggtcagattcccctaactttcctggacttggaamgttcttcgaaataacttttttctyacctaggtgtaccccaattaccgctggttgtgctttttcggcacttcctctcctactgctaatttttccgtcctctttgccgggagcagcggaaagggacgttttccagcgatacaagccctttccccctgccycgcagtttggatagagccttttggcagcggctgtcgcctttatttattctatttatttatttattggttctcaagacgcgagaggatggtagcggagcgcacccacaaagcggcagccaccggtgcccgcggccctggggagttgggcgcgcccgggacggtggctctggtggcggcgcgggcggagcgcggcgcacggctgccgagtccagggtcgtgcgggctgctgacgctggccctctgctcgctggcactcagcctgctcgcccactttcggacggccgagctgcaggcccgggtgctgcgcctggaagcggagcgcggggagcagcaaatggagacrgctattttgggacgagtcaatcaactgctggacgagaaatggaagctccactcaaggaggcgccgggaggccccaaagacatctccaggatgtaactgcccaccaggtgctggtaacccgaggggtcccactggaagacccggactcccaggggacaaaggtgccattgggatgcctggacgtgtggggtcccccggagacgctgggctgtccatcattggtccccgcggcccccctggtcaaccaggmactagaggtttccctggatttccgggtcccattgggctggacggcaaaccgggccacccaggaccaaagggcgacatgggtctgacgggtcccccaggacagccgggaccccagggacaaaaaggagaaaagggtcagtgtggagagtacccacaccgggagtgcctaagcagcatgccagcagctctgcgctccagccarataattgccctgaagctgctgcctctcctcaattcagtgcgactggctccacccccggtcataaaaaggcggacrttccagggcgaacagagccaggccagcatccaaggtccaccagggcccccaggcccccctggaccaagtggacctctggggcacccaggactgccagggcctatggggccacctggcttacctgggcctcctggaccaaagggagacccagggatccagggctaccacggccggaagggagaacggggcatgccagggatgccaggcaagcatggagccaagggggcgcccggaattgcsgtggctgggatgaagggtgagccagggatcccaggaaccaagggtgagaagggggctgaaggctcccctgggcttcctggcctcctggggcagaagggagagaaaggcgatgctggcaactccattggaggaggcagaggggaacctggccctccagggctccctgggcccccagggccaaagggagaagcaggtgtcgatggccaggttggccccccagggcagccaggagacaagggggagcgtggagcagctggagaacagggaccagatggccccaagggctccaagggagaaccagggaaaggagagatggtggattacaatggaaacatcaatgaggctctccaggagatccggacgctggccttgatggggcctcctggtcttcctgggcaaattggcccacctggagctccagggattccaggccagaagggggagattggactgccaggccctccaggacacgatggggaaaagggacctcgcggtaaaccaggagacatgggccctcctggtccccaaggccccccaggaaaggatggacctccaggagtgaagggagaaaacgggcasccagggagcccaggagagaagggggaaaaaggggagacaggacaagcaggctcaccgggagagaaaggagaagccggggagaagggcaatccaggagcagaggggctccaaggtgttcctggaccaaagggggaagcaggactagatggagcaaaaggagagaaaggcttccagggagaaaaaggagaccgtggtcccctgggactacccggagcttcaggtttggacggcaggcctgggccaccgggtactccaggaccaattggagttccaggcccagcgggaccaaagggcgagaggggcagcaaaggagaccctgggatgacaggaccaacgggagcagctgggcttcctggtttacatggaccacccggggacaagggaaaccggggggagagggggaagaaaggctctagagggcctaaaggggataagggagaccaaggagcgcctggattagatgccccctgcccattgggcgaagatggcttaccagtccaaggctgctggaacaagtgatgcctctaaccttggattggcctgtgtgtgtgtttgtacatagaatatttatttttatacagttttcactttttgaaaatgccagaagtatgatgcatcttacagattattaaaaaagaaagaaaaacctgcatattttgtacagaaaatatcaacctcttcccttttgtttacaagatgttttgtataagcctatgtctctaatacattttttgtttggtcgtaatgtmtgcatgatatttgtgcacatttattaagtatcgaagsttaataaattattgtgtcctggtgccaaagggggccagccagaactgaggtgctggctagctcatgtgtgaattcacataaatgtagaggtccatgatatttgctaagctaggtgtgtctaagagtattttaaacccttatggattttcattattaaaggaaatgaaacatggcaattc

SEQ ID NO: 64 - DNA, 3079 bp, Homo sapiens
aagtagcacggattgctcatccgatccgtgccgccgcagggagtgtgtcaagttacagaggcgccggaatcggcccctgmgctcctcgccagccgccacgacccacctctgcccatggggccctccrtgtgcgccccttcgcccggggactgaaactgactggcccgggagacacgaggcgcccagaaggactgacagcgcggcaccaactgctctgcagacacttgaagggaaagactgggcggagagaaggagagccggtcagattcccctaactttcctggacttggaamgttcttcgaaataacttttttctyacctaggtgtaccccaattaccgctggttgtgctttttcggcacttcctctcctactgctaatttttccgtcctctttgccgggagcagcggaaagggacgttttccagcgatacaagccctttccccctgccycgcagtttggatagagccttttggcagcggctgtcgcctttatttattctatttatttatttattggttctcaagacgcgagaggatggtagcggagcgcacccacaaagcggcagccaccggtgcccgcggccctggggagttgggcgcgcccgggacggtggctctggtggcggcgcgggcggagcgcggcgcacggctgccgagtccagggtcgtgcgggctgctgacgctggccctctgctcgctggcactcagcctgctcgcccactttcggacggccgagctgcaggcccgggtgctgcgcctggaagcggagcgcggggagcagcaaatggagacrgctattttgggacgagtcaatcaactgctggacgagaaatggaagctccactcaaggaggcgccgggaggccccaaagacatctccaggatgtaactgcccaccaggtgctggtaacccgaggggtcccactggaagacccggactcccaggggacaaaggtgccattgggatgcctggacgtgtggggtcccccggagacgctgggctgtccatcattggtccccgcggcccccctggtcaaccaggmactagaggtttccctggatttccgggtcccattgggctggacggcaaaccgggccacccaggaccaaagggcgacatgggtctgacgggtcccccaggacagccgggaccccagggacaaaaaggagaaaagggtcagtgtggagagtacccacaccgggagtgcctaagcagcatgccagcagctctgcgctccagccarataattgccctgaagggcgaacagagccaggccagcatccaaggtccaccagggcccccaggcccccctggaccaagtggacctctggggcacccaggactgccagggcctatggggccacctggcttacctgggcctcctggaccaaagggagacccagggatccagggctaccacggccggaagggagaacggggcatgccagggatgccaggcaagcatggagccaagggggcgcccggaattgcsgtggctgggatgaagggtgagccagggatcccaggaaccaagggtgagaagggggctgaaggctcccctgggcttcctggcctcctggggcagaagggagagaaaggcgatgctggcaactccattggaggaggcagaggggaacctggccctccagggctccctgggcccccagggccaaagggagaagcaggtgtcgatggccaggttggccccccagggcagccaggagacaagggggagcgtggagcagctggagaacagggaccagatggccccaagggctccaagggagaaccagggaaaggagagatggtggattacaatggaaacatcaatgaggctctccaggagatccggacgctggccttgatggggcctcctggtcttcctgggcaaattggcccacctggagctccagggattccaggccagaagggggagattggactgccaggccctccaggacacgatggggaaaagggacctcgcggtaaaccaggagacatgggccctcctggtccccaaggccccccaggaaaggatggacctccaggagtgaagggagaaaacgggcasccagggagcccaggagagaagggggaaaaaggggagacaggacaagcaggctcaccgggagagaaaggagaagccggggagaagggcaatccaggagcagaggttcctgggctgccagggccagaggggcctcccggacctccggggctccaaggtgttcctggaccaaagggggaagcaggactagatggagcaaaaggagagaaaggcttccagggagaaaaaggagaccgtggtcccctgggactacccggagcttcaggtttggacggcaggcctgggccaccgggtactccaggaccaattggagttccaggcccagcgggaccaaagggcgagaggggcagcaaaggagaccctgggatgacaggaccaacgggagcagctgggcttcctggtttacatggaccacccggggacaagggaaaccggggggagagggggaagaaaggctctagagggcctaaaggggataagggagaccaaggagcgcctggattagatgccccctgcccattgggcgaagatggcttaccagtccaaggctgctggaacaagtgatgcctctaaccttggattggcctgtgtgtgtgtttgtacatagaatatttatttttatacagttttcactttttgaaaatgccagaagtatgatgcatcttacagattattaaaaaagaaagaaaaacctgcatattttgtacagaaaatatcaacctcttcccttttgtttacaagatgttttgtataagcctatgtctctaatacattttttgtttggtcgtaatgtmtgcatgatatttgtgcacatttattaagtatcgaagsttaataaattattgtgtcctggtgccaaagggggccagccagaactgaggtgctggctagctcatgtgtgaattcacataaatgtagaggtccatgatatttgctaagctaggtgtgtctaagagtattttaaacccttatggattttcattattaaaggaaatgaaacatggcaattc

SEQ ID NO: 65 - DNA, 3047 bp, Homo sapiens
aagtagcacggattgctcatccgatccgtgccgccgcagggagtgtgtcaagttacagaggcgccggaatcggcccctgmgctcctcgccagccgccacgacccacctctgcccatggggccctccrtgtgcgccccttcgcccggggactgaaactgactggcccgggagacacgaggcgcccagaaggactgacagcgcggcaccaactgctctgcagacacttgaagggaaagactgggcggagagaaggagagccggtcagattcccctaactttcctggacttggaamgttcttcgaaataacttttttctyacctaggtgtaccccaattaccgctggttgtgctttttcggcacttcctctcctactgctaatttttccgtcctctttgccgggagcagcggaaagggacgttttccagcgatacaagccctttccccctgccycgcagtttggatagagccttttggcagcggctgtcgcctttatttattctatttatttatttattggttctcaagacgcgagaggatggtagcggagcgcacccacaaagcggcagccaccggtgcccgcggccctggggagttgggcgcgcccgggacggtggctctggtggcggcgcgggcggagcgcggcgcacggctgccgagtccagggtcgtgcgggctgctgacgctggccctctgctcgctggcactcagcctgctcgcccactttcggacggccgagctgcaggcccgggtgctgcgcctggaagcggagcgcggggagcagcaaatggagacrgctattttgggacgagtcaatcaactgctggacgagaaatggaagctccactcaaggaggcgccgggaggccccaaagacatctccaggatgtaactgcccaccagggtcccactggaagacccggactcccaggggacaaaggtgccattgggatgcctggacgtgtggggtcccccggagacgctgggctgtccatcattggtccccgcggcccccctggtcaaccaggmactagaggtttccctggatttccgggtcccattgggctggacggcaaaccgggccacccaggaccaaagggcgacatgggtctgacgggtcccccaggacagccgggaccccagggacaaaaaggagaaaagggtcagtgtggagagtacccacaccgggagtgcctaagcagcatgccagcagctctgcgctccagccarataattgccctgaagctgctgcctctcctcaattcagtgcgactggctccacccccggtcataaaaaggcggacrttccagggcgaacagagccaggccagcatccaaggtccaccagggcccccaggcccccctggaccaagtggacctctggggcacccaggactgccagggcctatggggccacctggcttacctgggcctcctggaccaaagggagacccagggatccagggctaccacggccggaagggagaacggggcatgccagggatgccaggcaagcatggagccaagggggcgcccggaattgcsgtggctgggatgaagggtgagccagggatcccaggaaccaagggtgagaagggggctgaaggctcccctgggcttcctggcctcctggggcagaagggagagaaaggcgatgctggcaactccattggaggaggcagaggggaacctggccctccagggctccctgggcccccagggccaaagggagaagcaggtgtcgatggccaggttggccccccagggcagccaggagacaagggggagcgtggagcagctggagaacagggaccagatggccccaagggctccaagggagaaccagggaaaggagagatggtggattacaatggaaacatcaatgaggctctccaggagatccggacgctggccttgatggggcctcctggtcttcctgggcaaattggcccacctggagctccagggattccaggccagaagggggagattggactgccaggccctccaggacacgatggggaaaagggacctcgcggtaaaccaggagacatgggccctcctggtccccaaggccccccaggaaaggatggacctccaggagtgaagggagaaaacgggcasccagggagcccaggagagaagggggaaaaaggggagacaggacaagcaggctcaccggttcctgggctgccagggccagaggggcctcccggacctccggggctccaaggtgttcctggaccaaagggggaagcaggactagatggagcaaaaggagagaaaggcttccagggagaaaaaggagaccgtggtcccctgggactacccggtactccaggaccaattggagttccaggcccagcgggaccaaagggcgagaggggcagcaaaggagaccctgggatgacaggaccaacgggagcagctgggcttcctggtttacatggaccacccggggacaagggaaaccggggggagagggggaagaaaggctctagagggcctaaaggggataagggagaccaaggagcgcctggattagatgccccctgcccattgggcgaagatggcttaccagtccaaggctgctggaacaagtgatgcctctaaccttggattggcctgtgtgtgtgtttgtacatagaatatttatttttatacagttttcactttttgaaaatgccagaagtatgatgcatcttacagattattaaaaaagaaagaaaaacctgcatattttgtacagaaaatatcaacctcttcccttttgtttacaagatgttttgtataagcctatgtctctaatacattttttgtttggtcgtaatgtmtgcatgatatttgtgcacatttattaagtatcgaagsttaataaattattgtgtcctggtgccaaagggggccagccagaactgaggtgctggctagctcatgtgtgaattcacataaatgtagaggtccatgatatttgctaagctaggtgtgtctaagagtattttaaacccttatggattttcattattaaaggaaatgaaacatggcaattc

SEQ ID NO: 66 - DNA, 2965 bp, Homo sapiens
aagtagcacggattgctcatccgatccgtgccgccgcagggagtgtgtcaagttacagaggcgccggaatcggcccctgmgctcctcgccagccgccacgacccacctctgcccatggggccctccrtgtgcgccccttcgcccggggactgaaactgactggcccgggagacacgaggcgcccagaaggactgacagcgcggcaccaactgctctgcagacacttgaagggaaagactgggcggagagaaggagagccggtcagattcccctaactttcctggacttggaamgttcttcgaaataacttttttctyacctaggtgtaccccaattaccgctggttgtgctttttcggcacttcctctcctactgctaatttttccgtcctctttgccgggagcagcggaaagggacgttttccagcgatacaagccctttccccctgccycgcagtttggatagagccttttggcagcggctgtcgcctttatttattctatttatttatttattggttctcaagacgcgagaggatggtagcggagcgcacccacaaagcggcagccaccggtgcccgcggccctggggagttgggcgcgcccgggacggtggctctggtggcggcgcgggcggagcgcggcgcacggctgccgagtccagggtcgtgcgggctgctgacgctggccctctgctcgctggcactcagcctgctcgcccactttcggacggccgagctgcaggcccgggtgctgcgcctggaagcggagcgcggggagcagcaaatggagacrgctattttgggacgagtcaatcaactgctggacgagaaatggaagctccactcaaggaggcgccgggaggccccaaagacatctccaggatgtaactgcccaccagggagtaaagggccaaccaggcgagaaggmactagaggtttccctggatttccgggtcccattgggctggacggcaaaccgggccacccaggaccaaagggcgacatgggtctgacgggtcccccaggacagccgggaccccagggacaaaaaggagaaaagggtcagtgtggagagtacccacaccgggagtgcctaagcagcatgccagcagctctgcgctccagccarataattgccctgaagggcgaacagagccaggccagcatccaaggtccaccagggcccccaggcccccctggaccaagtggacctctggggcacccaggactgccagggcctatggggccacctggcttacctgggcctcctggaccaaagggagacccagggatccagggctaccacggccggaagggagaacggggcatgccagggatgccaggcaagcatggagccaagggggcgcccggaattgcsgtggctgggatgaagggtgagccagggatcccaggaaccaagggtgagaagggggctgaaggctcccctgggcttcctggcctcctggggcagaagggagagaaaggcgatgctggcaactccattggaggaggcagaggggaacctggccctccagggctccctgggcccccagggccaaagggagaagcaggtgtcgatggccaggttggccccccagggcagccaggagacaagggggagcgtggagcagctggagaacagggaccagatggccccaagggctccaagggagaaccagggaaaggagagatggtggattacaatggaaacatcaatgaggctctccaggagatccggacgctggccttgatggggcctcctggtcttcctgggcaaattggcccacctggagctccagggattccaggccagaagggggagattggactgccaggccctccaggacacgatggggaaaagggacctcgcggtaaaccaggagacatgggccctcctggtccccaaggccccccaggaaaggatggacctccaggagtgaagggagaaaacgggcasccagggagcccaggagagaagggggaaaaaggggagacaggacaagcaggctcaccgggagagaaaggagaagccggggagaagggcaatccaggagcagaggttcctgggctgccagggccagaggggcctcccggacctccggggctccaaggtgttcctggaccaaagggggaagcaggactagatggagcaaaaggagagaaaggcttccagggagaaaaaggagaccgtggtcccctgggactacccggagcttcaggtttggacggcaggcctgggccaccgggtactccaggaccaattggagttccaggcccagcgggaccaaagggcgagaggggcagcaaaggagaccctgggatgacaggaccaacgggagcagctgggcttcctggtttacatggaccacccggggacaagggaaaccggggggagagggggaagaaaggctctagagggcctaaaggggataagggagaccaaggagcgcctggattagatgccccctgcccattgggcgaagatggcttaccagtccaaggctgctggaacaagtgatgcctctaaccttggattggcctgtgtgtgtgtttgtacatagaatatttatttttatacagttttcactttttgaaaatgccagaagtatgatgcatcttacagattattaaaaaagaaagaaaaacctgcatattttgtacagaaaatatcaacctcttcccttttgtttacaagatgttttgtataagcctatgtctctaatacattttttgtttggtcgtaatgtmtgcatgatatttgtgcacatttattaagtatcgaagsttaataaattattgtgtcctggtgccaaagggggccagccagaactgaggtgctggctagctcatgtgtgaattcacataaatgtagaggtccatgatatttgctaagctaggtgtgtctaagagtattttaaacccttatggattttcattattaaaggaaatgaaacatggcaattc

SEQ ID NO: 67 - DNA, 2964 bp, Homo sapiens
aagtagcacggattgctcatccgatccgtgccgccgcagggagtgtgtcaagttacagaggcgccggaatcggcccctgmgctcctcgccagccgccacgacccacctctgcccatggggccctccrtgtgcgccccttcgcccggggactgaaactgactggcccgggagacacgaggcgcccagaaggactgacagcgcggcaccaactgctctgcagacacttgaagggaaagactgggcggagagaaggagagccggtcagattcccctaactttcctggacttggaamgttcttcgaaataacttttttctyacctaggtgtaccccaattaccgctggttgtgctttttcggcacttcctctcctactgctaatttttccgtcctctttgccgggagcagcggaaagggacgttttccagcgatacaagccctttccccctgccycgcagtttggatagagccttttggcagcggctgtcgcctttatttattctatttatttatttattggttctcaagacgcgagaggatggtagcggagcgcacccacaaagcggcagccaccggtgcccgcggccctggggagttgggcgcgcccgggacggtggctctggtggcggcgcgggcggagcgcggcgcacggctgccgagtccagggtcgtgcgggctgctgacgctggccctctgctcgctggcactcagcctgctcgcccactttcggacggccgagctgcaggcccgggtgctgcgcctggaagcggagcgcggggagcagcaaatggagacrgctattttgggacgagtcaatcaactgctggacgagaaatggaagctccactcaaggaggcgccgggaggccccaaagacatctccaggatgtaactgcccaccaggtaagcaggtcaaccaggmactagaggtttccctggatttccgggtcccattgggctggacggcaaaccgggccacccaggaccaaagggcgacatgggtctgacgggtcccccaggacagccgggaccccagggacaaaaaggagaaaagggtcagtgtggagagtacccacaccggctgctgcctctcctcaattcagtgcgactggctccacccccggtcataaaaaggcggacrttccagggcgaacagagccaggccagcatccaaggtccaccagggcccccaggcccccctggaccaagtggacctctggggcacccaggactgccagggcctatggggccacctggcttacctgggcctcctggaccaaagggagacccagggatccagggctaccacggccggaagggagaacggggcatgccagggatgccaggcaagcatggagccaagggggcgcccggaattgcsgtggctgggatgaagggtgagccagggatcccaggaaccaagggtgagaagggggctgaaggctcccctgggcttcctggcctcctggggcagaagggagagaaaggcgatgctggcaactccattggaggaggcagaggggaacctggccctccagggctccctgggcccccagggccaaagggagaagcaggtgtcgatggccaggttggccccccagggcagccaggagacaagggggagcgtggagcagctggagaacagggaccagatggccccaagggctccaagggagaaccagggaaaggagagatggtggattacaatggaaacatcaatgaggctctccaggagatccggacgctggccttgatggggcctcctggtcttcctgggcaaattggcccacctggagctccagggattccaggccagaagggggagattggactgccaggccctccaggacacgatggggaaaagggacctcgcggtaaaccaggagacatgggccctcctggtccccaaggccccccaggaaaggatggacctccaggagtgaagggagaaaacgggcasccagggagcccaggagagaagggggaaaaaggggagacaggacaagcaggctcaccgggagagaaaggagaagccggggagaagggcaatccaggagcagaggttcctgggctgccagggccagaggggcctcccggacctccggggctccaaggtgttcctggaccaaagggggaagcaggactagatggagcaaaaggagagaaaggcttccagggagaaaaaggagaccgtggtcccctgggactacccggagcttcaggtttggacggcaggcctgggccaccgggtactccaggaccaattggagttccaggcccagcgggaccaaagggcgagaggggcagcaaaggagaccctgggatgacaggaccaacgggagcagctgggcttcctggtttacatggaccacccggggacaagggaaaccggggggagagggggaagaaaggctctagagggcctaaaggggataagggagaccaaggagcgcctggattagatgccccctgcccattgggcgaagatggcttaccagtccaaggctgctggaacaagtgatgcctctaaccttggattggcctgtgtgtgtgtttgtacatagaatatttatttttatacagttttcactttttgaaaatgccagaagtatgatgcatcttacagattattaaaaaagaaagaaaaacctgcatattttgtacagaaaatatcaacctcttcccttttgtttacaagatgttttgtataagcctatgtctctaatacattttttgtttggtcgtaatgtmtgcatgatatttgtgcacatttattaagtatcgaagsttaataaattattgtgtcctggtgccaaagggggccagccagaactgaggtgctggctagctcatgtgtgaattcacataaatgtagaggtccatgatatttgctaagctaggtgtgtctaagagtattttaaacccttatggattttcattattaaaggaaatgaaacatggcaattc

SEQ ID NO: 68 - DNA, 2969 bp, Homo sapiens
aagtagcacggattgctcatccgatccgtgccgccgcagggagtgtgtcaagttacagaggcgccggaatcggcccctgmgctcctcgccagccgccacgacccacctctgcccatggggccctccrtgtgcgccccttcgcccggggactgaaactgactggcccgggagacacgaggcgcccagaaggactgacagcgcggcaccaactgctctgcagacacttgaagggaaagactgggcggagagaaggagagccggtcagattcccctaactttcctggacttggaamgttcttcgaaataacttttttctyacctaggtgtaccccaattaccgctggttgtgctttttcggcacttcctctcctactgctaatttttccgtcctctttgccgggagcagcggaaagggacgttttccagcgatacaagccctttccccctgccycgcagtttggatagagccttttggcagcggctgtcgcctttatttattctatttatttatttattggttctcaagacgcgagaggatggtagcggagcgcacccacaaagcggcagccaccggtgcccgcggccctggggagttgggcgcgcccgggacggtggctctggtggcggcgcgggcggagcgcggcgcacggctgccgagtccagggtcgtgcgggctgctgacgctggccctctgctcgctggcactcagcctgctcgcccactttcggacggccgagctgcaggcccgggtgctgcgcctggaagcggagcgcggggagcagcaaatggagacrgctattttgggacgagtcaatcaactgctggacgagaaatggaagctccactcaaggaggcgccgggaggccccaaagacatctccaggatgtaactgcccaccagggtcccactggaagacccggactcccagggtcccccggagacgctgggctgtccatcattggtccccgcggcccccctggtcaaccaggmactagaggtttccctggatttccgggtcccattgggctggacggcaaaccgggccacccaggaccaaagggcgacatgggtctgacgggtcccccaggacagccgggaccccagggacaaaaaggagaaaagggtcagtgtggagagtacccacaccggggcgaacagagccaggccagcatccaaggtccaccagggcccccaggcccccctggaccaagtggacctctggggcacccaggactgccagggcctatggggccacctggcttacctgggcctcctggaccaaagggagacccagggatccagggctaccacggccggaagggagaacggggcatgccagggatgccaggcaagcatggagccaagggggcgcccggaattgcsgtggctgggatgaagggtgagccagggatcccaggaaccaagggtgagaagggggctgaaggctcccctgggcttcctggcctcctggggcagaagggagagaaaggcgatgctggcaactccattggaggaggcagaggggaacctggccctccagggctccctgggcccccagggccaaagggagaagcaggtgtcgatggccaggttggccccccagggcagccaggagacaagggggagcgtggagcagctggagaacagggaccagatggccccaagggctccaagggagaaccagggaaaggagagatggtggattacaatggaaacatcaatgaggctctccaggagatccggacgctggccttgatggggcctcctggtcttcctgggcaaattggcccacctggagctccagggattccaggccagaagggggagattggactgccaggccctccaggacacgatggggaaaagggacctcgcggtaaaccaggagacatgggccctcctggtccccaaggccccccaggaaaggatggacctccaggagtgaagggagaaaacgggcasccagggagcccaggagagaagggggaaaaaggggagacaggacaagcaggctcaccgggagagaaaggagaagccggggagaagggcaatccaggagcagaggttcctgggctgccagggccagaggggcctcccggacctccggggctccaaggtgttcctggaccaaagggggaagcaggactagatggagcaaaaggagagaaaggcttccagggagaaaaaggagaccgtggtcccctgggactacccggagcttcaggtttggacggcaggcctgggccaccgggtactccaggaccaattggagttccaggcccagcgggaccaaagggcgagaggggcagcaaaggagaccctgggatgacaggaccaacgggagcagctgggcttcctggtttacatggaccacccggggacaagggaaaccggggggagagggggaagaaaggctctagagggcctaaaggggataagggagaccaaggagcgcctggattagatgccccctgcccattgggcgaagatggcttaccagtccaaggctgctggaacaagtgatgcctctaaccttggattggcctgtgtgtgtgtttgtacatagaatatttatttttatacagttttcactttttgaaaatgccagaagtatgatgcatcttacagattattaaaaaagaaagaaaaacctgcatattttgtacagaaaatatcaacctcttcccttttgtttacaagatgttttgtataagcctatgtctctaatacattttttgtttggtcgtaatgtmtgcatgatatttgtgcacatttattaagtatcgaagsttaataaattattgtgtcctggtgccaaagggggccagccagaactgaggtgctggctagctcatgtgtgaattcacataaatgtagaggtccatgatatttgctaagctaggtgtgtctaagagtattttaaacccttatggattttcattattaaaggaaatgaaacatggcaattc

SEQ ID NO: 69 - DNA, 3064 bp, Homo sapiens
aagtagcacggattgctcatccgatccgtgccgccgcagggagtgtgtcaagttacagaggcgccggaatcggcccctgmgctcctcgccagccgccacgacccacctctgcccatggggccctccrtgtgcgccccttcgcccggggactgaaactgactggcccgggagacacgaggcgcccagaaggactgacagcgcggcaccaactgctctgcagacacttgaagggaaagactgggcggagagaaggagagccggtcagattcccctaactttcctggacttggaamgttcttcgaaataacttttttctyacctaggtgtaccccaattaccgctggttgtgctttttcggcacttcctctcctactgctaatttttccgtcctctttgccgggagcagcggaaagggacgttttccagcgatacaagccctttccccctgccycgcagtttggatagagccttttggcagcggctgtcgcctttatttattctatttatttatttattggttctcaagacgcgagaggatggtagcggagcgcacccacaaagcggcagccaccggtgcccgcggccctggggagttgggcgcgcccgggacggtggctctggtggcggcgcgggcggagcgcggcgcacggctgccgagtccagggtcgtgcgggctgctgacgctggccctctgctcgctggcactcagcctgctcgcccactttcggacggccgagctgcaggcccgggtgctgcgcctggaagcggagcgcggggagcagcaaatggagacrgctattttgggacgagtcaatcaactgctggacgagaaatggaagctccactcaaggaggcgccgggaggccccaaagacatctccaggatgtaactgcccaccaggtgctggtaacccgaggggtcccactggaagacccggactcccaggggacaaaggtgccattgggatgcctggacgtgtggggtcccccggagacgctgggctgtccatcattggtccccgcggcccccctggtcaaccaggmactagaggtttccctggatttccgggtcccattgggctggacggcaaaccgggccacccaggaccaaagggcgacatgggtctgacgggtcccccaggacagccgggaccccagggacaaaaaggagaaaagggtcagtgtggagagtacccacaccgggagtgcctaagcagcatgccagcagctctgcgctccagccarataattgccctgaagctgctgcctctcctcaattcagtgcgactggctccacccccggtcataaaaaggcggacrttccagggcgaacagagccaggccagcatccaaggtccaccagggcccccaggcccccctggaccaagtggacctctggggcacccaggactgccagggcctatggggccacctggcttacctgggcctcctggaccaaagggagacccagggatccagggctaccacggccggaagggagaacggggcatgccagggatgccaggcaagcatggagccaagggggcgcccggaattgcsgtggctgggatgaagggtgagccagggatcccaggaaccaagggtgagaagggggctgaaggctcccctgggcttcctggcctcctggggcagaagggagagaaaggcgatgctggcaactccattggaggaggcagaggggaacctggccctccagggctccctgggcccccagggccaaagggagaagcaggtgtcgatggccaggttggccccccagggcagccaggagacaagggggagcgtggagcagctggagaacagggaccagatggccccaagggctccaagggagaaccagggaaaggagagatggtggattacaatggaaacatcaatgaggctctccaggagatccggacgctggccttgatggggcctcctggtcttcctgggcaaattggcccacctggagctccagggattccaggccagaagggggagattggactgccaggccctccaggacacgatggggaaaagggacctcgcggtaaaccaggagacatgggccctcctggtccccaaggccccccaggaaaggatggacctccaggagtgaagggagaaaacgggcasccagggagcccaggagagaagggggaaaaaggggagacaggacaagcaggctcaccggttcctgggctgccagggccagaggggcctcccggacctccggggctccaaggtgttcctggaccaaagggggaagcaggactagatggagcaaaaggagagaaaggcttccagggagaaaaaggagaccgtggtcccctgggactacccggtactccaggaccaattggagttccaggcccagcgggaccaaagggcgagaggggcagcaaaggagaccctgggatgacaggaccaacgggagcagctgggcttcctggtttacatggaccacccggggacaagggaaaccggggggagagggggaagaaaggctctagagggcctaaaggggataagggagaccaaggagcgcctggattagatgccccctgcccattgggcgaagatggcttaccagtccaaggctgctggaacaagtgatgcctctaaccttggattggcctgtgtgtgtgtttgtacatagaatatttatttttatacagttttcactttttgaaaatgccagaagtatgatgcatcttacagattattaaaaaagaaagaaaaacctgcatattttgtacagaaaatatcaacctcttcccttttgtttacaagatgttttgtataagcctatgtctctaatacattttttgtttggtcgtaatgtmtgcatgatatttgtgcacatttattaagtatcgaagsttaataaattattgtgtcctggtgccaaagggggccagccagaactgaggtgctggctagctcatgtgtgaattcacataaatgtagaggtccatgatatttgctaagctaggtgtgtctaagagtattttaaacccttatggattttcattattaaaggaaatgaaacatggcaattc

SEQ ID NO: 70 - DNA, 3071 bp, Homo sapiens
aagtagcacggattgctcatccgatccgtgccgccgcagggagtgtgtcaagttacagaggcgccggaatcggcccctgmgctcctcgccagccgccacgacccacctctgcccatggggccctccrtgtgcgccccttcgcccggggactgaaactgactggcccgggagacacgaggcgcccagaaggactgacagcgcggcaccaactgctctgcagacacttgaagggaaagactgggcggagagaaggagagccggtcagattcccctaactttcctggacttggaamgttcttcgaaataacttttttctyacctaggtgtaccccaattaccgctggttgtgctttttcggcacttcctctcctactgctaatttttccgtcctctttgccgggagcagcggaaagggacgttttccagcgatacaagccctttccccctgccycgcagtttggatagagccttttggcagcggctgtcgcctttatttattctatttatttatttattggttctcaagacgcgagaggatggtagcggagcgcacccacaaagcggcagccaccggtgcccgcggccctggggagttgggcgcgcccgggacggtggctctggtggcggcgcgggcggagcgcggcgcacggctgccgagtccagggtcgtgcgggctgctgacgctggccctctgctcgctggcactcagcctgctcgcccactttcggacggccgagctgcaggcccgggtgctgcgcctggaagcggagcgcggggagcagcaaatggagacrgctattttgggacgagtcaatcaactgctggacgagaaatggaagctccactcaaggaggcgccgggaggccccaaagacatctccaggatgtaactgcccaccagggtcccactggaagacccggactcccaggggacaaaggtgccattgggatgcctggacgtgtggggtcccccggagacgctgggctgtccatcattggtccccgcggcccccctggtcaaccaggmactagaggtttccctggatttccgggtcccattgggctggacggcaaaccgggccacccaggaccaaagggcgacatgggtctgacgggtcccccaggacagccgggaccccagggacaaaaaggagaaaagggtcagtgtggagagtacccacaccggctgctgcctctcctcaattcagtgcgactggctccacccccggtcataaaaaggcggacrttccagggcgaacagagccaggccagcatccaaggtccaccagggcccccaggcccccctggaccaagtggacctctggggcacccaggactgccagggcctatggggccacctggcttacctgggcctcctggaccaaagggagacccagggatccagggctaccacggccggaagggagaacggggcatgccagggatgccaggcaagcatggagccaagggggcgcccggaattgcsgtggctgggatgaagggtgagccagggatcccaggaaccaagggtgagaagggggctgaaggctcccctgggcttcctggcctcctggggcagaagggagagaaaggcgatgctggcaactccattggaggaggcagaggggaacctggccctccagggctccctgggcccccagggccaaagggagaagcaggtgtcgatggccaggttggccccccagggcagccaggagacaagggggagcgtggagcagctggagaacagggaccagatggccccaagggctccaagggagaaccagggaaaggagagatggtggattacaatggaaacatcaatgaggctctccaggagatccggacgctggccttgatggggcctcctggtcttcctgggcaaattggcccacctggagctccagggattccaggccagaagggggagattggactgccaggccctccaggacacgatggggaaaagggacctcgcggtaaaccaggagacatgggccctcctggtccccaaggccccccaggaaaggatggacctccaggagtgaagggagaaaacgggcasccagggagcccaggagagaagggggaaaaaggggagacaggacaagcaggctcaccgggagagaaaggagaagccggggagaagggcaatccaggagcagaggttcctgggctgccagggccagaggggcctcccggacctccggggctccaaggtgttcctggaccaaagggggaagcaggactagatggagcaaaaggagagaaaggcttccagggagaaaaaggagaccgtggtcccctgggactacccggagcttcaggtttggacggcaggcctgggccaccgggtactccaggaccaattggagttccaggcccagcgggaccaaagggcgagaggggcagcaaaggagaccctgggatgacaggaccaacgggagcagctgggcttcctggtttacatggaccacccggggacaagggaaaccggggggagagggggaagaaaggctctagagggcctaaaggggataagggagaccaaggagcgcctggattagatgccccctgcccattgggcgaagatggcttaccagtccaaggctgctggaacaagtgatgcctctaaccttggattggcctgtgtgtgtgtttgtacatagaatatttatttttatacagttttcactttttgaaaatgccagaagtatgatgcatcttacagattattaaaaaagaaagaaaaacctgcatattttgtacagaaaatatcaacctcttcccttttgtttacaagatgttttgtataagcctatgtctctaatacattttttgtttggtcgtaatgtmtgcatgatatttgtgcacatttattaagtatcgaagsttaataaattattgtgtcctggtgccaaagggggccagccagaactgaggtgctggctagctcatgtgtgaattcacataaatgtagaggtccatgatatttgctaagctaggtgtgtctaagagtattttaaacccttatggattttcattattaaaggaaatgaaacatggcaattc

SEQ ID NO: 71 - DNA, 3067 bp, Homo sapiens
aagtagcacggattgctcatccgatccgtgccgccgcagggagtgtgtcaagttacagaggcgccggaatcggcccctgmgctcctcgccagccgccacgacccacctctgcccatggggccctccrtgtgcgccccttcgcccggggactgaaactgactggcccgggagacacgaggcgcccagaaggactgacagcgcggcaccaactgctctgcagacacttgaagggaaagactgggcggagagaaggagagccggtcagattcccctaactttcctggacttggaamgttcttcgaaataacttttttctyacctaggtgtaccccaattaccgctggttgtgctttttcggcacttcctctcctactgctaatttttccgtcctctttgccgggagcagcggaaagggacgttttccagcgatacaagccctttccccctgccycgcagtttggatagagccttttggcagcggctgtcgcctttatttattctatttatttatttattggttctcaagacgcgagaggatggtagcggagcgcacccacaaagcggcagccaccggtgcccgcggccctggggagttgggcgcgcccgggacggtggctctggtggcggcgcgggcggagcgcggcgcacggctgccgagtccagggtcgtgcgggctgctgacgctggccctctgctcgctggcactcagcctgctcgcccactttcggacggccgagctgcaggcccgggtgctgcgcctggaagcggagcgcggggagcagcaaatggagacrgctattttgggacgagtcaatcaactgctggacgagaaatggaagctccactcaaggaggcgccgggaggccccaaagacatctccaggatgtaactgcccaccaggtgctggtaacccgaggggtcccactggaagacccggactcccaggggacaaaggtgccattgggatgcctggacgtgtggggtcccccggagacgctgggctgtccatcattggtccccgcggcccccctggtcaaccaggmactagaggtttccctggatttccgggtcccattgggctggacggcaaaccgggccacccaggaccaaagggcgacatgggtctgacgggtcccccaggacagccgggaccccagggacaaaaaggagaaaagggtcagtgtggagagtacccacaccgggagtgcctaagcagcatgccagcagctctgcgctccagccarataattgccctgaagctgctgcctctcctcaattcagtgcgactggctccacccccggtcataaaaaggcggacrttccagggcgaacagagccaggccagcatccaaggtccaccagggcccccaggcccccctggaccaagtggacctctggggcacccaggactgccagggcctatggggccacctggcttacctgggcctcctggaccaaagggagacccagggatccagggctaccacggccggaagggagaacggggcatgccagggatgccaggcaagcatggagccaagggggcgcccggaattgcsgtggctgggatgaagggtgagccagggatcccaggaaccaagggtgagaagggggctgaaggctcccctgggcttcctggcctcctggggcagaagggagagaaaggcgatgctggcaactccattggaggaggcagaggggaacctggccctccagggctccctgggcccccagggccaaagggagaagcaggtgtcgatggccaggttggccccccagggcagccaggagacaagggggagcgtggagcagctggagaacagggaccagatggccccaagggctccaagggagaaccagggaaaggagagatggtggattacaatggaaacatcaatgaggctctccaggagatccggacgctggccttgatggggcctcctggtcttcctgggcaaattggcccacctggagctccagggattccaggccagaagggggagattggactgccaggccctccaggacacgatggggaaaagggacctcgcggtaaaccaggagacatgggccctcctggtccccaaggccccccaggaaaggatggacctccaggagtgaagggagaaaacgggcasccagggagcccaggagagaagggggaaaaaggggagacaggacaagcaggctcaccgggagagaaaggagaagccggggagaagggcaatccaggagcagaggggctccaaggtgttcctggaccaaagggggaagcaggactagatggagcaaaaggagagaaaggcttccagggagaaaaaggagaccgtggtcccctgggactacccggtactccaggaccaattggagttccaggcccagcgggaccaaagggcgagaggggcagcaaaggagaccctgggatgacaggaccaacgggagcagctgggcttcctggtttacatggaccacccggggacaagggaaaccggggggagagggggaagaaaggctctagagggcctaaaggggataagggagaccaaggagcgcctggattagatgccccctgcccattgggcgaagatggcttaccagtccaaggctgctggaacaagtgatgcctctaaccttggattggcctgtgtgtgtgtttgtacatagaatatttatttttatacagttttcactttttgaaaatgccagaagtatgatgcatcttacagattattaaaaaagaaagaaaaacctgcatattttgtacagaaaatatcaacctcttcccttttgtttacaagatgttttgtataagcctatgtctctaatacattttttgtttggtcgtaatgtmtgcatgatatttgtgcacatttattaagtatcgaagsttaataaattattgtgtcctggtgccaaagggggccagccagaactgaggtgctggctagctcatgtgtgaattcacataaatgtagaggtccatgatatttgctaagctaggtgtgtctaagagtattttaaacccttatggattttcattattaaaggaaatgaaacatggcaattc

SEQ ID NO: 72 - DNA, 3145 bp, Homo sapiens
aagtagcacggattgctcatccgatccgtgccgccgcagggagtgtgtcaagttacagaggcgccggaatcggcccctgmgctcctcgccagccgccacgacccacctctgcccatggggccctccrtgtgcgccccttcgcccggggactgaaactgactggcccgggagacacgaggcgcccagaaggactgacagcgcggcaccaactgctctgcagacacttgaagggaaagactgggcggagagaaggagagccggtcagattcccctaactttcctggacttggaamgttcttcgaaataacttttttctyacctaggtgtaccccaattaccgctggttgtgctttttcggcacttcctctcctactgctaatttttccgtcctctttgccgggagcagcggaaagggacgttttccagcgatacaagccctttccccctgccycgcagtttggatagagccttttggcagcggctgtcgcctttatttattctatttatttatttattggttctcaagacgcgagaggatggtagcggagcgcacccacaaagcggcagccaccggtgcccgcggccctggggagttgggcgcgcccgggacggtggctctggtggcggcgcgggcggagcgcggcgcacggctgccgagtccagggtcgtgcgggctgctgacgctggccctctgctcgctggcactcagcctgctcgcccactttcggacggccgagctgcaggcccgggtgctgcgcctggaagcggagcgcggggagcagcaaatggagacrgctattttgggacgagtcaatcaactgctggacgagaaatggaagctccactcaaggaggcgccgggaggccccaaagacatctccaggatgtaactgcccaccaggtgctggtaacccgaggggtcccactggaagacccggactcccaggggacaaaggtgccattgggatgcctggacgtgtggggtcccccggagacgctgggctgtccatcattggtccccgcggcccccctggtcaaccaggmactagaggtttccctggatttccgggtcccattgggctggacggcaaaccgggccacccaggaccaaagggcgacatgggtctgacgggtcccccaggacagccgggaccccagggacaaaaaggagaaaagggtcagtgtggagagtacccacaccgggagtgcctaagcagcatgccagcagctctgcgctccagccarataattgccctgaagctgctgcctctcctcaattcagtgcgactggctccacccccggtcataaaaaggcggacrttccagggcgaacagagccaggccagcatccaaggtccaccagggcccccaggcccccctggaccaagtggacctctggggcacccaggactgccagggcctatggggccacctggcttacctgggcctcctggaccaaagggagacccagggatccagggctaccacggccggaagggagaacggggcatgccagggatgccaggcaagcatggagccaagggggcgcccggaattgcsgtggctgggatgaagggtgagccagggatcccaggaaccaagggtgagaagggggctgaaggctcccctgggcttcctggcctcctggggcagaagggagagaaaggcgatgctggcaactccattggaggaggcagaggggaacctggccctccagggctccctgggcccccagggccaaagggagaagcaggtgtcgatggccaggttggccccccagggcagccaggagacaagggggagcgtggagcagctggagaacagggaccagatggccccaagggctccaagggagaaccagggaaaggagagatggtggattacaatggaaacatcaatgaggctctccaggagatccggacgctggccttgatggggcctcctggtcttcctgggcaaattggcccacctggagctccagggattccaggccagaagggggagattggactgccaggccctccaggacacgatggggaaaagggacctcgcggtaaaccaggagacatgggccctcctggtccccaaggccccccaggaaaggatggacctccaggagtgaagggagaaaacgggcasccagggagcccaggagagaagggggaaaaaggggagacaggacaagcaggctcaccgggagagaaaggagaagccggggagaagggcaatccaggagcagaggttcctgggctgccagggccagaggggcctcccggacctccggggctccaaggtgttcctggaccaaagggggaagcaggactagatggagcaaaaggagagaaaggcttccagggagaaaaaggagaccgtggtcccctgggactacccggagcttcaggtttggacggcaggcctgggccaccgggtactccaggaccaattggagttccaggcccagcgggaccaaagggcgagaggggcagcaaaggagaccctgggatgacaggaccaacgggagcagctgggcttcctggtttacatggaccacccggggacaagggaaaccggggggagagggggaagaaaggctctagagggcctaaaggggataagggagaccaaggagcgcctggattagatgccccctgcccattgggcgaagatggcttaccagtccaaggctgctggaacaagtgatgcctctaaccttggattggcctgtgtgtgtgtttgtacatagaatatttatttttatacagttttcactttttgaaaatgccagaagtatgatgcatcttacagattattaaaaaagaaagaaaaacctgcatattttgtacagaaaatatcaacctcttcccttttgtttacaagatgttttgtataagcctatgtctctaatacattttttgtttggtcgtaatgtmtgcatgatatttgtgcacatttattaagtatcgaagsttaataaattattgtgtcctggtgccaaagggggccagccagaactgaggtgctggctagctcatgtgtgaattcacataaatgtagaggtccatgatatttgctaagctaggtgtgtctaagagtattttaaacccttatggattttcattattaaaggaaatgaaacatggcaattc

SEQ ID NO: 73 - DNA, 3128 bp, Homo sapiens
aagtagcacggattgctcatccgatccgtgccgccgcagggagtgtgtcaagttacagaggcgccggaatcggcccctgmgctcctcgccagccgccacgacccacctctgcccatggggccctccrtgtgcgccccttcgcccggggactgaaactgactggcccgggagacacgaggcgcccagaaggactgacagcgcggcaccaactgctctgcagacacttgaagggaaagactgggcggagagaaggagagccggtcagattcccctaactttcctggacttggaamgttcttcgaaataacttttttctyacctaggtgtaccccaattaccgctggttgtgctttttcggcacttcctctcctactgctaatttttccgtcctctttgccgggagcagcggaaagggacgttttccagcgatacaagccctttccccctgccycgcagtttggatagagccttttggcagcggctgtcgcctttatttattctatttatttatttattggttctcaagacgcgagaggatggtagcggagcgcacccacaaagcggcagccaccggtgcccgcggccctggggagttgggcgcgcccgggacggtggctctggtggcggcgcgggcggagcgcggcgcacggctgccgagtccagggtcgtgcgggctgctgacgctggccctctgctcgctggcactcagcctgctcgcccactttcggacggccgagctgcaggcccgggtgctgcgcctggaagcggagcgcggggagcagcaaatggagacrgctattttgggacgagtcaatcaactgctggacgagaaatggaagctccactcaaggaggcgccgggaggccccaaagacatctccaggatgtaactgcccaccagggtcccactggaagacccggactcccaggggacaaaggtgccattgggatgcctggacgtgtggggtcccccggagacgctgggctgtccatcattggtccccgcggcccccctggtcaaccaggmactagaggtttccctggatttccgggtcccattgggctggacggcaaaccgggccacccaggaccaaagggcgacatgggtctgacgggtcccccaggacagccgggaccccagggacaaaaaggagaaaagggtcagtgtggagagtacccacaccgggagtgcctaagcagcatgccagcagctctgcgctccagccarataattgccctgaagctgctgcctctcctcaattcagtgcgactggctccacccccggtcataaaaaggcggacrttccagggcgaacagagccaggccagcatccaaggtccaccagggcccccaggcccccctggaccaagtggacctctggggcacccaggactgccagggcctatggggccacctggcttacctgggcctcctggaccaaagggagacccagggatccagggctaccacggccggaagggagaacggggcatgccagggatgccaggcaagcatggagccaagggggcgcccggaattgcsgtggctgggatgaagggtgagccagggatcccaggaaccaagggtgagaagggggctgaaggctcccctgggcttcctggcctcctggggcagaagggagagaaaggcgatgctggcaactccattggaggaggcagaggggaacctggccctccagggctccctgggcccccagggccaaagggagaagcaggtgtcgatggccaggttggccccccagggcagccaggagacaagggggagcgtggagcagctggagaacagggaccagatggccccaagggctccaagggagaaccagggaaaggagagatggtggattacaatggaaacatcaatgaggctctccaggagatccggacgctggccttgatggggcctcctggtcttcctgggcaaattggcccacctggagctccagggattccaggccagaagggggagattggactgccaggccctccaggacacgatggggaaaagggacctcgcggtaaaccaggagacatgggccctcctggtccccaaggccccccaggaaaggatggacctccaggagtgaagggagaaaacgggcasccagggagcccaggagagaagggggaaaaaggggagacaggacaagcaggctcaccgggagagaaaggagaagccggggagaagggcaatccaggagcagaggttcctgggctgccagggccagaggggcctcccggacctccggggctccaaggtgttcctggaccaaagggggaagcaggactagatggagcaaaaggagagaaaggcttccagggagaaaaaggagaccgtggtcccctgggactacccggagcttcaggtttggacggcaggcctgggccaccgggtactccaggaccaattggagttccaggcccagcgggaccaaagggcgagaggggcagcaaaggagaccctgggatgacaggaccaacgggagcagctgggcttcctggtttacatggaccacccggggacaagggaaaccggggggagagggggaagaaaggctctagagggcctaaaggggataagggagaccaaggagcgcctggattagatgccccctgcccattgggcgaagatggcttaccagtccaaggctgctggaacaagtgatgcctctaaccttggattggcctgtgtgtgtgtttgtacatagaatatttatttttatacagttttcactttttgaaaatgccagaagtatgatgcatcttacagattattaaaaaagaaagaaaaacctgcatattttgtacagaaaatatcaacctcttcccttttgtttacaagatgttttgtataagcctatgtctctaatacattttttgtttggtcgtaatgtmtgcatgatatttgtgcacatttattaagtatcgaagsttaataaattattgtgtcctggtgccaaagggggccagccagaactgaggtgctggctagctcatgtgtgaattcacataaatgtagaggtccatgatatttgctaagctaggtgtgtctaagagtattttaaacccttatggattttcattattaaaggaaatgaaacatggcaattc

SEQ ID NO: 74 - DNA, 3077 bp, Homo sapiens
aagtagcacggattgctcatccgatccgtgccgccgcagggagtgtgtcaagttacagaggcgccggaatcggcccctgmgctcctcgccagccgccacgacccacctctgcccatggggccctccrtgtgcgccccttcgcccggggactgaaactgactggcccgggagacacgaggcgcccagaaggactgacagcgcggcaccaactgctctgcagacacttgaagggaaagactgggcggagagaaggagagccggtcagattcccctaactttcctggacttggaamgttcttcgaaataacttttttctyacctaggtgtaccccaattaccgctggttgtgctttttcggcacttcctctcctactgctaatttttccgtcctctttgccgggagcagcggaaagggacgttttccagcgatacaagccctttccccctgccycgcagtttggatagagccttttggcagcggctgtcgcctttatttattctatttatttatttattggttctcaagacgcgagaggatggtagcggagcgcacccacaaagcggcagccaccggtgcccgcggccctggggagttgggcgcgcccgggacggtggctctggtggcggcgcgggcggagcgcggcgcacggctgccgagtccagggtcgtgcgggctgctgacgctggccctctgctcgctggcactcagcctgctcgcccactttcggacggccgagctgcaggcccgggtgctgcgcctggaagcggagcgcggggagcagcaaatggagacrgctattttgggacgagtcaatcaactgctggacgagaaatggaagctccactcaaggaggcgccgggaggccccaaagacatctccaggatgtaactgcccaccagggtcccactggaagacccggactcccaggggacaaaggtgccattgggatgcctggacgtgtgggtcaaccaggmactagaggtttccctggatttccgggtcccattgggctggacggcaaaccgggccacccaggaccaaagggcgacatgggtctgacgggtcccccaggacagccgggaccccagggacaaaaaggagaaaagggtcagtgtggagagtacccacaccgggagtgcctaagcagcatgccagcagctctgcgctccagccarataattgccctgaagctgctgcctctcctcaattcagtgcgactggctccacccccggtcataaaaaggcggacrttccagggcgaacagagccaggccagcatccaaggtccaccagggcccccaggcccccctggaccaagtggacctctggggcacccaggactgccagggcctatggggccacctggcttacctgggcctcctggaccaaagggagacccagggatccagggctaccacggccggaagggagaacggggcatgccagggatgccaggcaagcatggagccaagggggcgcccggaattgcsgtggctgggatgaagggtgagccagggatcccaggaaccaagggtgagaagggggctgaaggctcccctgggcttcctggcctcctggggcagaagggagagaaaggcgatgctggcaactccattggaggaggcagaggggaacctggccctccagggctccctgggcccccagggccaaagggagaagcaggtgtcgatggccaggttggccccccagggcagccaggagacaagggggagcgtggagcagctggagaacagggaccagatggccccaagggctccaagggagaaccagggaaaggagagatggtggattacaatggaaacatcaatgaggctctccaggagatccggacgctggccttgatggggcctcctggtcttcctgggcaaattggcccacctggagctccagggattccaggccagaagggggagattggactgccaggccctccaggacacgatggggaaaagggacctcgcggtaaaccaggagacatgggccctcctggtccccaaggccccccaggaaaggatggacctccaggagtgaagggagaaaacgggcasccagggagcccaggagagaagggggaaaaaggggagacaggacaagcaggctcaccgggagagaaaggagaagccggggagaagggcaatccaggagcagaggttcctgggctgccagggccagaggggcctcccggacctccggggctccaaggtgttcctggaccaaagggggaagcaggactagatggagcaaaaggagagaaaggcttccagggagaaaaaggagaccgtggtcccctgggactacccggagcttcaggtttggacggcaggcctgggccaccgggtactccaggaccaattggagttccaggcccagcgggaccaaagggcgagaggggcagcaaaggagaccctgggatgacaggaccaacgggagcagctgggcttcctggtttacatggaccacccggggacaagggaaaccggggggagagggggaagaaaggctctagagggcctaaaggggataagggagaccaaggagcgcctggattagatgccccctgcccattgggcgaagatggcttaccagtccaaggctgctggaacaagtgatgcctctaaccttggattggcctgtgtgtgtgtttgtacatagaatatttatttttatacagttttcactttttgaaaatgccagaagtatgatgcatcttacagattattaaaaaagaaagaaaaacctgcatattttgtacagaaaatatcaacctcttcccttttgtttacaagatgttttgtataagcctatgtctctaatacattttttgtttggtcgtaatgtmtgcatgatatttgtgcacatttattaagtatcgaagsttaataaattattgtgtcctggtgccaaagggggccagccagaactgaggtgctggctagctcatgtgtgaattcacataaatgtagaggtccatgatatttgctaagctaggtgtgtctaagagtattttaaacccttatggattttcattattaaaggaaatgaaacatggcaattc

SEQ ID NO: 75 - DNA, 2824 bp, Homo sapiens
aagtagcacggattgctcatccgatccgtgccgccgcagggagtgtgtcaagttacagaggcgccggaatcggcccctgmgctcctcgccagccgccacgacccacctctgcccatggggccctccrtgtgcgccccttcgcccggggactgaaactgactggcccgggagacacgaggcgcccagaaggactgacagcgcggcaccaactgctctgcagacacttgaagggaaagactgggcggagagaaggagagccggtcagattcccctaactttcctggacttggaamgttcttcgaaataacttttttctyacctaggtgtaccccaattaccgctggttgtgctttttcggcacttcctctcctactgctaatttttccgtcctctttgccgggagcagcggaaagggacgttttccagcgatacaagccctttccccctgccycgcagtttggatagagccttttggcagcggctgtcgcctttatttattctatttatttatttattggttctcaagacgcgagaggatggtagcggagcgcacccacaaagcggcagccaccggtgcccgcggccctggggagttgggcgcgcccgggacggtggctctggtggcggcgcgggcggagcgcggcgcacggctgccgagtccagggtcgtgcgggctgctgacgctggccctctgctcgctggcactcagcctgctcgcccactttcggacggccgagctgcaggcccgggtgctgcgcctggaagcggagcgcggggagcagcaaatggagacrgctattttgggacgagtcaatcaactgctggacgagaaatggaagctccactcaaggaggcgccgggaggccccaaagacatctccaggatgtaactgcccaccaggtgctggtaacccgaggggtcccactggaagacccggactcccaggtcaaccaggmactagaggtttccctggatttccgggtcccattgggctggacggcaaaccgggccacccaggaccaaagggcgacatgggtctgacgggtcccccaggacagccgggaccccagggacaaaaaggagaaaagggtcagtgtggagagtacccacaccgggagtgcctaagcagcatgccagcagctctgcgctccagccarataattgccctgaagggcgaacagagccaggccagcatccaaggtccaccagggcccccaggcccccctggaccaagtggacctctggggcacccaggactgccagggcctatggggccacctggcttacctgggcctcctggaccaaagggagacccagggatccagggctaccacggccggaagggagaacggggcatgccagggatgccaggcaagcatggagccaagggggcgcccggaattgcsgtggctgggatgaagggtgagccagggatcccaggaaccaagggtgagaagggggctgaaggctcccctgggcttcctggcctcctggggcagaagggagagaaaggcgatgctggcaactccattggaggaggcagaggggaacctggccctccagggctccctgggcccccagggccaaagggagaagcaggtgtcgatggccaggttggccccccagggcagccaggagacaagggggagcgtggagcagctggagaacagggaccagatggccccaagggctccaagggagaaccagggaaaggagagatggtggattacaatggaaacatcaatgaggctctccaggagatccggacgctggccttgatggggcctcctggtcttcctgggcaaattggcccacctggagctccagggattccaggccagaagggggagattggactgccaggccctccaggacacgatggggaaaagggacctcgcggtaaaccaggagacatgggccctcctggtccccaaggccccccaggaaaggatggacctccaggagtgaagggagaaaacgggcasccagggagcccaggagagaagggggaaaaaggggagacaggacaagcaggctcaccggttcctgggctgccagggccagaggggcctcccggacctccggggctccaaggtgttcctggaccaaagggggaagcaggactagatggagcaaaaggagagaaaggcttccagggagaaaaaggagaccgtggtcccctgggactacccggtactccaggaccaattggagttccaggcccagcgggaccaaagggcgagaggggcagcaaaggagaccctgggatgacaggaccaacgggagcagctgggcttcctggtttacatggaccacccggggacaagggaaaccggggcgaagatggcttaccagtccaaggctgctggaacaagtgatgcctctaaccttggattggcctgtgtgtgtgtttgtacatagaatatttatttttatacagttttcactttttgaaaatgccagaagtatgatgcatcttacagattattaaaaaagaaagaaaaacctgcatattttgtacagaaaatatcaacctcttcccttttgtttacaagatgttttgtataagcctatgtctctaatacattttttgtttggtcgtaatgtmtgcatgatatttgtgcacatttattaagtatcgaagsttaataaattattgtgtcctggtgccaaagggggccagccagaactgaggtgctggctagctcatgtgtgaattcacataaatgtagaggtccatgatatttgctaagctaggtgtgtctaagagtattttaaacccttatggattttcattattaaaggaaatgaaacatggcaattc

SEQ ID NO: 76 - DNA, 3005 bp, Homo sapiens
aagtagcacggattgctcatccgatccgtgccgccgcagggagtgtgtcaagttacagaggcgccggaatcggcccctgmgctcctcgccagccgccacgacccacctctgcccatggggccctccrtgtgcgccccttcgcccggggactgaaactgactggcccgggagacacgaggcgcccagaaggactgacagcgcggcaccaactgctctgcagacacttgaagggaaagactgggcggagagaaggagagccggtcagattcccctaactttcctggacttggaamgttcttcgaaataacttttttctyacctaggtgtaccccaattaccgctggttgtgctttttcggcacttcctctcctactgctaatttttccgtcctctttgccgggagcagcggaaagggacgttttccagcgatacaagccctttccccctgccycgcagtttggatagagccttttggcagcggctgtcgcctttatttattctatttatttatttattggttctcaagacgcgagaggatggtagcggagcgcacccacaaagcggcagccaccggtgcccgcggccctggggagttgggcgcgcccgggacggtggctctggtggcggcgcgggcggagcgcggcgcacggctgccgagtccagggtcgtgcgggctgctgacgctggccctctgctcgctggcactcagcctgctcgcccactttcggacggccgagctgcaggcccgggtgctgcgcctggaagcggagcgcggggagcagcaaatggagacrgctattttgggacgagtcaatcaactgctggacgagaaatggaagctccactcaaggaggcgccgggaggccccaaagacatctccaggatgtaactgcccaccagggtcccactggaagacccggactcccaggggacaaaggtgccattgggatgcctggacgtgtggggtcccccggagacgctgggctgtccatcattggtccccgcggcccccctggtcaaccaggmactagaggtttccctggatttccgggtcccattgggctggacggcaaaccgggccacccaggaccaaagggcgacatgggtctgacgggtcccccaggacagccgggaccccagggacaaaaaggagaaaagggtcagtgtggagagtacccacaccgggagtgcctaagcagcatgccagcagctctgcgctccagccarataattgccctgaagctgctgcctctcctcaattcagtgcgactggctccacccccggtcataaaaaggcggacrttccagggcgaacagagccaggccagcatccaaggtccaccagggcccccaggcccccctggaccaagtggacctctggggcacccaggactgccagggcctatggggccacctggcttacctgggcctcctggaccaaagggagacccagggatccagggctaccacggccggaagggagaacggggcatgccagggatgccaggcaagcatggagccaagggggcgcccggaattgcsgtggctgggatgaagggtgagccagggatcccaggaaccaagggtgagaagggggctgaaggctcccctgggcttcctggcctcctggggcagaagggagagaaaggcgatgctggcaactccattggaggaggcagaggggaacctggccctccagggctccctgggcccccagggccaaagggagaagcaggtgtcgatggccaggttggccccccagggcagccaggagacaagggggagcgtggagcagctggagaacagggaccagatggccccaagggctccaagggagaaccagggaaaggagagatggtggattacaatggaaacatcaatgaggctctccaggagatccggacgctggccttgatggggcctcctggtcttcctgggcaaattggcccacctggagctccagggattccaggccagaagggggagattggactgccaggccctccaggacacgatggggaaaagggacctcgcggtaaaccaggagacatgggccctcctggtccccaaggccccccaggaaaggatggacctccaggagtgaagggagaaaacgggcasccagggagcccaggagagaagggggaaaaaggggagacaggacaagcaggctcaccgggagagaaaggagaagccggggagaagggcaatccaggagcagaggttcctgggctgccagggccagaggggcctcccggacctccggggctccaaggtgttcctggaccaaagggggaagcaggactagatggagcaaaaggagagaaaggcttccagggagaaaaaggagaccgtggtcccctgggactacccggtactccaggaccaattggagttccaggcccagcgggaccaaagggcgagaggggcagcaaaggagaccctgggatgacaggaccaacgggagcagctgggcttcctggtttacatggaccacccggggacaagggaaaccggggcgaagatggcttaccagtccaaggctgctggaacaagtgatgcctctaaccttggattggcctgtgtgtgtgtttgtacatagaatatttatttttatacagttttcactttttgaaaatgccagaagtatgatgcatcttacagattattaaaaaagaaagaaaaacctgcatattttgtacagaaaatatcaacctcttcccttttgtttacaagatgttttgtataagcctatgtctctaatacattttttgtttggtcgtaatgtmtgcatgatatttgtgcacatttattaagtatcgaagsttaataaattattgtgtcctggtgccaaagggggccagccagaactgaggtgctggctagctcatgtgtgaattcacataaatgtagaggtccatgatatttgctaagctaggtgtgtctaagagtattttaaacccttatggattttcattattaaaggaaatgaaacatggcaattc

SEQ ID NO: 77 - DNA, 3109 bp, Homo sapiens
aagtagcacggattgctcatccgatccgtgccgccgcagggagtgtgtcaagttacagaggcgccggaatcggcccctgmgctcctcgccagccgccacgacccacctctgcccatggggccctccrtgtgcgccccttcgcccggggactgaaactgactggcccgggagacacgaggcgcccagaaggactgacagcgcggcaccaactgctctgcagacacttgaagggaaagactgggcggagagaaggagagccggtcagattcccctaactttcctggacttggaamgttcttcgaaataacttttttctyacctaggtgtaccccaattaccgctggttgtgctttttcggcacttcctctcctactgctaatttttccgtcctctttgccgggagcagcggaaagggacgttttccagcgatacaagccctttccccctgccycgcagtttggatagagccttttggcagcggctgtcgcctttatttattctatttatttatttattggttctcaagacgcgagaggatggtagcggagcgcacccacaaagcggcagccaccggtgcccgcggccctggggagttgggcgcgcccgggacggtggctctggtggcggcgcgggcggagcgcggcgcacggctgccgagtccagggtcgtgcgggctgctgacgctggccctctgctcgctggcactcagcctgctcgcccactttcggacggccgagctgcaggcccgggtgctgcgcctggaagcggagcgcggggagcagcaaatggagacrgctattttgggacgagtcaatcaactgctggacgagaaatggaagctccactcaaggaggcgccgggaggccccaaagacatctccaggatgtaactgcccaccaggtgctggtaacccgaggggtcccactggaagacccggactcccagggtcccccggagacgctgggctgtccatcattggtccccgcggcccccctggtcaaccaggmactagaggtttccctggatttccgggtcccattgggctggacggcaaaccgggccacccaggaccaaagggcgacatgggtctgacgggtcccccaggacagccgggaccccagggacaaaaaggagaaaagggtcagtgtggagagtacccacaccgggagtgcctaagcagcatgccagcagctctgcgctccagccarataattgccctgaagctgctgcctctcctcaattcagtgcgactggctccacccccggtcataaaaaggcggacrttccagggcgaacagagccaggccagcatccaaggtccaccagggcccccaggcccccctggaccaagtggacctctggggcacccaggactgccagggcctatggggccacctggcttacctgggcctcctggaccaaagggagacccagggatccagggctaccacggccggaagggagaacggggcatgccagggatgccaggcaagcatggagccaagggggcgcccggaattgcsgtggctgggatgaagggtgagccagggatcccaggaaccaagggtgagaagggggctgaaggctcccctgggcttcctggcctcctggggcagaagggagagaaaggcgatgctggcaactccattggaggaggcagaggggaacctggccctccagggctccctgggcccccagggccaaagggagaagcaggtgtcgatggccaggttggccccccagggcagccaggagacaagggggagcgtggagcagctggagaacagggaccagatggccccaagggctccaagggagaaccagggaaaggagagatggtggattacaatggaaacatcaatgaggctctccaggagatccggacgctggccttgatggggcctcctggtcttcctgggcaaattggcccacctggagctccagggattccaggccagaagggggagattggactgccaggccctccaggacacgatggggaaaagggacctcgcggtaaaccaggagacatgggccctcctggtccccaaggccccccaggaaaggatggacctccaggagtgaagggagaaaacgggcasccagggagcccaggagagaagggggaaaaaggggagacaggacaagcaggctcaccgggagagaaaggagaagccggggagaagggcaatccaggagcagaggttcctgggctgccagggccagaggggcctcccggacctccggggctccaaggtgttcctggaccaaagggggaagcaggactagatggagcaaaaggagagaaaggcttccagggagaaaaaggagaccgtggtcccctgggactacccggagcttcaggtttggacggcaggcctgggccaccgggtactccaggaccaattggagttccaggcccagcgggaccaaagggcgagaggggcagcaaaggagaccctgggatgacaggaccaacgggagcagctgggcttcctggtttacatggaccacccggggacaagggaaaccggggggagagggggaagaaaggctctagagggcctaaaggggataagggagaccaaggagcgcctggattagatgccccctgcccattgggcgaagatggcttaccagtccaaggctgctggaacaagtgatgcctctaaccttggattggcctgtgtgtgtgtttgtacatagaatatttatttttatacagttttcactttttgaaaatgccagaagtatgatgcatcttacagattattaaaaaagaaagaaaaacctgcatattttgtacagaaaatatcaacctcttcccttttgtttacaagatgttttgtataagcctatgtctctaatacattttttgtttggtcgtaatgtmtgcatgatatttgtgcacatttattaagtatcgaagsttaataaattattgtgtcctggtgccaaagggggccagccagaactgaggtgctggctagctcatgtgtgaattcacataaatgtagaggtccatgatatttgctaagctaggtgtgtctaagagtattttaaacccttatggattttcattattaaaggaaatgaaacatggcaattc

SEQ ID NO: 78 - DNA, 3050 bp, Homo sapiens
aagtagcacggattgctcatccgatccgtgccgccgcagggagtgtgtcaagttacagaggcgccggaatcggcccctgmgctcctcgccagccgccacgacccacctctgcccatggggccctccrtgtgcgccccttcgcccggggactgaaactgactggcccgggagacacgaggcgcccagaaggactgacagcgcggcaccaactgctctgcagacacttgaagggaaagactgggcggagagaaggagagccggtcagattcccctaactttcctggacttggaamgttcttcgaaataacttttttctyacctaggtgtaccccaattaccgctggttgtgctttttcggcacttcctctcctactgctaatttttccgtcctctttgccgggagcagcggaaagggacgttttccagcgatacaagccctttccccctgccycgcagtttggatagagccttttggcagcggctgtcgcctttatttattctatttatttatttattggttctcaagacgcgagaggatggtagcggagcgcacccacaaagcggcagccaccggtgcccgcggccctggggagttgggcgcgcccgggacggtggctctggtggcggcgcgggcggagcgcggcgcacggctgccgagtccagggtcgtgcgggctgctgacgctggccctctgctcgctggcactcagcctgctcgcccactttcggacggccgagctgcaggcccgggtgctgcgcctggaagcggagcgcggggagcagcaaatggagacrgctattttgggacgagtcaatcaactgctggacgagaaatggaagctccactcaaggaggcgccgggaggccccaaagacatctccaggatgtaactgcccaccagggtcccactggaagacccggactcccaggggacaaaggtgccattgggatgcctggacgtgtggggtcccccggagacgctgggctgtccatcattggtccccgcggcccccctggtcaaccaggmactagaggtttccctggatttccgggtcccattgggctggacggcaaaccgggccacccaggaccaaagggcgacatgggtctgacgggtcccccaggacagccgggaccccagggacaaaaaggagaaaagggtcagtgtggagagtacccacaccgggagtgcctaagcagcatgccagcagctctgcgctccagccarataattgccctgaagctgctgcctctcctcaattcagtgcgactggctccacccccggtcataaaaaggcggacrttccagggcgaacagagccaggccagcatccaaggtccaccagggcccccaggcccccctggaccaagtggacctctggggcacccaggactgccagggcctatggggccacctggcttacctgggcctcctggaccaaagggagacccagggatccagggctaccacggccggaagggagaacggggcatgccagggatgccaggcaagcatggagccaagggggcgcccggaattgcsgtggctgggatgaagggtgagccagggatcccaggaaccaagggtgagaagggggctgaaggctcccctgggcttcctggcctcctggggcagaagggagagaaaggcgatgctggcaactccattggaggaggcagaggggaacctggccctccagggctccctgggcccccagggccaaagggagaagcaggtgtcgatggccaggttggccccccagggcagccaggagacaagggggagcgtggagcagctggagaacagggaccagatggccccaagggctccaagggagaaccagggaaaggagagatggtggattacaatggaaacatcaatgaggctctccaggagatccggacgctggccttgatggggcctcctggtcttcctgggcaaattggcccacctggagctccagggattccaggccagaagggggagattggactgccaggccctccaggacacgatggggaaaagggacctcgcggtaaaccaggagacatgggccctcctggtccccaaggccccccaggaaaggatggacctccaggagtgaagggagaaaacgggcasccagggagcccaggagagaagggggaaaaaggggagacaggacaagcaggctcaccgggagagaaaggagaagccggggagaagggcaatccaggagcagaggggctccaaggtgttcctggaccaaagggggaagcaggactagatggagcaaaaggagagaaaggcttccagggagaaaaaggagaccgtggtcccctgggactacccggtactccaggaccaattggagttccaggcccagcgggaccaaagggcgagaggggcagcaaaggagaccctgggatgacaggaccaacgggagcagctgggcttcctggtttacatggaccacccggggacaagggaaaccggggggagagggggaagaaaggctctagagggcctaaaggggataagggagaccaaggagcgcctggattagatgccccctgcccattgggcgaagatggcttaccagtccaaggctgctggaacaagtgatgcctctaaccttggattggcctgtgtgtgtgtttgtacatagaatatttatttttatacagttttcactttttgaaaatgccagaagtatgatgcatcttacagattattaaaaaagaaagaaaaacctgcatattttgtacagaaaatatcaacctcttcccttttgtttacaagatgttttgtataagcctatgtctctaatacattttttgtttggtcgtaatgtmtgcatgatatttgtgcacatttattaagtatcgaagsttaataaattattgtgtcctggtgccaaagggggccagccagaactgaggtgctggctagctcatgtgtgaattcacataaatgtagaggtccatgatatttgctaagctaggtgtgtctaagagtattttaaacccttatggattttcattattaaaggaaatgaaacatggcaattc

SEQ ID NO: 79 - DNA, 2981 bp, Homo sapiens
aagtagcacggattgctcatccgatccgtgccgccgcagggagtgtgtcaagttacagaggcgccggaatcggcccctgmgctcctcgccagccgccacgacccacctctgcccatggggccctccrtgtgcgccccttcgcccggggactgaaactgactggcccgggagacacgaggcgcccagaaggactgacagcgcggcaccaactgctctgcagacacttgaagggaaagactgggcggagagaaggagagccggtcagattcccctaactttcctggacttggaamgttcttcgaaataacttttttctyacctaggtgtaccccaattaccgctggttgtgctttttcggcacttcctctcctactgctaatttttccgtcctctttgccgggagcagcggaaagggacgttttccagcgatacaagccctttccccctgccycgcagtttggatagagccttttggcagcggctgtcgcctttatttattctatttatttatttattggttctcaagacgcgagaggatggtagcggagcgcacccacaaagcggcagccaccggtgcccgcggccctggggagttgggcgcgcccgggacggtggctctggtggcggcgcgggcggagcgcggcgcacggctgccgagtccagggtcgtgcgggctgctgacgctggccctctgctcgctggcactcagcctgctcgcccactttcggacggccgagctgcaggcccgggtgctgcgcctggaagcggagcgcggggagcagcaaatggagacrgctattttgggacgagtcaatcaactgctggacgagaaatggaagctccactcaaggaggcgccgggaggccccaaagacatctccaggatgtaactgcccaccagggtcccactggaagacccggactcccaggggacaaaggtgccattgggatgcctggacgtgtggggtcccccggagacgctgggctgtccatcattggtccccgcggcccccctggtcaaccaggmactagaggtttccctggatttccgggtcccattgggctggacggcaaaccgggccacccaggaccaaagggcgacatgggtctgacgggtcccccaggacagccgggaccccagggacaaaaaggagaaaagggtcagtgtggagagtacccacaccgggagtgcctaagcagcatgccagcagctctgcgctccagccarataattgccctgaagggcgaacagagccaggccagcatccaaggtccaccagggcccccaggcccccctggaccaagtggacctctggggcacccaggactgccagggcctatggggccacctggcttacctgggcctcctggaccaaagggagacccagggatccagggctaccacggccggaagggagaacggggcatgccagggatgccaggcaagcatggagccaagggggcgcccggaattgcsgtggctgggatgaagggtgagccagggatcccaggaaccaagggtgagaagggggctgaaggctcccctgggcttcctggcctcctggggcagaagggagagaaaggcgatgctggcaactccattggaggaggcagaggggaacctggccctccagggctccctgggcccccagggccaaagggagaagcaggtgtcgatggccaggttggccccccagggcagccaggagacaagggggagcgtggagcagctggagaacagggaccagatggccccaagggctccaagggagaaccagggaaaggagagatggtggattacaatggaaacatcaatgaggctctccaggagatccggacgctggccttgatggggcctcctggtcttcctgggcaaattggcccacctggagctccagggattccaggccagaagggggagattggactgccaggccctccaggacacgatggggaaaagggacctcgcggtaaaccaggagacatgggccctcctggtccccaaggccccccaggaaaggatggacctccaggagtgaagggagaaaacgggcasccagggagcccaggagagaagggggaaaaaggggagacaggacaagcaggctcaccggttcctgggctgccagggccagaggggcctcccggacctccggggctccaaggtgttcctggaccaaagggggaagcaggactagatggagcaaaaggagagaaaggcttccagggagaaaaaggagaccgtggtcccctgggactacccggtactccaggaccaattggagttccaggcccagcgggaccaaagggcgagaggggcagcaaaggagaccctgggatgacaggaccaacgggagcagctgggcttcctggtttacatggaccacccggggacaagggaaaccggggggagagggggaagaaaggctctagagggcctaaaggggataagggagaccaaggagcgcctggattagatgccccctgcccattgggcgaagatggcttaccagtccaaggctgctggaacaagtgatgcctctaaccttggattggcctgtgtgtgtgtttgtacatagaatatttatttttatacagttttcactttttgaaaatgccagaagtatgatgcatcttacagattattaaaaaagaaagaaaaacctgcatattttgtacagaaaatatcaacctcttcccttttgtttacaagatgttttgtataagcctatgtctctaatacattttttgtttggtcgtaatgtmtgcatgatatttgtgcacatttattaagtatcgaagsttaataaattattgtgtcctggtgccaaagggggccagccagaactgaggtgctggctagctcatgtgtgaattcacataaatgtagaggtccatgatatttgctaagctaggtgtgtctaagagtattttaaacccttatggattttcattattaaaggaaatgaaacatggcaattc

SEQ ID NO: 80 - DNA, 2454 bp, Homo sapiens
aggcgtccgtcgggggccgaagcgcctcccgcagggagtccccgtgaggccgcgctgccgcgttacccgcagcggccgggggtccggggagtgcggggctccgagacagagccaggcgccccccagcggtcggcgcgggccccatggctgggccgggcggagcggaaccggtgaggtgaagccccggggccggcagccggaggcgcgtggccggggcgccggctccatgggcagcggcacacggcggcgcgatgatggacgttaacagcagcggccgcccggacctctacgggcacctccgctctttccttctgccagaagtggggcgcgggctgcccgacttgagccccgacggtggcgccgacccggtcgcgggctcctgggcgccgcacctgctgagcgaggtgacagccagcccggcgcccacctgggacgcgcccccggacaatgcctccggctgtggggaacagatcaactacggcagagtcgagaaagttgtgatcggctccatcctgacgctcatcacgctgctgacgatcgcgggcaactgcctggtggtgatctccgtgtgcttcgtcaagaagctccgccagccctccaactacctgatcgtgtccctggcgctggccgacctctcggtggctgtggcggtcatgcccttcgtcagcgtcaccgacctcatcgggggcaagtggatctttggacactttttctgtaatgtcttcatcgccatggacgtcatgtgctgcacggcctcgatcatgaccctgtgcgtgatcagcattgacaggtaccttgggatcacaaggcccctcacataccctgtgaggcagaatgggaaatgcatggcgaagatgattctctccgtctggcttctctccgcctccatcaccttacctccactctttggatgggctcagaatgtaaatgatgataaggtgtgcttgatcagccaggactttggctatacgatttactctaccgcagtggcattttatatccccatgtccgtcatgcttttcatgtactaccagatttacaaggctgccaggaagagtgctgccaaacacaagtttcctggcttccctcgagtggagccagacagcgtcatcgccctgaatggcatagtgaagctccagaaggaggtggaagagtgtgcaaacctttcgagactcctcaagcatgaaaggaaaaacatctccatctttaagcgagaacagaaagcagccaccaccctggggatcatcgtcggggcctttaccgtgtgctggctgccatttttcctcctctcgacagccagacccttcatctgtggcacttcctgcagctgcatcccactgtgggtggagaggacatttctgtggctaggctatgcaaactctctcattaacccttttatatatgccttcttcaaccgggacctgaggaccacctatcgcagcctgctccagtgccagtaccggaatatcaaccggaagctctcrgctgcaggcatgcaygaagccctgaagcttgctgagaggccagagagacctgagtttgtgctgtaagacaaaatgctgactactgtagaaaaaaaggtcatgattcatgattgaaagcagaacaatggagatgaaataaacaaggcaaaatagaggtggaaacagaaggaagtcatttgctgagtctgcagaatggaatgcagcttctgtcctttcttgggatgtctaaaacatgacaaacagggtgatctgttgtacacactatcttatgagggagatggtgacttctccttttttctgtggatcagtgctattgtgtgttctcagtttaagatagcagatcatctcagcagtaagcacaccaacagaactgagttccagaaaggaagcagtttctggtgctttgcatatgtccaaatccatgcaagtgggagaaagttccagtgcacacttcccatgcttctgagtctaggcgttgtggtgaatatgcaggaatcattcatgagacagaatgtattttgttgtatgacagaaggcttttccaagcaaactgcggtgagcgtagtgttgaatatgttgcatgtccatgttagaaaacagaatccagtcatcagctaatacaaatgatttcccagagcagtgtttgtttcaagcttctgtcaaatagtttggcttttctgcagggtctctgtgatttccccayctatgtacttttctgtgttaactcacttattatggtataactcaggaacaggtctcaggatggagagaagcatacaacatgagcaaagctttttctcgtgctctgaagggtcttgagaggggagtgggatgccttctgtgaggatttttatcgcagtgaagctcaagtggtacccaactgcrttgtaattaacatgattattggcatgtttttgactctcattttctacaaggctgcagtgggcccacccatgggctggcccataac

SEQ ID NO: 81 - DNA, 2547 bp, Homo sapiens
aggcgtccgtcgggggccgaagcgcctcccgcagggagtccccgtgaggccgcgctgccgcgttacccgcagcggccgggggtccggggagtgcggggctccgagacagagccaggcgccccccagcggtcggcgcgggccccatggctgggccgggcggagcggaaccggtgaggtgaagccccggggccggcagccggaggcgcgtggccggggcgccggctccatgggcagcggcacacggcggcgcgatgatggacgttaacagcagcggccgcccggacctctacgggcacctccgctctttccttctgccagaagtggggcgcgggctgcccgacttgagccccgacggtggcgccgacccggtcgcgggctcctgggcgccgcacctgctgagcgaggtgacagccagcccggcgcccacctgggacgcgcccccggacaatgcctccggctgtggggaacagatcaactacggcagagtcgagaaagttgtgatcggctccatcctgacgctcatcacgctgctgacgatcgcgggcaactgcctggtggtgatctccgtgtgcttcgtcaagaagctccgccagccctccaactacctgatcgtgtccctggcgctggccgacctctcggtggctgtggcggtcatgcccttcgtcagcgtcaccgacctcatcgggggcaagtggatctttggacactttttctgtaatgtcttcatcgccatggacgtcatgtgctgcacggcctcgatcatgaccctgtgcgtgatcagcattgacaggtaccttgggatcacaaggcccctcacataccctgtgaggcagaatgggaaatgcatggcgaagatgattctctccgtctggcttctctccgcctccatcaccttacctccactctttggatgggctcagaatgtaaatgatgataaggtgtgcttgatcagccaggactttggctatacgatttactctaccgcagtggcattttatatccccatgtccgtcatgcttttcatgtactaccagatttacaaggctgccaggaagagtgctgccaaacacaagtttcctggcttccctcgagtggagccagacagcgtcatcgccctgaatggcatagtgaagctccagaaggaggtggaagagtgtgcaaacctttcgagactcctcaagcatgaaaggaaaaacatctccatctttaagcgagaacagaaagcagccaccaccctggggatcatcgtcggggcctttaccgtgtgctggctgccatttttcctcctctcgacagccagacccttcatctgtggcacttcctgcagctgcatcccactgtgggtggagaggacatttctgtggctaggctatgcaaactctctcattaacccttttatatatgccttcttcaaccgggacctgaggaccacctatcgcagcctgctccagtgccagtaccggaatatcaaccggaagctctcrgctgcaggcatgcaygaagccctgaagcttgctgagaggccagagagacctgagtttgtgctgagggcctgcacaaggagggtgctgttgagaccagaaaagaggccacmggtatctgtgtgggtgctacaatctccagaccatcacaattggttagcagacaaaatgctgactactgtagaaaaaaaggtcatgattcatgattgaaagcagaacaatggagatgaaataaacaaggcaaaatagaggtggaaacagaaggaagtcatttgctgagtctgcagaatggaatgcagcttctgtcctttcttgggatgtctaaaacatgacaaacagggtgatctgttgtacacactatcttatgagggagatggtgacttctccttttttctgtggatcagtgctattgtgtgttctcagtttaagatagcagatcatctcagcagtaagcacaccaacagaactgagttccagaaaggaagcagtttctggtgctttgcatatgtccaaatccatgcaagtgggagaaagttccagtgcacacttcccatgcttctgagtctaggcgttgtggtgaatatgcaggaatcattcatgagacagaatgtattttgttgtatgacagaaggcttttccaagcaaactgcggtgagcgtagtgttgaatatgttgcatgtccatgttagaaaacagaatccagtcatcagctaatacaaatgatttcccagagcagtgtttgtttcaagcttctgtcaaatagtttggcttttctgcagggtctctgtgatttccccayctatgtacttttctgtgttaactcacttattatggtataactcaggaacaggtctcaggatggagagaagcatacaacatgagcaaagctttttctcgtgctctgaagggtcttgagaggggagtgggatgccttctgtgaggatttttatcgcagtgaagctcaagtggtacccaactgcrttgtaattaacatgattattggcatgtttttgactctcattttctacaaggctgcagtgggcccacccatgggctggcccataac

SEQ ID NO: 82 - DNA, 2449 bp, Homo sapiens
aggcgtccgtcgggggccgaagcgcctcccgcagggagtccccgtgaggccgcgctgccgcgttacccgcagcggccgggggtccggggagtgcggggctccgagacagagccaggcgccccccagcggtcggcgcgggccccatggctgggccgggcggagcggaaccggtgaggtgaagccccggggccggcagccggaggcgcgtggccggggcgccggctccatgggcagcggcacacggcggcgcgatgatggacgttaacagcagcggccgcccggacctctacgggcacctccgctctttccttctgccagaagtggggcgcgggctgcccgacttgagccccgacggtggcgccgacccggtcgcgggctcctgggcgccgcacctgctgagcgaggtgacagccagcccggcgcccacctgggacgcgcccccggacaatgcctccggctgtggggaacagatcaactacggcagagtcgagaaagttgtgatcggctccatcctgacgctcatcacgctgctgacgatcgcgggcaactgcctggtggtgatctccgtgtgcttcgtcaagaagctccgccagccctccaactacctgatcgtgtccctggcgctggccgacctctcggtggctgtggcggtcatgcccttcgtcagcgtcaccgacctcatcgggggcaagtggatctttggacactttttctgtaatgtcttcatcgccatggacgtcatgtgctgcacggcctcgatcatgaccctgtgcgtgatcagcattgacaggtaccttgggatcacaaggcccctcacataccctgtgaggcagaatgggaaatgcatggcgaagatgattctctccgtctggcttctctccgcctccatcaccttacctccactctttggatgggctcagaatgtaaatgatgataaggtgtgcttgatcagccaggactttggctatacgatttactctaccgcagtggcattttatatccccatgtccgtcatgcttttcatgtactaccagatttacaaggctgccaggaagagtgctgccaaacacaagtttcctggcttccctcgagtggagccagacagcgtcatcgccctgaatggcatagtgaagctccagaaggaggtggaagagtgtgcaaacctttcgagactcctcaagcatgaaaggaaaaacatctccatctttaagcgagaacagaaagcagccaccaccctggggatcatcgtcggggcctttaccgtgtgctggctgccatttttcctcctctcgacagccagacccttcatctgtggcacttcctgcagctgcatcccactgtgggtggagaggacatttctgtggctaggctatgcaaactctctcattaacccttttatatatgccttcttcaaccgggacctgaggaccacctatcgcagcctgctccagtgccagtaccggaatatcaaccggaagctctcrgctgcaggcatgcaygaagccctgaagcttgctgagaggccagagagacctgagtttgtgctacaaaatgctgactactgtagaaaaaaaggtcatgattcatgattgaaagcagaacaatggagatgaaataaacaaggcaaaatagaggtggaaacagaaggaagtcatttgctgagtctgcagaatggaatgcagcttctgtcctttcttgggatgtctaaaacatgacaaacagggtgatctgttgtacacactatcttatgagggagatggtgacttctccttttttctgtggatcagtgctattgtgtgttctcagtttaagatagcagatcatctcagcagtaagcacaccaacagaactgagttccagaaaggaagcagtttctggtgctttgcatatgtccaaatccatgcaagtgggagaaagttccagtgcacacttcccatgcttctgagtctaggcgttgtggtgaatatgcaggaatcattcatgagacagaatgtattttgttgtatgacagaaggcttttccaagcaaactgcggtgagcgtagtgttgaatatgttgcatgtccatgttagaaaacagaatccagtcatcagctaatacaaatgatttcccagagcagtgtttgtttcaagcttctgtcaaatagtttggcttttctgcagggtctctgtgatttccccayctatgtacttttctgtgttaactcacttattatggtataactcaggaacaggtctcaggatggagagaagcatacaacatgagcaaagctttttctcgtgctctgaagggtcttgagaggggagtgggatgccttctgtgaggatttttatcgcagtgaagctcaagtggtacccaactgcrttgtaattaacatgattattggcatgtttttgactctcattttctacaaggctgcagtgggcccacccatgggctggcccataac

SEQ ID NO: 83 - DNA, 1661 bp, Homo sapiens
aggtaccttgggatcacaaggcccctcacataccctgtgaggcagaatgggaaatgcatggcgaagatgattctctccgtctggcttctctccgcctccatcaccttacctccactctttggatgggctcagaatgtaaatgatgataaggtgtgcttgatcagccaggactttggctatacgatttactctaccgcagtggcattttatatccccatgtccgtcatgcttttcatgtactaccagatttacaaggctgccaggaagagtgctgccaaacacaagtttcctggcttccctcgagtggagccagacagcgtcatcgccctgaatggcatagtgaagctccagaaggaggtggaagagtgtgcaaacctttcgagactcctcaagcatgaaaggaaaaacatctccatctttaagcgagaacagaaagcagccaccaccctggggatcatcgtcggggcctttaccgtgtgctggctgccatttttcctcctctcgacagccagacccttcatctgtggcacttcctgcagctgcatcccactgtgggtggagaggacatttctgtggctaggctatgcaaactctctcattaacccttttatatatgccttcttcaaccgggacctgaggaccacctatcgcagcctgctccagtgccagtaccggaatatcaaccggaagctctcrgctgcaggcatgcaygaagccctgaagcttgctgagaggccagagagacctgagtttgtgctacaaaatgctgactactgtagaaaaaaaggtcatgattcatgattgaaagcagaacaatggagatgaaataaacaaggcaaaatagaggtggaaacagaaggaagtcatttgctgagtctgcagaatggaatgcagcttctgtcctttcttgggatgtctaaaacatgacaaacagggtgatctgttgtacacactatcttatgagggagatggtgacttctccttttttctgtggatcagtgctattgtgtgttctcagtttaagatagcagatcatctcagcagtaagcacaccaacagaactgagttccagaaaggaagcagtttctggtgctttgcatatgtccaaatccatgcaagtgggagaaagttccagtgcacacttcccatgcttctgagtctaggcgttgtggtgaatatgcaggaatcattcatgagacagaatgtattttgttgtatgacagaaggcttttccaagcaaactgcggtgagcgtagtgttgaatatgttgcatgtccatgttagaaaacagaatccagtcatcagctaatacaaatgatttcccagagcagtgtttgtttcaagcttctgtcaaatagtttggcttttctgcagggtctctgtgatttccccayctatgtacttttctgtgttaactcacttattatggtataactcaggaacaggtctcaggatggagagaagcatacaacatgagcaaagctttttctcgtgctctgaagggtcttgagaggggagtgggatgccttctgtgaggatttttatcgcagtgaagctcaagtggtacccaactgcrttgtaattaacatgattattggcatgtttttgactctcattttctacaaggctgcagtgggcccacccatgggctggcccataac

SEQ ID NO: 84 - DNA, 1376 bp, Homo sapiens
cgagtggccccacagagccggcgcgctcccgcctgcagggggagagcagacggggcgcggggaccggccaggccgcggcgggtgctgtttctgtttcactttccttcactctgaggccggcgcgctggcgggcgaggagcggcggcggtggcggccgctggacatgggaaagcggaaccaccaaaaggagtgatgatcaacgatctcatgataaatctggatgctagttctcatgcctcaggacatcctactgggaacgacacaccagctcctgggatcagactttcatctacttaggacccctctttgcccagactactaaagccagtcttcactagccacgaatggctacccaaaggaaacacttggtgaaagattttaatccttacattacctgctatatctgtaaagggtatctgatcaagccaacaacagtgacggaatgcctccatacatctgcagaatcctactggatgtccacttggatgtcctgaagccacctgaaactcagcatatctacgaatgatcaaatgggatgccagcactcagttatccaagcaagaaatatgctccatgcttgactctttaccctcactaacaaaactgggcaaagtcctgctggtctctctctttaatacttctcaaatctgtccctttagtttcatccctctgttactgttctcattcagattcttattacatctcaccaaagccactgcagcacattcttaactgtgtccaagtggtaataattaaaaacagcttactgtctttatcattatcactcttaacccaccctaaaatttcctaaaggtatcccgttgacctcaggatacattaaagctacttagtggtgactggtttctgcctacyacttcctcccctaccacctaacactcacacatacaaatacttggttcaactgtttgctctccttgaaatgaatgcctcctctgtgcccagctagcagttacccatcctttaaaactcatcccctctaagatgtgccctaccacctgcagatttgggttaagtgtctcaataaaatcttaaatgaataaatgcatggctaataagttattttattgtgtatttttcctttcaaagattcaaatgcagtgataggtaacttgaaacatgtaggcattgttggttaggaattacaaatttaggaaaactgtctcctaggatctacataggcatctttggggtcttagggagagggagagactctggactggggactagaaattgatggccctagattaagggatgttctgtctctttcaccaggtgaccctggtgaaaagagaaactttaaagctgcttagaatgtatctgctgggtggtataggttgttgatttaaaacaaaaga

SEQ ID NO: 85 - DNA, 1288 bp, Homo sapiens
cgccccacgcgcgcgcgctcgcgcaccacgcgccccgcgcggcccgcccggatcgtggcctctcgagagcaagacatgggaaagcggaaccaccaaaaggagtgatgatcaacgatctcatgataaatctggatgctagttctcatgcctcaggacatcctactgggaacgacacaccagctcctgggatcagactttcatctacttaggacccctctttgcccagactactaaagccagtcttcactagccacgaatggctacccaaaggaaacacttggtgaaagattttaatccttacattacctgctatatctgtaaagggtatctgatcaagccaacaacagtgacggaatgcctccatacatctgcagaatcctactggatgtccacttggatgtcctgaagccacctgaaactcagcatatctacgaatgatcaaatgggatgccagcactcagttatccaagcaagaaatatgctccatgcttgactctttaccctcactaacaaaactgggcaaagtcctgctggtctctctctttaatacttctcaaatctgtccctttagtttcatccctctgttactgttctcattcagattcttattacatctcaccaaagccactgcagcacattcttaactgtgtccaagtggtaataattaaaaacagcttactgtctttatcattatcactcttaacccaccctaaaatttcctaaaggtatcccgttgacctcaggatacattaaagctacttagtggtgactggtttctgcctacyacttcctcccctaccacctaacactcacacatacaaatacttggttcaactgtttgctctccttgaaatgaatgcctcctctgtgcccagctagcagttacccatcctttaaaactcatcccctctaagatgtgccctaccacctgcagatttgggttaagtgtctcaataaaatcttaaatgaataaatgcatggctaataagttattttattgtgtatttttcctttcaaagattcaaatgcagtgataggtaacttgaaacatgtaggcattgttggttaggaattacaaatttaggaaaactgtctcctaggatctacataggcatctttggggtcttagggagagggagagactctggactggggactagaaattgatggccctagattaagggatgttctgtctctttcaccaggtgaccctggtgaaaagagaaactttaaagctgcttagaatgtatctgctgggtggtataggttgttgatttaaaacaaaaga

SEQ ID NO: 86 - DNA, 3718 bp, Homo sapiens
gggaggccggcgcgctggcgggcgaggagcggcggcggtggcggccgctggacatgggaaagcggaaccaccaaaaggagtgatgatcaacgatctcatgataaatctggatgctagttctcatgcctcaggacatcctactgggaacgacacaccagctcctgggatcagactttcatctacttaggacccctctttgcccagactactaaagccagtcttcactagccacgaatggctacccaaaggaaacacttggtgaaagattttaatccttacattacctgctatatctgtaaagggtatctgatcaagccaacaacagtgacggaatgcctccatacattctgtaagacttgtattgttcagcactttgaagatagcaatgattgcccaaggtgtggcaaccaagttcatgagacaaatccattagaaatgttgaggttggacaatacattagaggaaattatatttaagctggtccctggactacgagaacaagaacttgagcgtgaatctgaattttggaagaaaaataagcctcaagaaaatggacaagatgatacttcaaaagctgacaaaccgaaagtagatgaagaaggtgatgaaaatgaagatgataaagattatcacagaagtgacccacaaattgctatctgtctagattgtttacgaaataatgggcaatcaggggacaatgtagtaaagggtttaatgaagaaattcattcgatgttctacacgtgtaactgtgggaactattaaaaaatttctaagtttaaaactaaaacttccaagttcttatgagttggatgtgctgtgcaatggtgaaattatggggaaggatcatactatggaattcatctacatgacaagatggcgactaagaggcgaaaactttcggtgtctgaactgctcagcttcgcaagtctgctctcaggatggccctttgtatcagtcataccctatggtactgcagtatcgaccaagaattgatttcggttagaccaaggggcccagacctcactgagatgaatcctgcactatttgtttactcgtcaacagattgcacagttaacggtgtgtggactagaggaacacaaccagattttcagcatgcaaataaggccattgtctatctctaaattgtcagttgcattcatgttgtttctattaggagcaaaccaagtgccattctgctactgaaccatctgcataaggtatttgtgttgtctcaaagtgtgcaagtcatggtaaaaatcagttagctgtgccgccatgattcacccttctgaatattttgcttgcctgttccaagattgttctaatgtttaattacactagtaaaatggctcaatttttgtggtgttgcagttttcacatacttactcttttattcttgtttaaatagcgtactctacaagaaactaataattatatcttgaaattattttgtatggaaatatatttagaaaagtggtttttgagccactgtcttgttcttgataagctttttgtgtgaaaaaaagttcattcttgagtgtgcaagtccttttgccaagaattccaattattctgtaacattagagcacaatataattgtagacattctaagcatctgtccgtgtagtctaccaattgcacaaggaaggcatgttagccctccagattgaaaatgtatgtgacctcttgaactgaagttagattcccaaccattcaaaatgttggcagctgatcacatttacttctgataaaagtaatgtgtaagtaaggttaatcttctttcataatgccttatgacaagcaggtgctgcttcatgaaacgtcattgtatagcccatttcatgtatcattacattgttgctgttatttaatgagtgcattatttctctttttaagttggccttaggtatatgtcattgtggcatgcagagggttatgacgattttaaatattaggatttttagagcacataacattagctattttatggatttcaaaagtctcaaaacagttgtagattaagactgttagttacctttcacatttccaaactatgtgcataaaatagaataaatgcagtatagaactatgctaaccaaaattaataggttaagggtattttattttaaatcctgtagtaattggggaaatgagaagattattattttatacatgagttcattaagatcagaaatacaaaatgtcctgtattttgcagttttgttaagtcttccattcgttttaggattagtctgcaagtcaaagaaagtcttgttaccttaaattatatgaaaactgtcattttaaatcttttaatatttacagttttcaaaaaccttacttggaaattgctttgaaacaaacaagctaacctttgaaacttaggaaaaaatcttgaaagttaggaaaaatatttgagaaatatgacgagcacaatctgtgtgttacacacatttagtttttatactgcatatgtggtaaatgtgtcacattttccagtaaaatgtatcagaaatcaatgccttctgaatttcaaaatgattcttagaaataagatattgtacaactctagcaaacatacaaagtacagctaaatcttaatatatttcactatgtaaaaggctgaaacttcataattatctgttccttctatctttttttgagtcaaaaagtctattaaatttttctgttgttgttccaactttggtgaaaaaggttatggcaatactttaactttgttttgttacattgtttttgttcttggaatggctcacaagcagaatttaaaaggcagattttcattaactataaatggctgaaaaaactgaatttactatctagctacagaaattatttttctatggtgtgaaactgttcccagacatccctaagaacttttacaaattattataaatttgtcacacctaggtcagcgattaaaatagtgttttgcaaatggaattttaattaactcaaaatgaattaagagtgcattttaaaaatcacaagtgagactttgatgttttggccccccagccaaaacttaatggtcataaatgaattttatctacaaaatctctttaaatttggctggttgccttgtcatatgtatttcactattttccaaggaaatatataggaagcaattatgaaactgagaatagttttatatagaattcttttatttactgataatgcattaacatttttattgaaatgcaatggaatatgtgccaaaacacgtgaaaagcttacataaagaaaggcatcagttgtcgtttggagaaaggtacacatttttttgatggtcctaagtgatatggtattactactagaatcacagatttcttcaactgacttattttggtatattcaactacagctttctaaggataggactactttcatgtctagtaatacactgtattccccgttaattatcccttaagtcagattgtagaatttgcaagaaactaggtatagaaaaaatgtacaggcaacttttgtggttagctttataaatttagggtgcttataaaatgataaaatgaattctttaaataacctataggaatcatctgaatctgtaacatcagagactaaaactaaaagttttctttaatctgttgtttcttaagcaataaactgaaagaccttactccataaaaaaaaaaaaaaaaaaaaaaaaaaaaaaaaaaaaaaaaaaaaaaaaaaaa

SEQ ID NO: 87 - DNA, 1859 bp, Homo sapiens
  misc_feature (1)...(1859): n = A,T,C or G, or insertion/deletion polymorphism (see Tables 1-2)
gtaattgcgagcgagagtgagtggggccgggacccgcagagccgagccgacccttctctcccgggctgcggcagggcagggcggggagctccgcgcaccaacagagccggttctcagggcgctttgctccttgttttttccccggttctgttttctccccttctccggaaggcttgtcaaggggtaggagaaagagacgcaaacacaaaagtggaaaacagttaatgaccagccacggcgtccctgctgtgagctctggccgctgccttccagggctcccgagccacacgctgggsgtgctggctgagggaacatggcttgttggcctcagctgaggttgctgctgtggaagaacctcactttcagaagaagacaaacatgtcagctgctgctggaagtggcctggcctctatttatcttcctgatcctgatctctgttcggctgagctacccaccctatgaacaacatgaatgccattttccaaataaagccatgccctctgcaggaacacttccttgggttcaggggattatctgtaatgccaacaacccctgtttccgttacccgactcctggggaggctcccggagttgttggaaactttaacaaatccattgtggctcgcctgttctcagatgctcggaggcttcttttatacagccagaaagacaccagcatgaaggacatgcgcaaagttctgagaacattacagcagatcaagaaatccagctcaaacttgaagcttcaagatttcctggtggacaatgaaaccttctctgggttcctrtatcacaacctctctctcccaaagtctactgtggacaagatgctgagggctgatgtcattctccacaaggtatttttgcaaggctaccagttacatttgacaagtctgtgcaatggatcaaaatcagaagagatgattcaacttggtgaccaagaagtttctgagctttgtggcctaccaanggagaaactggctgcagcagagcgagtacttcgttccaacatggacatcctgaagccaatcctggtgagyagacttgctcactggagaaacttcaagcactaatgctttcggaatgtgaggcttttccttggacagcatgactttgttttgtagaaaagtacggctggctgggagtttgtgatataatttagttcagtggtattctaagtgttcttagtgttctttcagacttttgggccatctcccaaagggtgaatgggaagaataagctgggtgtggctgagtttaagccaaaagttttttgtgcttgtttcaatcagagaagacctgctttttcatgtttttactattataatactaagcaagagctcatttgaaaacagagttcttcatatttaaaaaaaaaaagtcttgaaaccattgatgggaagatggatatctatttatgtttaaaaacccatcataaagatgacattgtrggctgtcacagttggaaggccctggaattagatgagaccacactatttagcttayttagtaataacattgcaaagaaaaattccgacraagttttttcagcctaggaatcaatagttcagagaagcactctatgagaatacccattcattcttaaccaaaaaatactggtgagcctgagcagtttggtcatcagagtgttttatatagttccagaacaaatatgtctctaggtgttctgagagctctggtgaaattcctctcsctaccccaaacatcatcatttaatatccaggattctggttttctactcaccagatagattctcttaaaaccagggaaagattcctggaggaaggatgtatctggaaagagatgttccttattayaataaaaygaaattgtaatactc

SEQ ID NO: 88 - DNA, 10026 bp, Homo sapiens
  misc_feature (1)...(10026): n = A,T,C or G, or insertion/deletion polymorphism (see Tables 1-2)
tgtcagctgctgctggaagtggcctggcctctatttatcttcctgatcctgatctctgttcggctgagctacccaccctatgaacaacatgaatgccattttccaaataaagccatgccctctgcaggaacacttccttgggttcaggggattatctgtaatgccaacaacccctgtttccgttacccgactcctggggaggctcccggagttgttggaaactttaacaaatccattgtggctcgcctgttctcagatgctcggaggcttcttttatacagccagaaagacaccagcatgaaggacatgcgcaaagttctgagaacattacagcagatcaagaaatccagctcaaacttgaagcttcaagatttcctggtggacaatgaaaccttctctgggttcctrtatcacaacctctctctcccaaagtctactgtggacaagatgctgagggctgatgtcattctccacaaggtatttttgcaaggctaccagttacatttgacaagtctgtgcaatggatcaaaatcagaagagatgattcaacttggtgaccaagaagtttctgagctttgtggcctaccaanggagaaactggctgcagcagagcgagtacttcgttccaacatggacatcctgaagccaatcctgagaacactaaactctacatctcccttcccgagcaaggagctgrctgaagccacaaaaacattgctgcatagtcttgggactctggcccaggagctgttcagcatgagaagctggagtgacatgcgacaggaggtgatgtttctgaccaatgtgaacagctccagctcctccacccaaatctaccaggctgtgtctcgtattgtctgcgggcatccygagggagggggrctgaagatcaagtctctcaactggtatgaggacaacaactacaaagccctctttggaggcaatggcactgaggaagatgctgaaaccttctatgacaactctacaactccttactgcaatgatttgatgaagaatttggagtctagtcctctttcccgcattatctggaaagctctgaagccgctgctcgttgggaagatcctgtatacacctgacactccagccacaaggcaggtcatggctgaggygaacaagaccttccaggaactggctgtgttccatgatctggaaggcatgtgggaggaactcagccccaagatctggaccttcatggagaacagccaagaaatggaccttgtccggatgctgttggacagcagggacaatgaccacttttgggaacagcagttggatggcttagattggacagcccaagacatcgtggcgtttttggccaagcacccagaggatgtccagtccagtaatggttctgtgtacacctggagagaagctttcaacgagactaaccaggcaatccggaccatatctcgcttcatggagtgtgtcaacctgaacaagctrgaacccatagcaacagaagtctggctcatcaacaagtccatggagctgctggatgagaggaagttctgggctggtattgtgttcactggaattactccaggcagyattgagctgccccatcatgtcaagtacaagatccgaatggacattgacaatgtggagaggacaaataaaatcaaggatgggtactgggaccctggtcctcgagctgacccctttgaggacatgcggtacgtctsggggggcttcgcctacttgcrggatgtggtggagcaggcaatcatcagggtgctgacgggcaccgagaagaaaactggtgtctatatgcaacagatgccctatccctgttasgttgatgacatctttctgcgggtgatgagccggtcaatgcccctcttcatgacgctggcctggatttactcagtggctgtgatcatcaagggcatygtgtatgagaaggaggcrcggctgaaagagaccatgcggatcatgggcctggacaacagcatmctctggtttagctggttcattagtagcctcattcctcttcttgtgagcgctggcctgctagtggtcatcctgaagttaggaaacctgctgccctacagtgatcccagcgtggtgtttgtcttcctgtccgtgtttgctgtggtgacaatcctgcagtgcttcctgattagcacactcttctccagagccaacctggcagcagcctgtgggggcatcatctacttcacgctgtacctgccctacgtcctgtgtgtggcatggcaggactacrtgggcttcmcactcaagatcttcgctagcctgctgtctcctgtggcttttgggtttggctgtgagtactttgccctttttgaggagcagggcattggagtgcagtgggacaacctgtttgagagtcctgtggaggaagatggcttcaatctcaccacttcgntctccatgatgctgtttracaccttcctctatggggtgatgacctggtacattgaggctgtctttccaggccagtacggaattcccaggccctggtattttccttgcaccaagtcctactggtttggcraggaaagtgatgagaagagccaccctggttccaaccagaagagaatrtcagaaatctgcatggaggaggaacccacccacttgaagctgggcgtgtccattcagaacctggtaaaagtctacygagatgggatgaaggtggctgtcgatggcctggcactgaatttttatgagggccagatcayctccttcctgggccacaatggagygggraagacgaccaccatgtcaatcctgaccgggttgttccccccgacctcgggcacygcctacatcctgggaaaagacattcgctctgagatgagcaccatccggcagaacctgggggtctgtccccagcataacgtgctgtttgacatgctgactgtcgaagaacacatctggttctatgcccgcttgaaagggctctctragaagcacgtgaaggcggagatggagcagatggccctggatgttggtttgccatcaagcaagctgaaaagcaaaacaagccagctgtcaggtggaatgcagagaaagctatctgtggccttggcctttgtcgggggatctaaggtkgtcattctggatgaacccacagctggtgtggacccttactcccgcaggggaatatgggagctgctgctgaaataccgacaaggccgcaccattattctctctacacaccacatggatgaagcggacgtcctggggkacaggattgccatcatctcccatgggaagctgtgctgtgtgggctcctccctgtttctgaagaaccagytgggaacaggctactacctgaccttggtcaagaaagatgtggaatcctccctcagttcctgcagaaacagtagtagcactgtgtcatacctgaaaaaggaggacagtgtttctcagagcagttctgatgctggcctgggcagcgaccatgasagtgacacgctgaccatcgatgtctctgctatctccaacctcatcaggaagcatgtgtctgaagcccggctggtggaagacatagggcatgagctgacctatgtgctgccatatgargctgctaaggagggagcctttgtggaactctttcatgagattgatgaccgrctctcagacctgggcatttctagttatggcatctcagagacgaccctggaagaaatattcctcaaggtggccgaagagagtggggtggatgctgagacctcagatggtaccttgccagcaagacgaaacaggcgggccttcggggacaagcagagctgtcttcgcccgttcactgaagatgatgctgctgatccaaatgattctgacatagacccagaatccagagagacagacttgctcagtgggatggatggcaaaggrtcctaccaggtgaaaggctggaaacttacacagcaacagtttgtggcccttttgtggaagagactgctaattgccagacggagtcggaaaggattttttgctcagattgtcttgccagctgtgtttgtctgcattgcccttgtgttcagcctgatcgtgccaccctttggcaagtaccccagcctggaacttcagccctggatgtacaacgaacagtacacatttgtcagcaatgatgctcctgaggacacgggaaccctggaactcttaaacgccctcaccaaagaccctggcttcgggacccgctgtatggaaggaaacccaatcccagacacrccctgccaggcaggggaggaagagtggaccactgccccagttccccagaccatcatggacctcttccagaatgggaactggacaatgcagaacccttcacctgcatgccagtgtagcagcgacaaaatcaagaagatgctgcctgtgtgtcccccaggkgcaggggggctgcctcctccacaaagaaaacaaaacactgcagatatccttcaggacctgacaggaagaaacatttyggattatctggtgaagacgtatgtgcagatcatagccaaaagcttaaagaacaagatctgggtgaatgagtttaggtatggcggcttttccctgggtgtcagtaatactcaagcacttcctccgagtcaagaagttaatgatgccaycaaacaaatgaagaaacacctaaagctggccaaggacagttctgcagatcgatttctcaacagcttgggaagatttatgacaggactggacaccanaaataatgtcaaggtgtggttcaataacaagggctggcatgcaatcagctctttcctgaatgtcatcaacratgccattctccgggccaacctgcaaaagggagagaaccctagccattatggaattactgctttcaatcatcccctgaatctcaccaagcagcagctctcagaggtggctcygatgaccacatcagtggatgtccttgtgtccatctgtgtcatctttgcaatgtccttcgtcccagccagctttgtcgtattcctgatccaggagcgggtcagcaaagcaaaacacctgcagttcatcagtggagtgaagcctgtcatctactggctctctaattttgtctgggatatgtgcaattacgttgtccctgccacactggtcattatcatcttcatctgcttccagcagaagtcctatgtgtcctccaccaatctgcctgtgctagcccttctacttttgctgtatgggtggtcaatcacacctctcatgtacccagcctcctttgtgttcaagatccccagcacagcctatgtggtgctcaccagcgtgaacctcttcattggcattaatggcagcgtggccacctttgtgctggagctgttcacygacaataagctgaataatatcmatgatatcctgaagtccgtgttcttgatcttcccacatttttgcctgggacgagggctcatcgacatggtgaaaaaccaggcaatggctgatgccctggaaaggtttggggagaatcgctttgtgtcaccattatcttgggacttggtgggaygaaacctcttcgccatggccgtggaaggggtggtgttcttcctcattactgttctgatccagtacagattcttcatcaggcccagacctgtaaatgcaaagctatctcctctgaatgatgaagatgaagatgtgaggcgggaaagacagagaattcttgatggtggaggccagaatgacatcttagaaatcaaggagttgacgaagatatayagaaggaagcggaagcctgctgttgacaggatttgcgtgggcattcctcctggtgagtgctttgggctcctgggagttaatggggctggaaaatcatcaactttcaagatgttaacaggagataccactgttaccagaggagatgctttccttaacaaaaatagtatcttatcaaacatccatgaagtacatcagaacatgggctactgccctcagtttgatgccatcacagagctgttgactgggagagaacacgtggagtyctttgcccttttgagaggagtcccagagaaagaagttggcaaggttggtgagtgggcgattcggaaactgggcctcgtgaagtatggagaaaaatatgctggtaactatagtggaggcaacaaacgcaagctctctacagccatggctttgatcggygggcctcctgtggtgtttctggatgaacccaccacaggcatggatcccaaagcccggcggttcttgtggaattgtgccctaagtgttgtcaaggaggggagatcagtagtgcttacatctcatagtatggaagaatgtgaagctctttgcactaggatggcaatcatggtcaatggaaggttcaggtgccttggcagtgtccagcatctaaaaaataggtttggagatggttatacaatagttgtacgaatagcagggtccaaccyrgacctgaagcctgtccaggatttctttggacttgcatttcctggaagtgttctaaaagagaaacaccggaacatgctacaataccagcttccatcttcattatcttctctggccaggatattcagcatcctctcccagagcaaaaagcgactccacatagaagactactctgtttctcagacaacacttgaccaagtatttgtgaactttgccaaggaccaaagtgatgatgaccacttaaaagacctctcattacacaaaaaccagacagtagtggamgttgcagttctcacatcttttctacaggatgagaaagtgaaagaaagctatgtatgaagaatcctgttcatacggggtggctgaaagtaaagaggaactagactttcctttgcaccatgtgaagtgttgtggagaaaagagccagaagttgatgtgggaagaagtaaactggatactgtactgatactattcaatgcaatgcaattcaatgcaatgaaaacaaaattccattacaggggcagtgcctttgtagcctatgtcttgtatggctctcaagtgaaagacttgaatttagttttttacctatacctatgtgaaactctattatggaacccaatggacatatgggtttgaactcacacttttttttttttttttgttcctgtgtattctcattggggttgcaacaataattcatcaagtaatcatggccagcgattattgatcaaaatcaaaaggtaatgcacatcctcattcactaagccatgccatgcccaggagactggtttcccggtgacacatccattgctggcaatgagtgtgccagagttattagtgccaagtttttcagaaagtttgaagcaccatggtgtgtcatgctcacttttgtgaaagctgctctgctcagagtctatcaacattgaatatcagttgacagaatggtgccatgcgtggctaacatcctgctttgattccctctgataagctgttctggtggcagtaacatgcaacaaaaatgtgggtgtctccaggcacgggaaacttggttccattgttatattgtcctatgcttcgagccatgggtctacagggtcatccttatgagactcttaaatatacttagatcctggtaagaggcaaagaatcaacagccaaactgctggggctgcaagctgctgaagccagggcatgggattaaagagattgtgcgttcaaacctagggaagcctgtgcccatttgtcctgactgtctgctaacatggtacactgcatctcaagatgtttatctgacacaagtgtattatttctggctttttgaattaatctagaaaatgaaaagatggagttgtattttgacaaaaatgtttgtactttttaatgttatttggaattttaagttctatcagtgacttctgaatccttagaatggcctctttgtagaaccctgtggtatagaggagtatggccactgccccactatttttattttcttatgtaagtttgcatatcagtcatgactagtgcctagaaagcaatgtgatggtcaggatctcatgacattatatttgagtttctttcagatcatttaggatactcttaatctcacttcatcaatcaaatattttttgagtgtatgctgtagctgaaagagtatgtacgtacgtataagactagagagatattaagtctcagtacacttcctgtgccatgttattcagctcactggtttacaaatataggttgtcttgtggttgtaggagcccactgtaacaatactgggcagcctttttttttttttttttaattgcaacaatgcaaaagccaagaaagtataagggtcacaagtctaaacaatgaattcttcaacagggaaaacagctagcttgaaaacttgctgaaaaacacaacttgtgtttatggcatttagtaccttcaaataattggctttgcagatattggataccccattaaatctgacagtctcaaatttttcatctcttcaatcactagtcaagaaaaatataaaaacaacaaatacttccatatggagcatttttcagagttttctaacccagtcttatttttctagtcagtaaacatttgtaaaaatactgtttcactaatacttactgttaactgtcttgagagaaaagaaaaatatgagagaactattgtttggggaagttcaagtgatctttcaatatcattactaacttcttccactttttccaraatttgaatattaacgctaaaggtgtaagacttcagatttcaaattaatctttctatattttttaaatttacagaatattatataacccactgctgaaaaagaaaaaaatgattgttttagaagttaaagtcaatattgattttaaatataagtaatgaaggcatatttccaataactagtgatatggcatcgttgcattttacagtatcttcaaaaatacagaatttatagaataatttctcctcatttaatatttttcaaaatcaaagttatggtttcctcattttactaaaatcgtattctaattcttcattatagtaaatctatgagcaactccttacttcggttcctctgatttcaaggccatattttaaaaaatcaaaaggcactgtgaactattttgaagaaaacacaacattttaatacagattgaaaggacctcttctgaagctagaaacaatctatagttatacatcttcattaatactgtgttaccttttaaaatagtaattttttacattttcctgtgtaaacctaattgtggtagaaatttttaccaactctatactcaatcaagcaaaatttctgtatattccctgtggaatgtacctatgtgagtttcagaaattctcaaaatacgtgttcaaaaatttctgcttttgcatctttgggacacctcagaaaacttattaacaactgtgaatatgagaaatacagaagaaaataataagccctctatacataaatgcccagcacaattcattgttaaaaaacaaccaaacctcacactactgtatttcattatctgtactgaaagcaaatgctttgtgactattaaatgttgcacatcattcattcactgtatagtaatcattgactaaagccatttgtctgtgttttcttcttgtggttgtatatatcaggtaaaatattttccaaagagccatgtgtcatgtaatactgaaccactttgatattgagacattaatttgtacccttgttattatctactagtaataatgtaatactgtagaaatattgctctaattcttttcaaaattgttgcatcccccttagaatgtttctatttccataaggatttaggtatgctattatcccttcttataccctaagatgaagctgtttttgtgctctttgttcatcattggccctcattccaagcactttacgctgtctgtaatgggatctatttttgcactggaatatctgagaattgcaaaactagacaaaagtttcacaacagatttytaagttaaatcattttcattaaaaggaaaaaagaaaaaaaattttgtatgtcaataactttatatgaagtattaaaatgcatatttctatgttgtaatataatgagtcacaaaataaagctgtgacagttctgttggtct

SEQ ID NO: 89 - DNA, 1402 bp, Homo sapiens
  misc_feature (1)...(1402): n = A,T,C or G, or insertion/deletion polymorphism (see Tables 1-2)
gtaattgcgagcgagagtgagtggggccgggacccgcagagccgagccgacccttctctcccgggctgcggcagggcagggcggggagctccgcgcaccaacagagccggttctcagggcgctttgctccttgttttttccccggttctgttttctccccttctccggaaggcttgtcaaggggtaggagaaagagacgcaaacacaaaagtggaaaacagttaatgaccagccacggcgtccctgctgtgagctctggccgctgccttccagggctcccgagccacacgctgggsgtgctggctgagggaacatggcttgttggcctcagctgaggttgctgctgtggaagaacctcactttcagaagaagacaaacatgtcagctgctgctggaagtggcctggcctctatttatcttcctgatcctgatctctgttcggctgagctacccaccctatgaacaacatgaatgccattttccaaataaagccatgccctctgcaggaacacttccttgggttcaggggattatctgtaatgccaacaacccctgtttccgttacccgactcctggggaggctcccggagttgttggaaactttaacaaatccattgtggctcgcctgttctcagatgctcggaggcttcttttatacagccagaaagacaccagcatgaaggacatgcgcaaagttctgagaacattacagcagatcaagaaatccagctcaaacttgaagcttcaagatttcctggtggacaatgaaaccttctctgggttcctrtatcacaacctctctctcccaaagtctactgtggacaagatgctgagggctgatgtcattctccacaaggtatttttgcaaggctaccagttacatttgacaagtctgtgcaatggatcaaaatcagaagagatgattcaacttggtgaccaagaagtttctgagctttgtggcctaccaanggagaaactggctgcagcagagcgagtacttcgttccaacatggacatcctgaagccaatcctgatggatgtgacatgtgatgacattgcacatgggcagttaactgtgccaagaagtgcagcagtagcagcaaccggagatgcaaagcccaacatgatggggagagaaactcttctttcaatatgtgcttctgtaccaaaagtggaatttcacgagagacatattttgaaacatttctccttttgtgtgtgcgtgagtgtttccctgtttccagccaagggtattgtgagtttctcctgggcctccttcagaatctgggtgctctggaaagcagtgttttggcaacatggggaaagtatggcagtgtgggagggtcagctgggtctgggtttgaatattgcatttgaatattttaccagcattgatgtcgga

SEQ ID NO: 90 - DNA, 10405 bp, Homo sapiens
  misc_feature (1)...(10405): n = A,T,C or G, or insertion/deletion polymorphism (see Tables 1-2)
gtaattgcgagcgagagtgagtggggccgggacccgcagagccgagccgacccttctctcccgggctgcggcagggcagggcggggagctccgcgcaccaacagagccggttctcagggcgctttgctccttgttttttccccggttctgttttctccccttctccggaaggcttgtcaaggggtaggagaaagagacgcaaacacaaaagtggaaaacagttaatgaccagccacggcgtccctgctgtgagctctggccgctgccttccagggctcccgagccacacgctgggsgtgctggctgagggaacatggcttgttggcctcagctgaggttgctgctgtggaagaacctcactttcagaagaagacaaacatgtcagctgctgctggaagtggcctggcctctatttatcttcctgatcctgatctctgttcggctgagctacccaccctatgaacaacatgaatgccattttccaaataaagccatgccctctgcaggaacacttccttgggttcaggggattatctgtaatgccaacaacccctgtttccgttacccgactcctggggaggctcccggagttgttggaaactttaacaaatccattgtggctcgcctgttctcagatgctcggaggcttcttttatacagccagaaagacaccagcatgaaggacatgcgcaaagttctgagaacattacagcagatcaagaaatccagctcaaacttgaagcttcaagatttcctggtggacaatgaaaccttctctgggttcctrtatcacaacctctctctcccaaagtctactgtggacaagatgctgagggctgatgtcattctccacaaggtatttttgcaaggctaccagttacatttgacaagtctgtgcaatggatcaaaatcagaagagatgattcaacttggtgaccaagaagtttctgagctttgtggcctaccaanggagaaactggctgcagcagagcgagtacttcgttccaacatggacatcctgaagccaatcctgagaacactaaactctacatctcccttcccgagcaaggagctgrctgaagccacaaaaacattgctgcatagtcttgggactctggcccaggagctgttcagcatgagaagctggagtgacatgcgacaggaggtgatgtttctgaccaatgtgaacagctccagctcctccacccaaatctaccaggctgtgtctcgtattgtctgcgggcatccygagggagggggrctgaagatcaagtctctcaactggtatgaggacaacaactacaaagccctctttggaggcaatggcactgaggaagatgctgaaaccttctatgacaactctacaactccttactgcaatgatttgatgaagaatttggagtctagtcctctttcccgcattatctggaaagctctgaagccgctgctcgttgggaagatcctgtatacacctgacactccagccacaaggcaggtcatggctgaggygaacaagaccttccaggaactggctgtgttccatgatctggaaggcatgtgggaggaactcagccccaagatctggaccttcatggagaacagccaagaaatggaccttgtccggatgctgttggacagcagggacaatgaccacttttgggaacagcagttggatggcttagattggacagcccaagacatcgtggcgtttttggccaagcacccagaggatgtccagtccagtaatggttctgtgtacacctggagagaagctttcaacgagactaaccaggcaatccggaccatatctcgcttcatggagtgtgtcaacctgaacaagctrgaacccatagcaacagaagtctggctcatcaacaagtccatggagctgctggatgagaggaagttctgggctggtattgtgttcactggaattactccaggcagyattgagctgccccatcatgtcaagtacaagatccgaatggacattgacaatgtggagaggacaaataaaatcaaggatgggtactgggaccctggtcctcgagctgacccctttgaggacatgcggtacgtctsggggggcttcgcctacttgcrggatgtggtggagcaggcaatcatcagggtgctgacgggcaccgagaagaaaactggtgtctatatgcaacagatgccctatccctgttasgttgatgacatctttctgcgggtgatgagccggtcaatgcccctcttcatgacgctggcctggatttactcagtggctgtgatcatcaagggcatygtgtatgagaaggaggcrcggctgaaagagaccatgcggatcatgggcctggacaacagcatmctctggtttagctggttcattagtagcctcattcctcttcttgtgagcgctggcctgctagtggtcatcctgaagttaggaaacctgctgccctacagtgatcccagcgtggtgtttgtcttcctgtccgtgtttgctgtggtgacaatcctgcagtgcttcctgattagcacactcttctccagagccaacctggcagcagcctgtgggggcatcatctacttcacgctgtacctgccctacgtcctgtgtgtggcatggcaggactacrtgggcttcmcactcaagatcttcgctagcctgctgtctcctgtggcttttgggtttggctgtgagtactttgccctttttgaggagcagggcattggagtgcagtgggacaacctgtttgagagtcctgtggaggaagatggcttcaatctcaccacttcgntctccatgatgctgtttracaccttcctctatggggtgatgacctggtacattgaggctgtctttccaggccagtacggaattcccaggccctggtattttccttgcaccaagtcctactggtttggcraggaaagtgatgagaagagccaccctggttccaaccagaagagaatrtcagaaatctgcatggaggaggaacccacccacttgaagctgggcgtgtccattcagaacctggtaaaagtctacygagatgggatgaaggtggctgtcgatggcctggcactgaatttttatgagggccagatcayctccttcctgggccacaatggagygggraagacgaccaccatgtcaatcctgaccgggttgttccccccgacctcgggcacygcctacatcctgggaaaagacattcgctctgagatgagcaccatccggcagaacctgggggtctgtccccagcataacgtgctgtttgacatgctgactgtcgaagaacacatctggttctatgcccgcttgaaagggctctctragaagcacgtgaaggcggagatggagcagatggccctggatgttggtttgccatcaagcaagctgaaaagcaaaacaagccagctgtcaggtggaatgcagagaaagctatctgtggccttggcctttgtcgggggatctaaggtkgtcattctggatgaacccacagctggtgtggacccttactcccgcaggggaatatgggagctgctgctgaaataccgacaaggccgcaccattattctctctacacaccacatggatgaagcggacgtcctggggkacaggattgccatcatctcccatgggaagctgtgctgtgtgggctcctccctgtttctgaagaaccagytgggaacaggctactacctgaccttggtcaagaaagatgtggaatcctccctcagttcctgcagaaacagtagtagcactgtgtcatacctgaaaaaggaggacagtgtttctcagagcagttctgatgctggcctgggcagcgaccatgasagtgacacgctgaccatcgatgtctctgctatctccaacctcatcaggaagcatgtgtctgaagcccggctggtggaagacatagggcatgagctgacctatgtgctgccatatgargctgctaaggagggagcctttgtggaactctttcatgagattgatgaccgrctctcagacctgggcatttctagttatggcatctcagagacgaccctggaagaaatattcctcaaggtggccgaagagagtggggtggatgctgagacctcagatggtaccttgccagcaagacgaaacaggcgggccttcggggacaagcagagctgtcttcgcccgttcactgaagatgatgctgctgatccaaatgattctgacatagacccagaatccagagagacagacttgctcagtgggatggatggcaaaggrtcctaccaggtgaaaggctggaaacttacacagcaacagtttgtggcccttttgtggaagagactgctaattgccagacggagtcggaaaggattttttgctcagattgtcttgccagctgtgtttgtctgcattgcccttgtgttcagcctgatcgtgccaccctttggcaagtaccccagcctggaacttcagccctggatgtacaacgaacagtacacatttgtcagcaatgatgctcctgaggacacgggaaccctggaactcttaaacgccctcaccaaagaccctggcttcgggacccgctgtatggaaggaaacccaatcccagacacrccctgccaggcaggggaggaagagtggaccactgccccagttccccagaccatcatggacctcttccagaatgggaactggacaatgcagaacccttcacctgcatgccagtgtagcagcgacaaaatcaagaagatgctgcctgtgtgtcccccaggkgcaggggggctgcctcctccacaaagaaaacaaaacactgcagatatccttcaggacctgacaggaagaaacatttyggattatctggtgaagacgtatgtgcagatcatagccaaaagcttaaagaacaagatctgggtgaatgagtttaggtatggcggcttttccctgggtgtcagtaatactcaagcacttcctccgagtcaagaagttaatgatgccaycaaacaaatgaagaaacacctaaagctggccaaggacagttctgcagatcgatttctcaacagcttgggaagatttatgacaggactggacaccanaaataatgtcaaggtgtggttcaataacaagggctggcatgcaatcagctctttcctgaatgtcatcaacratgccattctccgggccaacctgcaaaagggagagaaccctagccattatggaattactgctttcaatcatcccctgaatctcaccaagcagcagctctcagaggtggctcygatgaccacatcagtggatgtccttgtgtccatctgtgtcatctttgcaatgtccttcgtcccagccagctttgtcgtattcctgatccaggagcgggtcagcaaagcaaaacacctgcagttcatcagtggagtgaagcctgtcatctactggctctctaattttgtctgggatatgtgcaattacgttgtccctgccacactggtcattatcatcttcatctgcttccagcagaagtcctatgtgtcctccaccaatctgcctgtgctagcccttctacttttgctgtatgggtggtcaatcacacctctcatgtacccagcctcctttgtgttcaagatccccagcacagcctatgtggtgctcaccagcgtgaacctcttcattggcattaatggcagcgtggccacctttgtgctggagctgttcacygacaataagctgaataatatcmatgatatcctgaagtccgtgttcttgatcttcccacatttttgcctgggacgagggctcatcgacatggtgaaaaaccaggcaatggctgatgccctggaaaggtttggggagaatcgctttgtgtcaccattatcttgggacttggtgggaygaaacctcttcgccatggccgtggaaggggtggtgttcttcctcattactgttctgatccagtacagattcttcatcaggcccagacctgtaaatgcaaagctatctcctctgaatgatgaagatgaagatgtgaggcgggaaagacagagaattcttgatggtggaggccagaatgacatcttagaaatcaaggagttgacgaagatatayagaaggaagcggaagcctgctgttgacaggatttgcgtgggcattcctcctggtgagtgctttgggctcctgggagttaatggggctggaaaatcatcaactttcaagatgttaacaggagataccactgttaccagaggagatgctttccttaacaaaaatagtatcttatcaaacatccatgaagtacatcagaacatgggctactgccctcagtttgatgccatcacagagctgttgactgggagagaacacgtggagtyctttgcccttttgagaggagtcccagagaaagaagttggcaaggttggtgagtgggcgattcggaaactgggcctcgtgaagtatggagaaaaatatgctggtaactatagtggaggcaacaaacgcaagctctctacagccatggctttgatcggygggcctcctgtggtgtttctggatgaacccaccacaggcatggatcccaaagcccggcggttcttgtggaattgtgccctaagtgttgtcaaggaggggagatcagtagtgcttacatctcatagtatggaagaatgtgaagctctttgcactaggatggcaatcatggtcaatggaaggttcaggtgccttggcagtgtccagcatctaaaaaataggtttggagatggttatacaatagttgtacgaatagcagggtccaaccyrgacctgaagcctgtccaggatttctttggacttgcatttcctggaagtgttctaaaagagaaacaccggaacatgctacaataccagcttccatcttcattatcttctctggccaggatattcagcatcctctcccagagcaaaaagcgactccacatagaagactactctgtttctcagacaacacttgaccaagtatttgtgaactttgccaaggaccaaagtgatgatgaccacttaaaagacctctcattacacaaaaaccagacagtagtggamgttgcagttctcacatcttttctacaggatgagaaagtgaaagaaagctatgtatgaagaatcctgttcatacggggtggctgaaagtaaagaggaactagactttcctttgcaccatgtgaagtgttgtggagaaaagagccagaagttgatgtgggaagaagtaaactggatactgtactgatactattcaatgcaatgcaattcaatgcaatgaaaacaaaattccattacaggggcagtgcctttgtagcctatgtcttgtatggctctcaagtgaaagacttgaatttagttttttacctatacctatgtgaaactctattatggaacccaatggacatatgggtttgaactcacacttttttttttttttttgttcctgtgtattctcattggggttgcaacaataattcatcaagtaatcatggccagcgattattgatcaaaatcaaaaggtaatgcacatcctcattcactaagccatgccatgcccaggagactggtttcccggtgacacatccattgctggcaatgagtgtgccagagttattagtgccaagtttttcagaaagtttgaagcaccatggtgtgtcatgctcacttttgtgaaagctgctctgctcagagtctatcaacattgaatatcagttgacagaatggtgccatgcgtggctaacatcctgctttgattccctctgataagctgttctggtggcagtaacatgcaacaaaaatgtgggtgtctccaggcacgggaaacttggttccattgttatattgtcctatgcttcgagccatgggtctacagggtcatccttatgagactcttaaatatacttagatcctggtaagaggcaaagaatcaacagccaaactgctggggctgcaagctgctgaagccagggcatgggattaaagagattgtgcgttcaaacctagggaagcctgtgcccatttgtcctgactgtctgctaacatggtacactgcatctcaagatgtttatctgacacaagtgtattatttctggctttttgaattaatctagaaaatgaaaagatggagttgtattttgacaaaaatgtttgtactttttaatgttatttggaattttaagttctatcagtgacttctgaatccttagaatggcctctttgtagaaccctgtggtatagaggagtatggccactgccccactatttttattttcttatgtaagtttgcatatcagtcatgactagtgcctagaaagcaatgtgatggtcaggatctcatgacattatatttgagtttctttcagatcatttaggatactcttaatctcacttcatcaatcaaatattttttgagtgtatgctgtagctgaaagagtatgtacgtacgtataagactagagagatattaagtctcagtacacttcctgtgccatgttattcagctcactggtttacaaatataggttgtcttgtggttgtaggagcccactgtaacaatactgggcagcctttttttttttttttttaattgcaacaatgcaaaagccaagaaagtataagggtcacaagtctaaacaatgaattcttcaacagggaaaacagctagcttgaaaacttgctgaaaaacacaacttgtgtttatggcatttagtaccttcaaataattggctttgcagatattggataccccattaaatctgacagtctcaaatttttcatctcttcaatcactagtcaagaaaaatataaaaacaacaaatacttccatatggagcatttttcagagttttctaacccagtcttatttttctagtcagtaaacatttgtaaaaatactgtttcactaatacttactgttaactgtcttgagagaaaagaaaaatatgagagaactattgtttggggaagttcaagtgatctttcaatatcattactaacttcttccactttttccaraatttgaatattaacgctaaaggtgtaagacttcagatttcaaattaatctttctatattttttaaatttacagaatattatataacccactgctgaaaaagaaaaaaatgattgttttagaagttaaagtcaatattgattttaaatataagtaatgaaggcatatttccaataactagtgatatggcatcgttgcattttacagtatcttcaaaaatacagaatttatagaataatttctcctcatttaatatttttcaaaatcaaagttatggtttcctcattttactaaaatcgtattctaattcttcattatagtaaatctatgagcaactccttacttcggttcctctgatttcaaggccatattttaaaaaatcaaaaggcactgtgaactattttgaagaaaacacaacattttaatacagattgaaaggacctcttctgaagctagaaacaatctatagttatacatcttcattaatactgtgttaccttttaaaatagtaattttttacattttcctgtgtaaacctaattgtggtagaaatttttaccaactctatactcaatcaagcaaaatttctgtatattccctgtggaatgtacctatgtgagtttcagaaattctcaaaatacgtgttcaaaaatttctgcttttgcatctttgggacacctcagaaaacttattaacaactgtgaatatgagaaatacagaagaaaataataagccctctatacataaatgcccagcacaattcattgttaaaaaacaaccaaacctcacactactgtatttcattatctgtactgaaagcaaatgctttgtgactattaaatgttgcacatcattcattcactgtatagtaatcattgactaaagccatttgtctgtgttttcttcttgtggttgtatatatcaggtaaaatattttccaaagagccatgtgtcatgtaatactgaaccactttgatattgagacattaatttgtacccttgttattatctactagtaataatgtaatactgtagaaatattgctctaattcttttcaaaattgttgcatcccccttagaatgtttctatttccataaggatttaggtatgctattatcccttcttataccctaagatgaagctgtttttgtgctctttgttcatcattggccctcattccaagcactttacgctgtctgtaatgggatctatttttgcactggaatatctgagaattgcaaaactagacaaaagtttcacaacagatttytaagttaaatcattttcattaaaaggaaaaaagaaaaaaaattttgtatgtcaataactttatatgaagtattaaaatgcatatttctatgttgtaatataatgagtcacaaaataaagctgtgacagttctgttggtct

SEQ ID NO: 91 - DNA, 10247 bp, Homo sapiens
  misc_feature (1)...(10247): n = A,T,C or G, or insertion/deletion polymorphism (see Tables 1-2)
gtaattgcgagcgagagtgagtggggccgggacccgcagagccgagccgacccttctctcccgggctgcggcagggcagggcggggagctccgcgcaccaacagagccggttctcagggcgctttgctccttgttttttccccggttctgttttctccccttctccggaaggcttgtcaaggggtaggagaaagagacgcaaacacaaaagtggaaaacagtgtcagctgctgctggaagtggcctggcctctatttatcttcctgatcctgatctctgttcggctgagctacccaccctatgaacaacatgaatgccattttccaaataaagccatgccctctgcaggaacacttccttgggttcaggggattatctgtaatgccaacaacccctgtttccgttacccgactcctggggaggctcccggagttgttggaaactttaacaaatccattgtggctcgcctgttctcagatgctcggaggcttcttttatacagccagaaagacaccagcatgaaggacatgcgcaaagttctgagaacattacagcagatcaagaaatccagctcaaacttgaagcttcaagatttcctggtggacaatgaaaccttctctgggttcctrtatcacaacctctctctcccaaagtctactgtggacaagatgctgagggctgatgtcattctccacaaggtatttttgcaaggctaccagttacatttgacaagtctgtgcaatggatcaaaatcagaagagatgattcaacttggtgaccaagaagtttctgagctttgtggcctaccaanggagaaactggctgcagcagagcgagtacttcgttccaacatggacatcctgaagccaatcctgagaacactaaactctacatctcccttcccgagcaaggagctgrctgaagccacaaaaacattgctgcatagtcttgggactctggcccaggagctgttcagcatgagaagctggagtgacatgcgacaggaggtgatgtttctgaccaatgtgaacagctccagctcctccacccaaatctaccaggctgtgtctcgtattgtctgcgggcatccygagggagggggrctgaagatcaagtctctcaactggtatgaggacaacaactacaaagccctctttggaggcaatggcactgaggaagatgctgaaaccttctatgacaactctacaactccttactgcaatgatttgatgaagaatttggagtctagtcctctttcccgcattatctggaaagctctgaagccgctgctcgttgggaagatcctgtatacacctgacactccagccacaaggcaggtcatggctgaggygaacaagaccttccaggaactggctgtgttccatgatctggaaggcatgtgggaggaactcagccccaagatctggaccttcatggagaacagccaagaaatggaccttgtccggatgctgttggacagcagggacaatgaccacttttgggaacagcagttggatggcttagattggacagcccaagacatcgtggcgtttttggccaagcacccagaggatgtccagtccagtaatggttctgtgtacacctggagagaagctttcaacgagactaaccaggcaatccggaccatatctcgcttcatggagtgtgtcaacctgaacaagctrgaacccatagcaacagaagtctggctcatcaacaagtccatggagctgctggatgagaggaagttctgggctggtattgtgttcactggaattactccaggcagyattgagctgccccatcatgtcaagtacaagatccgaatggacattgacaatgtggagaggacaaataaaatcaaggatgggtactgggaccctggtcctcgagctgacccctttgaggacatgcggtacgtctsggggggcttcgcctacttgcrggatgtggtggagcaggcaatcatcagggtgctgacgggcaccgagaagaaaactggtgtctatatgcaacagatgccctatccctgttasgttgatgacatctttctgcgggtgatgagccggtcaatgcccctcttcatgacgctggcctggatttactcagtggctgtgatcatcaagggcatygtgtatgagaaggaggcrcggctgaaagagaccatgcggatcatgggcctggacaacagcatmctctggtttagctggttcattagtagcctcattcctcttcttgtgagcgctggcctgctagtggtcatcctgaagttaggaaacctgctgccctacagtgatcccagcgtggtgtttgtcttcctgtccgtgtttgctgtggtgacaatcctgcagtgcttcctgattagcacactcttctccagagccaacctggcagcagcctgtgggggcatcatctacttcacgctgtacctgccctacgtcctgtgtgtggcatggcaggactacrtgggcttcmcactcaagatcttcgctagcctgctgtctcctgtggcttttgggtttggctgtgagtactttgccctttttgaggagcagggcattggagtgcagtgggacaacctgtttgagagtcctgtggaggaagatggcttcaatctcaccacttcgntctccatgatgctgtttracaccttcctctatggggtgatgacctggtacattgaggctgtctttccaggccagtacggaattcccaggccctggtattttccttgcaccaagtcctactggtttggcraggaaagtgatgagaagagccaccctggttccaaccagaagagaatrtcagaaatctgcatggaggaggaacccacccacttgaagctgggcgtgtccattcagaacctggtaaaagtctacygagatgggatgaaggtggctgtcgatggcctggcactgaatttttatgagggccagatcayctccttcctgggccacaatggagygggraagacgaccaccatgtcaatcctgaccgggttgttccccccgacctcgggcacygcctacatcctgggaaaagacattcgctctgagatgagcaccatccggcagaacctgggggtctgtccccagcataacgtgctgtttgacatgctgactgtcgaagaacacatctggttctatgcccgcttgaaagggctctctragaagcacgtgaaggcggagatggagcagatggccctggatgttggtttgccatcaagcaagctgaaaagcaaaacaagccagctgtcaggtggaatgcagagaaagctatctgtggccttggcctttgtcgggggatctaaggtkgtcattctggatgaacccacagctggtgtggacccttactcccgcaggggaatatgggagctgctgctgaaataccgacaaggccgcaccattattctctctacacaccacatggatgaagcggacgtcctggggkacaggattgccatcatctcccatgggaagctgtgctgtgtgggctcctccctgtttctgaagaaccagytgggaacaggctactacctgaccttggtcaagaaagatgtggaatcctccctcagttcctgcagaaacagtagtagcactgtgtcatacctgaaaaaggaggacagtgtttctcagagcagttctgatgctggcctgggcagcgaccatgasagtgacacgctgaccatcgatgtctctgctatctccaacctcatcaggaagcatgtgtctgaagcccggctggtggaagacatagggcatgagctgacctatgtgctgccatatgargctgctaaggagggagcctttgtggaactctttcatgagattgatgaccgrctctcagacctgggcatttctagttatggcatctcagagacgaccctggaagaaatattcctcaaggtggccgaagagagtggggtggatgctgagacctcagatggtaccttgccagcaagacgaaacaggcgggccttcggggacaagcagagctgtcttcgcccgttcactgaagatgatgctgctgatccaaatgattctgacatagacccagaatccagagagacagacttgctcagtgggatggatggcaaaggrtcctaccaggtgaaaggctggaaacttacacagcaacagtttgtggcccttttgtggaagagactgctaattgccagacggagtcggaaaggattttttgctcagattgtcttgccagctgtgtttgtctgcattgcccttgtgttcagcctgatcgtgccaccctttggcaagtaccccagcctggaacttcagccctggatgtacaacgaacagtacacatttgtcagcaatgatgctcctgaggacacgggaaccctggaactcttaaacgccctcaccaaagaccctggcttcgggacccgctgtatggaaggaaacccaatcccagacacrccctgccaggcaggggaggaagagtggaccactgccccagttccccagaccatcatggacctcttccagaatgggaactggacaatgcagaacccttcacctgcatgccagtgtagcagcgacaaaatcaagaagatgctgcctgtgtgtcccccaggkgcaggggggctgcctcctccacaaagaaaacaaaacactgcagatatccttcaggacctgacaggaagaaacatttyggattatctggtgaagacgtatgtgcagatcatagccaaaagcttaaagaacaagatctgggtgaatgagtttaggtatggcggcttttccctgggtgtcagtaatactcaagcacttcctccgagtcaagaagttaatgatgccaycaaacaaatgaagaaacacctaaagctggccaaggacagttctgcagatcgatttctcaacagcttgggaagatttatgacaggactggacaccanaaataatgtcaaggtgtggttcaataacaagggctggcatgcaatcagctctttcctgaatgtcatcaacratgccattctccgggccaacctgcaaaagggagagaaccctagccattatggaattactgctttcaatcatcccctgaatctcaccaagcagcagctctcagaggtggctcygatgaccacatcagtggatgtccttgtgtccatctgtgtcatctttgcaatgtccttcgtcccagccagctttgtcgtattcctgatccaggagcgggtcagcaaagcaaaacacctgcagttcatcagtggagtgaagcctgtcatctactggctctctaattttgtctgggatatgtgcaattacgttgtccctgccacactggtcattatcatcttcatctgcttccagcagaagtcctatgtgtcctccaccaatctgcctgtgctagcccttctacttttgctgtatgggtggtcaatcacacctctcatgtacccagcctcctttgtgttcaagatccccagcacagcctatgtggtgctcaccagcgtgaacctcttcattggcattaatggcagcgtggccacctttgtgctggagctgttcacygacaataagctgaataatatcmatgatatcctgaagtccgtgttcttgatcttcccacatttttgcctgggacgagggctcatcgacatggtgaaaaaccaggcaatggctgatgccctggaaaggtttggggagaatcgctttgtgtcaccattatcttgggacttggtgggaygaaacctcttcgccatggccgtggaaggggtggtgttcttcctcattactgttctgatccagtacagattcttcatcaggcccagacctgtaaatgcaaagctatctcctctgaatgatgaagatgaagatgtgaggcgggaaagacagagaattcttgatggtggaggccagaatgacatcttagaaatcaaggagttgacgaagatatayagaaggaagcggaagcctgctgttgacaggatttgcgtgggcattcctcctggtgagtgctttgggctcctgggagttaatggggctggaaaatcatcaactttcaagatgttaacaggagataccactgttaccagaggagatgctttccttaacaaaaatagtatcttatcaaacatccatgaagtacatcagaacatgggctactgccctcagtttgatgccatcacagagctgttgactgggagagaacacgtggagtyctttgcccttttgagaggagtcccagagaaagaagttggcaaggttggtgagtgggcgattcggaaactgggcctcgtgaagtatggagaaaaatatgctggtaactatagtggaggcaacaaacgcaagctctctacagccatggctttgatcggygggcctcctgtggtgtttctggatgaacccaccacaggcatggatcccaaagcccggcggttcttgtggaattgtgccctaagtgttgtcaaggaggggagatcagtagtgcttacatctcatagtatggaagaatgtgaagctctttgcactaggatggcaatcatggtcaatggaaggttcaggtgccttggcagtgtccagcatctaaaaaataggtttggagatggttatacaatagttgtacgaatagcagggtccaaccyrgacctgaagcctgtccaggatttctttggacttgcatttcctggaagtgttctaaaagagaaacaccggaacatgctacaataccagcttccatcttcattatcttctctggccaggatattcagcatcctctcccagagcaaaaagcgactccacatagaagactactctgtttctcagacaacacttgaccaagtatttgtgaactttgccaaggaccaaagtgatgatgaccacttaaaagacctctcattacacaaaaaccagacagtagtggamgttgcagttctcacatcttttctacaggatgagaaagtgaaagaaagctatgtatgaagaatcctgttcatacggggtggctgaaagtaaagaggaactagactttcctttgcaccatgtgaagtgttgtggagaaaagagccagaagttgatgtgggaagaagtaaactggatactgtactgatactattcaatgcaatgcaattcaatgcaatgaaaacaaaattccattacaggggcagtgcctttgtagcctatgtcttgtatggctctcaagtgaaagacttgaatttagttttttacctatacctatgtgaaactctattatggaacccaatggacatatgggtttgaactcacacttttttttttttttttgttcctgtgtattctcattggggttgcaacaataattcatcaagtaatcatggccagcgattattgatcaaaatcaaaaggtaatgcacatcctcattcactaagccatgccatgcccaggagactggtttcccggtgacacatccattgctggcaatgagtgtgccagagttattagtgccaagtttttcagaaagtttgaagcaccatggtgtgtcatgctcacttttgtgaaagctgctctgctcagagtctatcaacattgaatatcagttgacagaatggtgccatgcgtggctaacatcctgctttgattccctctgataagctgttctggtggcagtaacatgcaacaaaaatgtgggtgtctccaggcacgggaaacttggttccattgttatattgtcctatgcttcgagccatgggtctacagggtcatccttatgagactcttaaatatacttagatcctggtaagaggcaaagaatcaacagccaaactgctggggctgcaagctgctgaagccagggcatgggattaaagagattgtgcgttcaaacctagggaagcctgtgcccatttgtcctgactgtctgctaacatggtacactgcatctcaagatgtttatctgacacaagtgtattatttctggctttttgaattaatctagaaaatgaaaagatggagttgtattttgacaaaaatgtttgtactttttaatgttatttggaattttaagttctatcagtgacttctgaatccttagaatggcctctttgtagaaccctgtggtatagaggagtatggccactgccccactatttttattttcttatgtaagtttgcatatcagtcatgactagtgcctagaaagcaatgtgatggtcaggatctcatgacattatatttgagtttctttcagatcatttaggatactcttaatctcacttcatcaatcaaatattttttgagtgtatgctgtagctgaaagagtatgtacgtacgtataagactagagagatattaagtctcagtacacttcctgtgccatgttattcagctcactggtttacaaatataggttgtcttgtggttgtaggagcccactgtaacaatactgggcagcctttttttttttttttttaattgcaacaatgcaaaagccaagaaagtataagggtcacaagtctaaacaatgaattcttcaacagggaaaacagctagcttgaaaacttgctgaaaaacacaacttgtgtttatggcatttagtaccttcaaataattggctttgcagatattggataccccattaaatctgacagtctcaaatttttcatctcttcaatcactagtcaagaaaaatataaaaacaacaaatacttccatatggagcatttttcagagttttctaacccagtcttatttttctagtcagtaaacatttgtaaaaatactgtttcactaatacttactgttaactgtcttgagagaaaagaaaaatatgagagaactattgtttggggaagttcaagtgatctttcaatatcattactaacttcttccactttttccaraatttgaatattaacgctaaaggtgtaagacttcagatttcaaattaatctttctatattttttaaatttacagaatattatataacccactgctgaaaaagaaaaaaatgattgttttagaagttaaagtcaatattgattttaaatataagtaatgaaggcatatttccaataactagtgatatggcatcgttgcattttacagtatcttcaaaaatacagaatttatagaataatttctcctcatttaatatttttcaaaatcaaagttatggtttcctcattttactaaaatcgtattctaattcttcattatagtaaatctatgagcaactccttacttcggttcctctgatttcaaggccatattttaaaaaatcaaaaggcactgtgaactattttgaagaaaacacaacattttaatacagattgaaaggacctcttctgaagctagaaacaatctatagttatacatcttcattaatactgtgttaccttttaaaatagtaattttttacattttcctgtgtaaacctaattgtggtagaaatttttaccaactctatactcaatcaagcaaaatttctgtatattccctgtggaatgtacctatgtgagtttcagaaattctcaaaatacgtgttcaaaaatttctgcttttgcatctttgggacacctcagaaaacttattaacaactgtgaatatgagaaatacagaagaaaataataagccctctatacataaatgcccagcacaattcattgttaaaaaacaaccaaacctcacactactgtatttcattatctgtactgaaagcaaatgctttgtgactattaaatgttgcacatcattcattcactgtatagtaatcattgactaaagccatttgtctgtgttttcttcttgtggttgtatatatcaggtaaaatattttccaaagagccatgtgtcatgtaatactgaaccactttgatattgagacattaatttgtacccttgttattatctactagtaataatgtaatactgtagaaatattgctctaattcttttcaaaattgttgcatcccccttagaatgtttctatttccataaggatttaggtatgctattatcccttcttataccctaagatgaagctgtttttgtgctctttgttcatcattggccctcattccaagcactttacgctgtctgtaatgggatctatttttgcactggaatatctgagaattgcaaaactagacaaaagtttcacaacagatttytaagttaaatcattttcattaaaaggaaaaaagaaaaaaaattttgtatgtcaataactttatatgaagtattaaaatgcatatttctatgttgtaatataatgagtcacaaaataaagctgtgacagttctgttggtct

SEQ ID NO: 92 - DNA, 3865 bp, Homo sapiens
ggcagggagggggccaaggcggccggctggagggacggggcccgaccgggagcggagccggagcggaagccgcagccgggcggggggcgggagcggcgggagcgggggaagcagggcgggccgggctccatggcgccagcggcgtccgcctgagcagcgcgggcaacagcggcggcgtcggccggatcgggccgcgacacctcctggccatgggggacgtgctgtccacgcacctggacgacgcccggcgccagcacatcgcagaaaaaaccgggaagatcctgacggagttcctccagttctatgaagaccagtatggcgtggctctcttcaacagcatgcgccatgagattgagggcacggggctgccgcaggcccagctgctctggcgcaaggtgccactggacgagcgcatcgtcttctcggggaacctcttccagcaccaggaggacagcaagaagtggagaaaccgcttcagcctcgtgccccacaactacgggctggtgctctacgaaaacaaagcggcctatgagcggcaggtcccaccacgagccgtcatcaacagtgcaggctacaaaatcctcacgtccgtggaccaatacctggagctcattggcaactccttaccagggaccacggcaaagtcgggcagtgcccccatcctcaagtgccccacacagttcccgctcatcctctggcatccttatgcgcgtcactactacttctgcatgatgacagaagccgagcaggacaagtggcaggctgtgctgcaggactgcatccggcactgcaacaatggaatccctgaggactccaaggtagagggccctgcgttcacagatgccatccgcatgtaccgacagtccaaggagctgtacggcacctgggagatgctgtgtgggaacgaggtgcagatcctgagcaacctggtgatggaggagctgggccctgagctgaaggcagagctcggcccgcggctgaaggggaaaccgcaggagcggcagcggcagtggatccagatctcggacgccgtgtaccrcatggtgtacgagcaggccaaggcgcgcttcgaggaggtgctgtccaaggtgcagcaggtgcagccggccatgcaggccgtcatccgaactgacatggaccaaattatcacctccaaggagcaccttgccagcaagatccgagccttcatcctccccaaggcagaggtgtgcgtgcggaaccatgtccagccctacatcccatccatcctggaggccctgatggtccccaccagccagggcttcactgaggtgcgagatgtcttcttcaaggaggtcacggacatgaacctgaacgtcatcaacgagggcggcattgacaagctgggcgagtacatggagaagctgtcccggctggcgtaccaccccctgaagatgcagagctgctatgagaagatggagtcgctgcgactggacgggctgcagcagcgatttgatgtgtccagcacgtccgtgttcaagcagcgagcccagatccacatgcgggagcaaatggacaatgccgtgtatacgttcgagaccctyctgcaccaggagctggggaaggggcccaccaaggaggagctgtgcaagtccatccagcgggtcctggagcgggtgctgaagaaatacgactacgacagcagctctgtgcggaagaggttcttccgggaggcgctgctgcagatcagcatcccgttcctgctcaagaagctggcccctacctgcaagtcggagctgccccggttccaggagctgatcttcgaggactttgccaggttcatcctggtggaaaacacgtaygaggaggtggtgctgcagaccgtcatgaaggacatcctgcaggctgtgaaggaggccgcggtgcagaggaagcacaacctctaccgggacagcatggtcatgcacaacagcgaccccaacctgcacctgctggccgagggcgcccccatcgactggggcgaggagtacagcaacagcggcgggggcggcagccccagccccagcaccccggagtcagccaccctctcggaaaagcgacggcgcgccaagcaggtggtctctgtggtccaggatgaggaggtggggctgccctttgaggctagccctgagtcaccaccacctgcgtccccggacggtgtcactgagatccgaggcctgctggcccaaggtctgcggcctgagagccccccaccagccrgccccctgctcaacggggcccccgctggggagagtccccagcytaaggccgcccccgaggcctcctcgccgcctgcctcacccctccagcatctcctgcctggaaaggctgtggaccttgggccccccaagcccagcgaccaggagactggagagcaggtgtccagccccagcagccaccccgccctccacaccaccaccgaggacagtgcaggggtgcagactgagttctaggccagtgggtccctgactgctgcacatggcacaggccgttcccttccggacccaggcaggctcagctctggggagggcaccctggtctgtgccttgtgggtggaggcggggcagggctgtgtggcaccgccagggagcgggcccacctgagtcactttattgggttcagtcaacactttcttgctccctgttttctcttctgtgggatgatctcagatgcaggggctggttttggggttttcctgcttgtgccaagggctggacactgctggggggctggaaagcccctcccttcctgtccttctgtggcctccatcccctcatgggtgctgccatccttcctggagagagggaggtgaaagctggtgtgagcccagtgggttcccgcccactcacccaggagctggctgggccaggaccgggagagggagcactgctgccctcctggccctgctccttccgcagttaggggtggaccgagcctcgctttccccactgttctggagggaaggggaaggagggggtcttcaggctggagccaggctgggggtgctgggtggagagatgagatttagggggtgtctgcggaggggaagtgtcctgagtgaaggaggggacccccatcctgggggatgctgggagtgagtgagtgakatggctgagtgagggttatggggagcctgaggttttatgggcctgtgtatccccttctcccggccccagcctgcctccctcctgcccgcctggcccacaggtctccctctggtccctgtccctctggtggttggggatggagcggcagcaaggggtgtaatggggctgggttctgtcttctacaggccaccccgaggtcctcagtggttgcctggggagccggacggggctcctgaggggtacaggttgggtgggccctccctgagggtctggggtcaggctttggcctctgctgcctctcagtcaccaagtcacctccctctgaaaatccagtcccttctttggatgtccttgtgagtcactctgggcctggctgtcgtccctcctcagcttcttgttcctgggacaagggtcaagccaggatgggcccaggcctgggatcccccaccccaggacccccaggccccctcccctgctgctttgcggggggcagggmagaaatggactccttttgggtccccgaggtggggtcccctcccagccctgcatcctccgtgccstagacctgctccccagaggaggggccttgacccacaggacgtgtggtggcccctggtctytggcgcatctcttccctcttgtcccgaagatytgcgcctctagtgccttttgaggggttcccatcatccctccctgatattgtattgaaaatattatgcacactgttcatgcttctactaatcaataaacgctttatttaa

SEQ ID NO: 93 - DNA, 3617 bp, Homo sapiens
atggggtggatgggagaaaaaaccgggaagatcctgacggagttcctccagttctatgaagaccagtatggcgtggctctcttcaacagcatgcgccatgagattgagggcacggggctgccgcaggcccagctgctctggcgcaaggtgccactggacgagcgcatcgtcttctcggggaacctcttccagcaccaggaggacagcaagaagtggagaaaccgcttcagcctcgtgccccacaactacgggctggtgctctacgaaaacaaagcggcctatgagcggcaggtcccaccacgagccgtcatcaacagtgcaggctacaaaatcctcacgtccgtggaccaatacctggagctcattggcaactccttaccagggaccacggcaaagtcgggcagtgcccccatcctcaagtgccccacacagttcccgctcatcctctggcatccttatgcgcgtcactactacttctgcatgatgacagaagccgagcaggacaagtggcaggctgtgctgcaggactgcatccggcactgcaacaatggaatccctgaggactccaaggtagagggccctgcgttcacagatgccatccgcatgtaccgacagtccaaggagctgtacggcacctgggagatgctgtgtgggaacgaggtgcagatcctgagcaacctggtgatggaggagctgggccctgagctgaaggcagagctcggcccgcggctgaaggggaaaccgcaggagcggcagcggcagtggatccagatctcggacgccgtgtaccrcatggtgtacgagcaggccaaggcgcgcttcgaggaggtgctgtccaaggtgcagcaggtgcagccggccatgcaggccgtcatccgaactgacatggaccaaattatcacctccaaggagcaccttgccagcaagatccgagccttcatcctccccaaggcagaggtgtgcgtgcggaaccatgtccagccctacatcccatccatcctggaggccctgatggtccccaccagccagggcttcactgaggtgcgagatgtcttcttcaaggaggtcacggacatgaacctgaacgtcatcaacgagggcggcattgacaagctgggcgagtacatggagaagctgtcccggctggcgtaccaccccctgaagatgcagagctgctatgagaagatggagtcgctgcgactggacgggctgcagcagcgatttgatgtgtccagcacgtccgtgttcaagcagcgagcccagatccacatgcgggagcaaatggacaatgccgtgtatacgttcgagaccctyctgcaccaggagctggggaaggggcccaccaaggaggagctgtgcaagtccatccagcgggtcctggagcgggtgctgaagaaatacgactacgacagcagctctgtgcggaagaggttcttccgggaggcgctgctgcagatcagcatcccgttcctgctcaagaagctggcccctacctgcaagtcggagctgccccggttccaggagctgatcttcgaggactttgccaggttcatcctggtggaaaacacgtaygaggaggtggtgctgcagaccgtcatgaaggacatcctgcaggctgtgaaggaggccgcggtgcagaggaagcacaacctctaccgggacagcatggtcatgcacaacagcgaccccaacctgcacctgctggccgagggcgcccccatcgactggggcgaggagtacagcaacagcggcgggggcggcagccccagccccagcaccccggagtcagccaccctctcggaaaagcgacggcgcgccaagcaggtggtctctgtggtccaggatgaggaggtggggctgccctttgaggctagccctgagtcaccaccacctgcgtccccggacggtgtcactgagatccgaggcctgctggcccaaggtctgcggcctgagagccccccaccagccrgccccctgctcaacggggcccccgctggggagagtccccagcytaaggccgcccccgaggcctcctcgccgcctgcctcacccctccagcatctcctgcctggaaaggctgtggaccttgggccccccaagcccagcgaccaggagactggagagcaggtgtccagccccagcagccaccccgccctccacaccaccaccgaggacagtgcaggggtgcagactgagttctaggccagtgggtccctgactgctgcacatggcacaggccgttcccttccggacccaggcaggctcagctctggggagggcaccctggtctgtgccttgtgggtggaggcggggcagggctgtgtggcaccgccagggagcgggcccacctgagtcactttattgggttcagtcaacactttcttgctccctgttttctcttctgtgggatgatctcagatgcaggggctggttttggggttttcctgcttgtgccaagggctggacactgctggggggctggaaagcccctcccttcctgtccttctgtggcctccatcccctcatgggtgctgccatccttcctggagagagggaggtgaaagctggtgtgagcccagtgggttcccgcccactcacccaggagctggctgggccaggaccgggagagggagcactgctgccctcctggccctgctccttccgcagttaggggtggaccgagcctcgctttccccactgttctggagggaaggggaaggagggggtcttcaggctggagccaggctgggggtgctgggtggagagatgagatttagggggtgtctgcggaggggaagtgtcctgagtgaaggaggggacccccatcctgggggatgctgggagtgagtgagtgakatggctgagtgagggttatggggagcctgaggttttatgggcctgtgtatccccttctcccggccccagcctgcctccctcctgcccgcctggcccacaggtctccctctggtccctgtccctctggtggttggggatggagcggcagcaaggggtgtaatggggctgggttctgtcttctacaggccaccccgaggtcctcagtggttgcctggggagccggacggggctcctgaggggtacaggttgggtgggccctccctgagggtctggggtcaggctttggcctctgctgcctctcagtcaccaagtcacctccctctgaaaatccagtcccttctttggatgtccttgtgagtcactctgggcctggctgtcgtccctcctcagcttcttgttcctgggacaagggtcaagccaggatgggcccaggcctgggatcccccaccccaggacccccaggccccctcccctgctgctttgcggggggcagggmagaaatggactccttttgggtccccgaggtggggtcccctcccagccctgcatcctccgtgccstagacctgctccccagaggaggggccttgacccacaggacgtgtggtggcccctggtctytggcgcatctcttccctcttgtcccgaagatytgcgcctctagtgccttttgaggggttcccatcatccctccctgatattgtattgaaaatattatgcacactgttcatgcttctactaatcaataaacgctttatttaa

SEQ ID NO: 94 - DNA, 1219 bp, Homo sapiens
atgcccatcagccagcaggtgtcaggggttttctcagtaaaaatgctgattatcatggagtcaaagataggcttgagcagttgagatgtcactttacatgggggttgctaattgaagcccttgaaatttctgatttagaaaacagggtcttggaagagatccagttcgtggacacaaagtacagtgtgggaatgcacaacatactagcttatgtgaaacactggaagggccagaatgagaaagcactagagaaagaagttgaatgagaacacaccaaccaagcagacatgagtgaccagtatcatcacatgggcaggtgacctggggcaactttgcctgggctggggcaaatttgcctgggcgtatcaccacataggcagactggcagaagcccagacttacctggataaggtagagaacatttgcaagaagtttgcaaatgcttcccgctatagaatggagtgtcctgagatgaactgtgaggaaggatgggccttggcgaagtgtggaggaaagaattatgaacaggccaaggcctgctttgaaaaggctctagaggtgggccctgaaaatcctgaattcagcactgggtatgtcatcactgcctattgcctggacggttttaacacaacagacagtaatgagacattttctctgcaccccctaaaatgggctgtcagtctaaatccaaaagatgcacacattaaggttatccttgccctgaagcttcaggatgaaggacaggaagctgaaggagaaaagcacactgaaaaagctctaatcagtatgtcttcacagacctatgtttttckatatgcagcccagttttatcaaagaagaggcaatatagataaagctcttctgctcttaaaaatggccttgcagggaacacccacttctgccttcctgcatcaccagatagggctttgctgcaggaaacagacaaaaaaagctaaaggcaggatagagaaactgtagacaaaataataagattagttatatctcatgttgaatttgctgtagagcaaaggcccacatttgcaatggtttatgtggacctagccaacaggtatgcagagggaggtgaacaccaaaaagttgaggacatttaccagaaagcactcagcctgcatgatattaataaaagctgttgcaagagatttattatcgttatggcccctttcaggaatgtcatgggaagtctgaagctaacacaatt

SEQ ID NO: 95 - DNA, 3261 bp, Homo sapiens
ccctgtgaggctcggagcccgggtgtcaggcgccacggcgcatgctccgcaatcatcttctttaccctggagctgctgctgctgctgctgcttttgcttttggggctgagtttaataagcgagcgagcgagcaagcgagcgcggggggaaaaaggcagagaatgtccgccatctaccctccgctcctgggcgcgctctcattcatagcagcctcttcatgaattacagctgagggggggcggaggaggggggggtaccacacaacaccccagcaaacctccgggcccccaggcatggctagctcktgtgccgtgcaggtgaagctggagctggggcaccgcgcccaggtgaggaaaaaacccaccgtggagggcttcacccacgactggatggtgttcgtacgcggtccggagcacagtaacatacagcactttgtggagaaagtcgtcttccacttgcacgaaagctttcctaggccaaaaagagtgtgcaaagatccaccttacaaagtagaagaatctgggtatgctggtttcattttgccaattgaagtttattttaaaaacaaggaagaacctaggaaagtccgctttgattatgacttattcctgcatcttgaaggccatccaccagtgaatcacctccgctgtgaaaagctaactttcaacaaccccacagaggactttaggagaaagttgctgaaggcaggaggggaccctaataggagtattcataccagcagcagcagcagcagcagcagyagcagcagcagcagcagcagcagcagcagcagtagcagcagcagcagcagcagcagcagyagcagtagcagcagcagtagyagcagcagcagcagcagtagtaccagtttttcaaagcctcacaaattaatgaaggagcacaaggaaaaaccttctaaagactccagagaacataaaagtgccttcaaagaaccttccagggatcacaacaaatcttccaaagaatcctctaagaaacccaaagaaaataaaccactgaaagaagagaaaatagttcctaagatggccttcaaggaacctaaacccatgtcaaaagagccaaaaccagatagtaacttactcaccatcaccagtggacaagataagaaggctcctagtaaaaggccgcccatttcagattctgaagaactctcagccaaaaaaaggaaaaagagtagctcagaggctttatttaaaagtttttctagcgcaccaccactgatactcacttgttctgctgacaaaaaacagataaaagataaatctcatgtcaagatgggaaaggtcaaaattgaaagtgagacatcagagaagaagaaatcaacgttaccgccatttgatgatattgtggatcccaatgattcagatgtggaggagaatatatcctctaaatctgattctgaacaacccagtcctgccagctccagctccagctccagctccagcttcacaccatcccagaccaggcaacaaggtcctttgaggtctataatgaaagatctgcattctgatgacaatgaggaggaatcagatgaagtggaggataacgacaatgactctgaaatggagaggcctgtaaatagaggaggcagccgaagtcgcagagttagcttaagtgatggcagcgatagtgaaagcagttctgcttcttcacccctacatcacgaacctccaccacccttactaaaaaccaacaacaaccagattcttgaagtgaaaagtccaataaagcaaagcaaatcagataagcaaataaagaatggtgaatgtgacaaggcatacctagatgaactggtagagcttcacagaaggttaatgacattgagagaaagacacattctgcagcagatcgtgaaccttatagaagaaactggacactttcatatcacaaacacaacatttgattttgatctttgctcgctggacaaaaccacagtccgtaaactacagagttacctggaaacatctggaacatcctgaggatataacaactggatgcatcaagaactattgtgttttttttttttggttttttttttttttagccttgaaaacaaacaaatcaaacacaacacaagaaaactcaaagaatgtgtatggtatcatgtatctctctgtggtggttcattccacaggacgaatgcatattcaacacactgccttattacataactgatctatttattatcgcatacagatattctaagtcgttgagggaatgacaccatcagacattataagtacttggtcccgtggatgctctttcaatgcagcacccttgccatcccaagcccagtgaccttactcgtataccgtgccactttccaccaactttttccaagtcctttaactcgttgcagtctgtattttccaccttttgtttttycagttccaggacacagattatcaactggggggaccaaatagccaccttgattttcttctttgtggtctttttcctgaaagttggggcccagtccttggctgtatccatgtaatgatcttggaccatggtagaaaatgcaccaaataggatcatatgaattgctgtctagccttagtcaataaacttgtaggacttttaaacaaaagtgtacctgtaaatgtcctgaatccagcattgttgagctgtcatcaacattcttgtgtctgttttactgttacaatattaggtgaatatggaagtaaaggcattccacaggatcatcatttaaaaaaaaagaattctggtcctgttttctaaaaaaaaaaactgttgtagaaattcttaatttggatctatttattagtcagagtttcagctttcttcagctgccagtgtgttactcatctttatcctaaaaatctggaatcagagatttttgtttgttcacatatgattctcttagacacttttatatttgaaaaaattaaaatctttctttggggaaaaattcttggttattctgccataacagattatgtattaacttgtagattcagtggttcaatacctgtttagttgcttgctaatatttccagaaggatttcttgtattggtgaaagacggttggggatggggggatttttttgttcttgttgtacccttgttttgaaactagaaatctgtcctgtggcatgcaaaagaaagcaaattatttttaaaagaaaaaaaccaaagtacttttggtgtcattattccatcttctccataagtggagaaatgaaaagtaagaacagctcatcttcaaagtttttacta

SEQ ID NO: 96 - DNA, 3637 bp, Homo sapiens
ccctgtgaggctcggagcccgggtgtcaggcgccacggcgcatgctccgcaatcatcttctttaccctggagctgctgctgctgctgctgcttttgcttttggggctgagtttaataagcgagcgagcgagcaagcgagcgcggggggaaaaaggcagagaatgtccgccatctaccctccgctcctgggcgcgctctcattcatagcagcctcttcatgaattacagctgagggggggcggaggaggggggggtaccacacaacaccccagcaaacctccgggcccccaggcatggctagctcktgtgccgtgcaggtgaagctggagctggggcaccgcgcccaggtgaggaaaaaacccaccgtggagggcttcacccacgactggatggtgttcgtacgcggtccggagcacagtaacatacagcactttgtggagaaagtcgtcttccacttgcacgaaagctttcctaggccaaaaagagtgtgcaaagatccaccttacaaagtagaagaatctgggtatgctggtttcattttgccaattgaagtttattttaaaaacaaggaagaacctaggaaagtccgctttgattatgacttattcctgcatcttgaaggccatccaccagtgaatcacctccgctgtgaaaagctaactttcaacaaccccacagaggactttaggagaaagttgctgaaggcaggaggggaccctaataggagtattcataccagcagcagcagcagcagcagcagyagcagcagcagcagcagcagcagcagcagcagtagcagcagcagcagcagcagcagcagyagcagtagcagcagcagtagyagcagcagcagcagcagtagtaccagtttttcaaagcctcacaaattaatgaaggagcacaaggaaaaaccttctaaagactccagagaacataaaagtgccttcaaagaaccttccagggatcacaacaaatcttccaaagaatcctctaagaaacccaaagaaaataaaccactgaaagaagagaaaatagttcctaagatggccttcaaggaacctaaacccatgtcaaaagagccaaaaccagatagtaacttactcaccatcaccagtggacaagataagaaggctcctagtaaaaggccgcccatttcagattctgaagaactctcagccaaaaaaaggaaaaagagtagctcagaggctttatttaaaagtttttctagcgcaccaccactgatactcacttgttctgctgacaaaaaacagataaaagataaatctcatgtcaagatgggaaaggtcaaaattgaaagtgagacatcagagaagaagaaatcaacgttaccgccatttgatgatattgtggatcccaatgattcagatgtggaggagaatatatcctctaaatctgattctgaacaacccagtcctgccagctccagctccagctccagctccagcttcacaccatcccagaccaggcaacaaggtcctttgaggtctataatgaaagatctgcattctgatgacaatgaggaggaatcagatgaagtggaggataacgacaatgactctgaaatggagaggcctgtaaatagaggaggcagccgaagtcgcagagttagcttaagtgatggcagcgatagtgaaagcagttctgcttcttcacccctacatcacgaacctccaccacccttactaaaaaccaacaacaaccagattcttgaagtgaaaagtccaataaagcaaagcaaatcagataagcaaataaagaatggtgaatgtgacaaggcatacctagatgaactggtagagcttcacagaaggttaatgacattgagagaaagacacattctgcagcagatcgtgaaccttatagaagaaactggacactttcatatcacaaacacaacatttgattttgatctttgctcgctggacaaaaccacagtccgtaaactacagagttacctggaaacatctggaacatcctgaggatataacaactggatgcatcaagaactattgtgttttttttttttggttttttttttttttggttgtgattttttgttyttkttgtttatatgaaaacactcaaaatgatgcaaccaaaagggaaaaaataaaaatcaaacaaccttcagctttatttttctttaaagccagtcatcatctcttgataaaggagaggttaaagcaaaccagcctcagcggaccactcttctctccaaggaaatccccgggaagagttagcctggatagccttgaaaacaaacaaatcaaacacaacacaagaaaactcaaagaatgtgtatggtatcatgtatctctctgtggtggttcattccacaggacgaatgcatattcaacacactgccttattacataactgatctatttattatcgcatacagatattctaagtcgttgagggaatgacaccatcagacattataagtacttggtcccgtggatgctctttcaatgcagcacccttgccatcccaagcccagtgaccttactcgtataccgtgccactttccaccaactttttccaagtcctttaactcgttgcagtctgtattttccaccttttgtttttycagttccaggacacagattatcaactggggggaccaaatagccaccttgattttcttctttgtggtctttttcctgaaagttggggcccagtccttggctgtatccatgtaatgatcttggaccatggtagaaaatgcaccaaataggatcatatgaattgctgtctagccttagtcaataaacttgtaggacttttaaacaaaagtgtacctgtaaatgtcctgaatccagcattgttgagctgtcatcaacattcttgtgtctgttttactgttacaatattaggtgaatatggaagtaaaggcattccacaggatcatcatttaaaaaaaaagaattctggtcctgttttctaaaaaaaaaaactgttgtagaaattcttaatttggatctatttattagtcagagtttcagctttcttcagctgccagtgtgttactcatctttatcctaaaaatctggaatcagagatttttgtttgttcacatatgattctcttagacacttttatatttgaaaaaattaaaatctttctttggggaaaaattcttggttattctgccataacagattatgtattaacttgtagattcagtggttcaatacctgtttagttgcttgctaatatttccagaaggatttcttgtattggtgaaagacggttggggatggggggatttttttgttcttgttgtacccttgttttgaaactagaaatctgtcctgtggcatgcaaaagaaagcaaattatttttaaaagaaaaaaaccaaagtacttttggtgtcattattccatcttctccataagtggagaaatgaaaagtaagaacagctcatcttcaaagtttttactagaaattcagccgaaaagaagagaaatgaagaaatacttctggatccaaaggttcgtcactggatcagccttaagaaagtctctatgtgtgctaatagaccagtatctcccttgtttgttcccatgccagatgctgtcttttcatacagagattaactagtgtctgtacaga

SEQ ID NO: 97 - DNA, 3179 bp, Homo sapiens
ccctgtgaggctcggagcccgggtgtcaggcgccacggcgcatgctccgcaatcatcttctttaccctggagctgctgctgctgctgctgcttttgcttttggggctgagtttaataagcgagcgagcgagcaagcgagcgcggggggaaaaaggcagagaatgtccgccatctaccctccgctcctgggcgcgctctcattcatagcagcctcttcatgaattacagctgagggggggcggaggaggggggggtaccacacaacaccccagcaaacctccgggcccccaggcatggctagctcgtgtgccgtgcaggtgaagctggagctggggcaccgcgcccaggtgaggaaaaaacccaccgtggagggcttcacccacgactggatggtgttcgtacgcggtccggagcacagtaacatacagcactttgtggagaaagtcgtcttccacttgcacgaaagctttcctaggccaaaaagagtgtgcaaagatccaccttacaaagtagaagaatctgggtatgctggtttcattttgccaattgaagtttattttaaaaacaaggaagaacctaggaaagtccgctttgattatgacttattcctgcatcttgaaggccatccaccagtgaatcacctccgctgtgaaaagctaactttcaacaaccccacagaggactttaggagaaagttgctgaaggcaggaggggaccctaataggagtattcataccagcagcagcagcagcagcagcagyagcagcagcagcagcagcagcagcagcagcagtagcagcagcagcagcagcagcagcagyagcagtagcagcagcagtagyagcagcagcagcagcagtagtaccagtttttcaaagcctcacaaattaatgaaggagcacaaggaaaaaccttctaaagactccagagaacataaaagtgccttcaaagaaccttccagggatcacaacaaatcttccaaagaatcctctaagaaacccaaagaaaataaaccactgaaagaagagaaaatagttcctaagatggccttcaaggaacctaaacccatgtcaaaagagccaaaaccagatagtaacttactcaccatcaccagtggacaagataagaaggctcctagtaaaaggccgcccatttcagattctgaagaactctcagccaaaaaaaggaaaaagagtagctcagaggctttatttaaaagtttttctagcgcaccaccactgatactcacttgttctgctgacaaaaaacagataaaagataaatctcatgtcaagatgggaaaggtcaaaattgaaagtgagacatcagagaagaagaaatcaacgttaccgccatttgatgatattgtggatcccaatgattcagatgtggaggagaatatatcctctaaatctgatgtgatcctgccagctccagctccagctccagctccagcttcacaccatcccagaccaggcaacaaggtcctttgaggtctataatgaaagatctgcattctgatgacaatgaggaggaatcagatgaagtggaggataacgacaatgactctgaaatggagaggcctgtaaatagaggaggcagccgaagtcgcagagttagcttaagtgatggcagcgatagtgaaagcagttctgcttcttcacccctacatcacgaacctccaccacccttactaaaaaccaacaacaaccagattcttgaagtgaaaagtccaataaagcaaagcaaatcagataagcaaataaagaatggtgaatgtgacaagatcgtgaaccttatagaagaaactggacactttcatatcacaaacacaacatttgattttgatctttgctcgctggacaaaaccacagtccgtaaactacagagttacctggaaacatctggaacatcctgaggatataacaactggatgcatcaagaactattgtgttttttttttttggttttttttttttttagccttgaaaacaaacaaatcaaacacaacacaagaaaactcaaagaatgtgtatggtatcatgtatctctctgtggtggttcattccacaggacgaatgcatattcaacacactgccttattacataactgatctatttattatcgcatacagatattctaagtcgttgagggaatgacaccatcagacattataagtacttggtcccgtggatgctctttcaatgcagcacccttgccatcccaagcccagtgaccttactcgtataccgtgccactttccaccaactttttccaagtcctttaactcgttgcagtctgtattttccaccttttgtttttycagttccaggacacagattatcaactggggggaccaaatagccaccttgattttcttctttgtggtctttttcctgaaagttggggcccagtccttggctgtatccatgtaatgatcttggaccatggtagaaaatgcaccaaataggatcatatgaattgctgtctagccttagtcaataaacttgtaggacttttaaacaaaagtgtacctgtaaatgtcctgaatccagcattgttgagctgtcatcaacattcttgtgtctgttttactgttacaatattaggtgaatatggaagtaaaggcattccacaggatcatcatttaaaaaaaaagaattctggtcctgttttctaaaaaaaaaaactgttgtagaaattcttaatttggatctatttattagtcagagtttcagctttcttcagctgccagtgtgttactcatctttatcctaaaaatctggaatcagagatttttgtttgttcacatatgattctcttagacacttttatatttgaaaaaattaaaatctttctttggggaaaaattcttggttattctgccataacagattatgtattaacttgtagattcagtggttcaatacctgtttagttgcttgctaatatttccagaaggatttcttgtattggtgaaagacggttggggatggggggatttttttgttcttgttgtacccttgttttgaaactagaaatctgtcctgtggcatgcaaaagaaagcaaattatttttaaaagaaaaaaaccaaagtacttttggtgtcattattccatcttctccataagtggagaaatgaaaagtaagaacagctcatcttcaaagtttttactk

SEQ ID NO: 98 - DNA, 5417 bp, Homo sapiens
aaaactagaaggtcagcaaaggaaagtggaagttggattctgaaagatcgaggtgcccataggaattttatggtcgtcggattttgaagacttgaactagactgggggttckccttgcatttcttgcctgttgcctatctttgtcctctctcttccggcttcgagatgaatgtgcagccctgttctaggtgtgggtatggggtttatcctgccgagaagatcagctgtatagatcagatatggcataaagcctgttttcactgtgaagtttgcaagatgatgctgtctgttaataactttgtgagtcaccagaaaaagccgtactgtcacgcccataaccctaagaacaacactttcaccagtgtctatcacactccattaaatctaaatgtgaggacatttccagaggccatcagtgggatccatgaccaagaagatggtgaacagtgtaaatcagtttttcattgggacatgaaatccaaggataaggaaggtgcacctaacaggcagccactggcaaatgagagagcctattggactggatatggggaagggaatgcttggtgcccaggagctctgccagaccccgaaattgtaaggatggttgaggctcgaaagtctcttggtgaggaatatacagaagactatgagcaacccaggggcaaggggagctttccagccatgatcacacctgcttatcaaagggccaagaaagccaaccagctggccagccaagtggagtataagagagggcatgatgaacgcatctccaggttctccacggtggcggatactcctgagctgctacggagcaaggctggggcacagcttcaaagtgatgtgagatacacagaggactatgaacaacaaagagggaaaggcagtttccctgcgatgatcacacccgcctatcagatagccaaaagagccaatgagctggcaagtgatgtgaggtaccatcaacaatatcaaaaagaaatgaggggaatggctggtccagccattggagctgagggcatcttgacaagggaatgtgcagaccaatatggccagggttacccggaggagtatgaggagcacaggggaaagggcagcttcccagctatgatcactccagcatatcagaacgccaagaaagctcacgaactcgctagtgacataaaatacaggcaggacttcaataagatgaaaggcactgcacattatcactcgcttccagctcaagacaacttggttctcaaacgggctcagagcgtaaacaaactcgtgagtgagaataaatataaagaaaactaccagaaccacatgagaggccgctatgaaggagttggtatggacagacgcactctgcatgctatgaaagttggcagcctggcaagcaacgttgcctacaaagctgattataaacatgatattgtcgactacaactacccagccactctcacgccttcctatcaaacagctatgaaactggtgcccttgaaagatgccaattataggcagagcatcgacaagttgaagtacagctcggtgactgacaccccacagattgttcaagccaaaatcaatgcccagcagctgagtcatgtgaattaccgtgctgactatgagaaaaataagttgaattacacattgccccaggatgttcctcagctggtgaaggccaaaaccaatgccaaactcttcagtgaggttaagtataaagaaggctgggagaagacaaaggggaaaggatttgagatgaagctggatgccatgtctctgctggccgccaaagcctctggggagcttgctagcaatattaaatataaagaagaatatgaaaagacaaaaggcaaagccatgggaacagccgactctaggcttctgcactccctgcagattgctaagatgagcagtgaggttgaatataagaaaggctttgaagagagtaagacccggtttcacctgcccatggatatggtaaacatcaggcatgctaagaaggcccaaactctckccagtgacctggactacaggaagaaactgcatgaatacactgtgctgcctgaagatatgaagactcagtgggccaagaaggtctatgggcttcagagcgagctgcagtacaaggctgacctggcatggatgaagggagttgggtggctgacagaggggagtctcaacttggaacaagccaagaaggctggacagctggtcagcgagaaaaactaccggcagagggtcgatgagctgaagttcaccagcgtgaccgacagctcccagatggagcacgccaagaagagccaggagctacagagcggggtggcctacaaggcaggaaatgagcagtctgtccatcagtataccatcagcaaagacgagcctctcttcctgcaggcccgagccaatgctgcaaatctcagcgagaaactgtataagagcagctgggaaaaccagaaagcaaaagggtttgagctgcgtcttgattccttgaccttcctggcagccaaagccaagagggacctggctagcgaggtgaagtacaaggaggattatgagagatccagagggaagctcattggggcaaaagatgtacagggagattcgcaaatgagccactcactgcaaatgtccaagctgcagagtgagctggagtacaagaagggattcgaggacaccaaatcccaatgccacgtctccctggacatggtccacctcgtgcatgccygcaaagctcagcatttagccacagacgtaggctacaagacagcggaacatcactttacggctttgcccacagacatgaaggtggaatgggccaagaaggcttatggcttacagagtgataaccaatacagggcagatgtgaagtggatgaaaggcatgggctgggtcgccaccgggtcattaaatgtggagcaggcgaagaaggcaggagaactcattagcgagaagaagtaccgtcagcatccagatgctttgaagtttaccagtattaaagacactccggagatggtccaggccagaattagttatacccaagcagtggatagattatacagggaacaaggagaaaacataaagcatcattacacaccgactgctgacctccctgaagtcctgctggccaagctgaatgccatgaatatcagtgagacgcgttataaggaatcctggagcaaacttcgagatggtggctataaactgaggttggatgcccttccattccaagcagcaaaggcttctggtgaaatcataagtgattacaaatacaaagaggcatttgagaaaatgaaaggacagatgcttggttcccggagcttggaagatgatatcagccttgcacattcagtgtatgcgacctcactgcagagtgatgtgaattacaagaaaggctttgaacactcaaaggcgcagttccatctgccgttggacatggccgccctggtgcatgccaagaaggctcagaccctggccagcaatcaggactacaaacatccactgccccagtacacttccttggcagaagacctgaggctgagctgtgccaagaaagctcacaaattgcagagtgagaatttgtaccggtcagacctgaactttatgcgaggtgttgcatgtgtcattccaggcacgttagagattgaagggaggaagaaagcatcggaactcatcagtgagagtaaatatcggcagcatccccactcattcaagtacacagctgtgacagacactcccaacctccttcatgcgaaattcagcaaccagataacgaatgagcgcctctataaagcagctggagaggatgcaagacacgagtatacaatgaccctgggtctgcccgagttcatccgagcaaaaacgaatgcagccaacctgagtgacgcaagatacaaagagtcctggcgtaatcttcgtgctcaaggctacaagctgacaatagaagcgctccccttccaggctgcccgggcctctggagatatagccagtgattttctctacagacatgactttgtgaaggagcgagggaaactcatagggccccagagtgtaagagacgacccccggatccagcactgccggcgcatgggccagctgcagagcgagcttcagtacaggaggggggcgaccagcagccaagcccagttccatctgcccatggacatggtgcacctggtccatgccaagaatgcccaggctctggccagcgaccacgactacaggacacagtatcacaagttcacagcactgcccgaggacctgaagatggcctgggccaagaaagcccatgccctgcagagtgagttgcgctacaagtcagacctgatcggcatgaagggcataggatggctggcgctgagatccccacagatggagagtgcaaagaaggctggagaactcatcagcgagaccaagtaccgtaaaaaaccagacagtatcaagttcaccacagtggttgactccccagacctggttcatgccaagaacagctatatgcactgcaatgagcgcatgtatagatctggagatgcagaatccctgcacagatacaccctgattcccgaccatcccgatttcacccgagctcgcctcaatgcgctgcatctgagtgacaaagtctacagaaactcctgggagcagacccgggctggcagttatgacttcaggctggatgccatccccttccagactgcccgggcatctagggagatcgccagtgatttccggtacaaagaggctttcctgcgggaccgaggcctgcagatcgggtaccgcagtgtcgacgatgacccaaggatgaagcatttcctcaacgttggcaggctccagagtgacaatgagtacaagaaggactttgccaagagtcggtcccagtttcacagcagcacagaccagcccggcctccttcaggccaagaggagccagcagctggccagtgatgtgcactacaggcagcccctgccccagcccacctgcgacccggagcagctgggcctcaggcatgctcagaaggcccaccagctgcagagtgatgtcaagtataaatcagacttgaacctgaccagaggtgttggctggacccctcctggctcctacaaagtggaaatggctcggcgggctgcggaactggccaacgcaaggggcctgggtctccagggagcttaccggggggcagaagcagtggaggctggagatcatcagagtggggaggtgaacccagatgccactgagattctgcacgtcaaaaagaagaaggccctgctgttgtgagccatgtccaccctgattcctgagaggccagagaggaagtttgttcaccagagacaggcttcagatggctttgatttcggcaagctggaatggcccaccagcccatcccagatcttcctttattaaaataataactctgaaagcagatggaaaaaaaaaaaaaa

SEQ ID NO: 99 - DNA, 7272 bp, Homo sapiens
ctcccgcgatgggaaaagttggcgccggcggcggctcccaagcccggctgagcgcgctcctcgccggcgcggggctcttgatcctctgcgccccgggcgtctgcggcggcggctcctgctgcccctcgccgcaccccagctcsgctccacgctcggcctcgacccctaggggcttttcccaccaggggcggccaggcagggctcctgccacgcccctgcccctcgtagtgcgtcccctgttctcagtggcccccggggaccgagcgctatccctggagcgggctcggggcactggggcatccatggcggttgctgcacgctccggccggaggagacggagcggagcggatcaggagaaggcagaacggggagagggcgcgagtcggagcccccggggagtgctaagagatggagggcagcaggagcctgggactcgggagcgggacccggacaaagccacccgcttccggatggaggagctgagactgaccagcaccacgtttgcgctgacgggagactcagcacacaaccaagccatggtccactggtctggccacaacagcagcgtgattctcattttgacaaagctctatgactataacctggggagcatcacagagagctcgctttggaggtcaaccgattatggaacaacctatgagaagctgaatgataaagttggtttgaaaaccattttgagctatctctatgtgtgtcctaccaacaagcgtaagataatgttactcacagacccggagattgagagcagtttattgatcagctcagatgaaggggcaacttatcaaaagtaccggctgaacttctacattcaaagcttgctttttcaccccaaacaagaagactggattctggcatacagtcaagaccaaaagttatacagctctgctgaatttgggagaagatggcagcttatccaagaaggggttgtaccaaacaggttctactggtctgtgatggggtcaaataaagaaccagaccttgtgcatcttgaggccagaactgtggatsgtcattcacattatctaacttgccgaatgcagaactgtacagaggccaacaggaatcagccttttccaggctacattgacccagactctttgattgttcaggatcattatgtgtttgttcagctgacatcaggagggcggccacattactacgtgtcctaccgaaggaatgcatttgcccaaatgaagcttccgaaatatgctttgcccaaggacatgcatgttatcagcaccgatgagaatcaggtgttcgcagcggtccaagaatggaaccagaatgacacgtacaacctctacatctcagacacacgtggtgtctacttcaccctggccttggagaatgtccagagcagcagaggccctgagggcaacatcatgatcgacctctatgaggtagcagggataaagggaatgttcttggctaacaagaagattgacaaccaagtgaagactttcatcacatataacaaaggcagagactggcgtttgctgcaggcgccggacacggatctaaggggggaccccgtgcactgcttgctgccctattgctcactacaccttcacctgaaggtctctgagaatccctacacatcagggatcattgccagcaaagacacagctccaagcatcatagtggcatcaggtaatataggttctgaattgtcagacactgacatcagcatgtttgtctcttcagatgcagggaacacctggagacagatctttgaagaagagcacagtgttttgtacctggatcaaggtggagtcctggttgctatgaaacacacatctctcccaattcgacatctttggttgagttttgatgaagggagatcttggagcaaatacagtttcacatctattccactttttgtggatggggttctgggtgagcctggagaagagactctcatcatgacagtgtttggacacttcagccaccgctctgaatggcagctggtcaaagtagattacaagtccatttttgatagacggtgtgccgaagaggactacagaccttggcagctgcacagccagggggaagcatgtatcatgggagcaaaaaggatatataagaagcgaaaatcagagcggaagtgtatgcaaggaaaatatgcaggagctatggaatctgaaccctgtgtctgcactgaggctgattttgattgcgactatggttatgagcgacacagcaatggccagtgcctgccggcattttggttcaatccatcctctctgtcaaaggattgcagcttgggacagagttacctcaatagtactgggtacaggaaggtggtttccaataattgcactgatggcgtaagggaacagtacactgccaaacmgcagaagtgcccagggaaagccccgcgggggctrcggatagtcacggctgatggaaagctgacagcggaacaaggacacaacgtcactctcatggtgcaattagaagagggtgatgttcagcggacactcatccaagtggacttyggcgatggtatcgcggtgtcttacgtcaatctcagctccatggaagatgggatcaaacaygtctatcagaacgtgggcattttccgtgtgaccgtgcaggtggacaacagtctgggttctgacagcgccgtcctgtacttacatgtaacttgtcccttggagcacgtgcacctgtctcttccctttgtcaccacaaagaacaaagaggtcaatgcgacggcagtgctgtggcccagccaagtgggcaccctcacttaygtgtggtggtacggaaacaacacggagcctttgatcaccttggagggaagcatatccttcagatttacttcagaaggaatgaataccatcacagtgcaggtctcagctgggaatgccatcctacaagacacaaagaccatcgcagtatatgaggaattccggtctcttcgcttgtccttttctccaaacctggatgactacaacccggacatccctgagtggaggagggacatcggtcgagtcatcaaaaaatccctggtggaagccacaggggttccaggccagcacatcctggtggcrgtgctccctggcttacccaccactgctgaactctttgtcctaccctatcaggatccagctggagaaaacaaaaggtcaactgatgacctggagcagatatcagaattgctgatccacacgctcaaccaaaactcagtacacttcgagctgaagccaggagtccgagtccttgtccatgctgctcacttaacagcggcccccctggtggacctcactccaacccacagtggatctgccatgctgatgctgctctcagtggtgtttgtggggctggcagtgttcgtcatctacaagtttaaaaggagagtagctttaccctcccctccctccccttctactcaacctggtgactcatctctccgattgcaaagagcaagacacgccactccgccttcaacgccaaagcggggatctgctggggcacagtatgcaatttaaggaaaacccccaaaggctacaggcgacctgctgatcaggaaagaatttcgctcttgtcaagtacatcatccttcatgaccactaactttgtgttttttttctttcctttgttgttctgtttcctattttgccaggaagtatttccatagttgctgagaatcaaagcacaaaagaaatccctacctatgtaaatgtttgaatggaggacgccagtaaaaaaacaaaaacaaaaacaaaacaaaacataaaatataaacaatcaaaatccaaacaaacaaacaaacactcactgcatcgggactttttaattcttcagacacagacaacaagggtttttagctttaagcctgtgcatgtggacaatactctgagaacatgtctggaggggcagtgtacaggtgctctattttaatggaaaacactcccctctccctctttcttcttctctctcttttttctgatcggtcgtgtttgtagaaaattcataacatatataggccaaggaaatctgcatgtatttttggaaatattcttggctctagatttatcagctattttagcattaaaggctgatgggtggattagctaccccagctcctttcataagacacaaagacgtgcacaggagtttgaaaccctgagctgtttctctgttccactttccatactgtcatttcccttctaagttagctttggtagctctgttggtcagcagtggccacaaggctgctttctgcactctctgtggccacaggaacaaagatgcgagttgaagatccctttgtgccggtagaataaggaaggaagggaggcagggaggcaaagcatgtcagaaacggaccttggtttcctgttcacctctttccaccatgattgcctccccttgcagctttccctactcctgccccaactgcagtaggaaatggaatcccattagttacccattgtcctgtcttcacatttgtttgtcatccatgtgtgaccatgatctgttgatatctttgaatctcttccctccaaaccccaagtaagttgtccttcaactgttctcagtttttcttcccaaacatattgctagattctggacattaaccctgacgtttcctaaatactggcctggcctgtgccgcccctgcccccactactcacaagtttctgagccctttgtcagttttgtacattcccaagcatgccagcttctgtgcccatggaccttgctgcatcctgcacagcagggttcagtttcatgtatctttgtcttttcctctagaacctgcctttttcaaatatccctgccttttcccacctggaaacatatactgtatgcgaaagagttgatatatgcaaagtaattcaaacctggccatgtactttggaaaagaaagcatagagatgaattgtggtgttctcacaccttaacgaaaatctcgtgcgatctgattccagaagattcttgtgagaaatgttttgaatgtgtgacaatttcgcagggcaatttcctcctgtgacggttgctgttacctggtatttccactctcacagtagaatagaaatgtttgtgaaataaaactgattttaactggaaggagaaacaggttaatggactttgtgtttaagagtgtcaaacagtctgagagaataaatgggggtcttgtcttacattagggtgagagtttgattatttaggatgatcccagtgatttcatgtgtgctctctgacctctgagtatcatagtatcattaaagtaaagatttaagtctgtataaaggaggagagttactgattggcaaaaaagattggcacaaagcatgaagaaaccccatttttcccagggtaatcatgaaagaaggctcagagaaagagggaaacaaaagcctgttcagcagaggcccctttagtattatggactgggcaaagcccactataaactataggagaaagaagttctgataaacctcttagtatgctcagcctccttctttgctatgtccctaagccaacagggtataacacaggccctggtgataatgagggtgtcctaaagatcctgatgtccatgacttcatgtagttcaggcacagaaagaatagcaaagctgctgtcagaagtttgtcaggcagagatgtttatggttgaggataccccatatgaatctgggaaatgggctaggcctgaggcagtcacctatttgtagaactcaattgatccccaacctgccaggcttcctatctcataggaaacatcctcattgatcctcttcagttggagtctcccaaatttaatgtggaagacaaagtgttggaaaatcaaaagaggctcactcaaaccagcacagggagtcctcagagttgcagttcaattcattttaattagaaaagtatgaaagaggtataacactcttattctagcacagtgccttgcctagagtagtagtatgaaaactatttgttgaagaaataaatgaatggaaagacatagggaagaatgggctgtaaatcctaattaaaaatagaggtcgacatgagatacctggcattttgggaagtgaccaaagatggccagctagagattcagcatctccaggatcctcatgtgcctctcctcaaagctccctcccatctgtaggagattagtgaggcaaggtgctgctcagagaggaggacctcattgttcttaggaccttggccagttgttctcaaagtgtggtacctggatcagcagtatcactatcacttgggctagttagagatccagattctggatccataccccatacctactgaattagaaactctaggggatgaatagtggtgttctctgttgctaagtgacagtgggcccagccacctattttaacaagccctcccagtgattgtgatacatactaaagtttgagaaccattgtactaggccattccagctgaatctcaaacagaaggcagtaatgagagcctacaaatgggagggacctaagtgcctacctactcgctaatcgcaggtgcaaacacacaaggagtttggtgggcttaaggtcagaggagtgtgtagggagggatgtatgtggaaggtaagattcagggcaagctaaaaatccgatactgcaacgttttccaaaatcccagaaggcaaactgtgcatgttctaccctgaaccacccaagcaacactttctaccttgccttatttttaattggattcactgtccaaaatgcagaggtttgctttgcttttttttcagaagttccaaacagcaactttgagagcagtggggtgcttggcagctgttctgtgttttccaggaatccaactgagcattgaaatctctcatttgccgacttatttttataggaagccaattwaaaaaaaaaaaagttttcttatagtattggaactacttctaattttaaaatgacttttttgatgtattttttgttaaatactatgtagtgtaatgtataattgctcttgtttattgcttttacaatcatatttattaaacagataatgtctctaaagtctttgcctcaggtatttttttttttaatcctaaacccttggtgttcattctaaatatagaagtgttgcatgtataggatttcataaaggctaattgcataagaaagagtaaacaccacaggcttgaggtttttggctgttttttactaacaaggcagaatgtatgtactacctgaattctacctgcatttcaattaactatacaatgtctgtttattaaattactttgatttaaaaatta

SEQ ID NO: 100 - DNA, 1005 bp, Homo sapiens
atgagggtagagaatcctgccaaatgtgatggagaagtgagtacttggtcagccatggtaaggagtttggatattattctgtttgtgatgggtactgtgccacgtactgaggaaaatggtaaacaaaaaacaggtcacttcctccaagttgctcgaaatttgatcttcctgtcctcaatgagtttgcagtctcttagggaaaccaagatatatacgcttaaaaaacgcgtagtggaaagcgttttcttaaatatgattgcatgcaggaagattgggttcaaattcagtgaatgctttaggagccgccagcgcagagctcgtgccgccaccttcgttctgggacccctctctccgctgctcttcgctcccgcgatgggaaaagttggcgccggcggcggctcccaagcccggctgagcgcgctcctcgccggcgcggggctcttgatcctctgcgccccgggcgtctgcggcggcggctcctgctgcccctcgccgcaccccagctcsgctccacgctcggcctcgacccctaggggcttttcccaccaggggcggccaggcagggctcctgccacgcccctgcccctcgtagtgcgtcccctgttctcagtggcccccggggaccgagcgctatccctggagcgggctcggggcactggggcatccatggcggttgctgcacgctccggccggaggagacggagcggagcggatcaggagaaggcagaacggggagagggcgcgagtcggagcccccggggagtgctaagagatggagggcagcaggagcctgggactcgggagcgggacccggacaaagccacccgcttccggatggaggagctgagactgaccagcaccacgtttgcgctgacgggagactcagcacacaaccaagccatggtccactggtctggccacaacagcagcaatgcaaagcagagtggagacctgaattctagttctgcttatttgtggtttgaccgaggcaagttgagtgtccgc

SEQ ID NO: 101 - DNA, 3277 bp, Homo sapiens
atggctctcaaaccatgtcttgaggccccaattgagtctgggctctgttcagggattgaatgtcatgctgagcacccaacactagttctgatgctctttgccagtgtgctggtgacttgccttgaggctgctaaactcaccgtaggcttccagaccccctggaacatctcccatccattcagcatgcaaaggctgggtgcaggcctccagattgccatggacaaggtcaactcagagctagtggaccttggaaatttcaccacttacaccaactcagcctgcagcaccaaggagtctcttgctattttcaacaaccaggtccagaacgaacagatttctgccctgtttggaccagcatgcccagaagcagctgaggttatcggcttgctggcctctgagtggaacaccccatgtttgactttgttggacaaaccacaaaactgtctgacacctgtgtgaaacttgtgtcacccaagcaggacattggtgatgtgctccaggaaagtctccagtacctgggctggaaacacattgggatgtttggaggctactctggggcttcctcctgggatggagtggatgaactgtggagggttgtagagaatgaactcaaatcccattttatcatcactgccagcatgagatacaccaacaatagtctagtccttcttcaagagcatctttggaggatatcatcaattgccagggttatcatcttaacgtgcagctcagaggatgcaaaaattattcttctggctgcagyaaacctgggactcarcactggagaatttgttttcatcattttgcagcagttggaggaccgtttttggaaggaagtactgacaaatcagaaaatgatgcacctccaaaaggtgtatgggtcactgcttctcattgccctcagctcctacagaaaaggcygtsgagacgaaggcttttggaaacaagtctaccaaacaccgaggaggtcgcccttccgcagcaccatctcctgggaggagcaggtragcccttactctgcctaccttcacgacgccgtcctgctctatgctgagaccgtgaagcaggtggtaaaggctggaggcgacttccaggatgggtggcagctggtcagcgctctgaagggttccagtcagaccacagtgcagggaatcacaggccctgtgtttgtggatgcccagggagaaaggcacatggattactctgtctatgccctgcagaagtctgaaaatgggccccttttactttcttttcttcattatgacagttatcaaaggaatttctccaatatgacctggccscatggctcccttcctgaagacagacctggctgtggattttataatgagctctgtgaaactcagtctgcttttacgggcgtgactgctgtgcttctgacattgatgatcctcattcctgtcttgggagctgscatcataggtctgattttaaggmtgcagaggcaaaacaaagacatctggtggcaaatcaattttgatgatatcaccattcttccccagaacaagccatcccagagagscacacctgtgtcaaaaggcatcaacagtaactcatctagtgtgatgatttctgtggacctcagctcttttgtcaagagccagcagtgggaagagctcttctatgccgcagtagggctttatcagggaaaccatgtggccatccgttacgttggtgaccaagcagaagcctgggttaggaagccgattgtgctacaggaaatacagctgatgggtgaattaaggcacgagagcattgttcccttctttggtatttgcaccgaaccacctaacatctgcattgtcacccagtattgcaaaaaaggaawttttcaggatgttttgagaaactcggatcatgaaatggattggatattcaaactctcatttgcatacgacatagtcaatggcatgctgttcctccacaggagccccctgggctcccacagcaacctgaaaccttccaactgcctgatggatggtcggctgcaggtgaagctgtcgtgattcgggctgtgggaactcaagcatggctaaaaatacagaacatatgatgagacagtgaccaaccactcagagctctactggactgccccagagctgctgcagttcccggagatgccctggtcgggtaccccgcaaggagatgtttacagcttcgccattctgatgagggagctgatctaccattgggaccaygggccttttgatgacctccacgaggcaccrgatgaaatcatcaaccaaatcaaagaccctgcagcagcagtcccactgcaaccttccctgcccgaggagaagggcaatgaaaagatcgtggccatggtgagggtgtgttgggatgaatctctggagaaaagacccagtttctcttccatcaagaaaactttacgagaggccagtcccagaggycatgtgagcatactggccagtgtgatgagcaagctggaagtgtatgccaattacctggaggaagtggtgcaagagaggaccagccagctgactgcagagaagaggaaggtggagaagcttctgtccaccaaagtgcccagcttcactggagaacaactactagccggaaggtccgtggaaccagaacatttcgaatctgtgacaatctttttatctgatattgttggattcacaaagctgtgttctctcagctcccctttgcaagtcgtcaagctcctcaatgacgtgtacagtttattcgatcacatcatcacaacttatgatgtttataaggttgagaccattggagatgcatacatggtggctagtggactccctaccacaatggaagccagcatgtggctgagattgccaccatgtccctgcacttcctcagtkccaccatctgcttccaaattgggcacatgccccaggagaagctccagcttcgkattggcctctacacaggtcctgtggtggctggtgtgctggggattaccatgtccagatactgtctatttggagacactgtcaacatggcatccagaatggagagcagcagttcacctctccggattcatgtctctcagagcactgcaagcaccctggtggcattgggagggtacgatttgctaaagagaggcaccattccagtcaagggcaaaggagagcaaacaactttctggttgaaagataaagaaggcttcactcttccactcccgaatttactgaggaaaaagccaaagtcccagagatattgtgaggtgagtattttctttcaagatgtttgtggagtcacatgaaagtct

SEQ ID NO: 102 - DNA, 8791 bp, Homo sapiens
aactcgggcgtcgtcctggcgtcctctccggattgcgccgcaccctcgyttcctgccagggaggggctgccgggctttggcggctcccgagcatcgagaacggggccagagcagcttcctgcctgccccccgcgaccatagagcgcgggcccagggcgccgcccgcgggtgggggacgttcccaggacggaagtggccgagagagtgtcgaagggagggcgaggccggagcccgagggcgacccgagaagcggcggggcggcgggccggcgggcggggcgcagagccaggcagcgcaggtatagccaggctggagaaaagaagctgccaccatggttgcactttcactgaagatcagcattgggaatgtggtgaagacgatgcagtttgagccgtctaccatggtgtacgacgcctgccgcatcattcgtgagcggatcccagaggccccagctggtcctcccagcgactttgggctctttctgtcagatgatgaccccaaaaagggtatatggctggaggctgggaaagctttggactactacatgctccgaaatggggacactatggagtacaggaagaaacagagacccctgaagatccgtatgctggatggaactgtgaagacgatcatggtggatgactctaagactgtcactgacatgctcatgaccatctgtgcccgcattggcatcaccaatcatgatgaatattcattggttcgagagctgatggaagagaaaaaggaggaaataacagggaccttaagaaaggacaagacattgctgcgagatgaaaagaagatggagaaactaaagcagaaattgcacacagatgatgagttgaactggctggaccatggtcggacactgagggagcagggtgtagaggagcacgagacgctgctgctgcggaggaagttcttttactcagaccagaatgtggattcccgggaccctgtacagctgaacctcctgtatgtgcaggcacgagatgacatcctgaatggctcccaccctgtctcctttgacaaggcctgtgagtttgctggcttccaatgccagatccagtttgggccccacaatgagcagaagcacaaggctggcttccttgacctgaaggacttcctgcccaaggagtatgtgaagcagaagggagagcgtaagatcttccaggcacacaagaattgtgggcagatgagtgagattgaggccaaggtccgctacgtgaagctagcccgttctctcaagacttacggtgtctccttcttcctggtgaaggaaaaaatgaaagggaagaacaagctagtgcccaggcttctgggcatcaccaaggagtgtgtgatgcgagtggatgagaagaccaaggaagtgatccaggagtggaacctcaccaacatcaaacgctgggctgcgtctcccaaaagcttcaccctggattttggagattaccaagatggctattactcagtacagacaactgaaggggagcagattgcacagctcattgccggctacatcgatatcatcctgaagaagaaaaaaagcaaggatcactttgggctggaaggagatgaggagtctactatgctggaggactcagtgtcccccaaaaagtcaacagtcctgcagcagcaatacaaccgggtggggaaagtggagcatggctctgtggccctgcctgccatcatgcgctctggagcctctggtcctgagaatttccaggtgggcagcatgccccctgcccagcagcagattaccagcggccagatgcaccgaggacacatgcctcctctgacttcagcccagcaggcactcactggaaccattaactccagcatgcaggccgtgcaggctgcccaggccaccctggatgactttgacactctgccgcctcttggccaggatgctgcctctaaggcctggcgtaaaaacaagatggatgaatcaaagcatgagatccactctcaggtagatgccatcacagctggtactgcgtctgtggtgaacctgacagcaggggaccctgctgagacagactataccgcagtgggctgtgcagtcaccacaatctcctccaacctgacggagatgtcccgtggggtgaagctgctggctgccttgctggaggacgaaggcggcagtggtcggcccctgttgcaggcagcaaagggccttgcgggagcagtgtcagaactgctgcgcagtgcccaaccagccagtgctgagccccgtcagaacctgctgcaagcagctgggaacgtgggccaggccagtggggagctgttgcaacaaattggggaaagtgatactgacccccacttccaggatgcgctaatgcagctcgccaaagctgtggcaagtgctgcagctgccctggtcctcaaggccaagagtgtggcccagcggacagaggactcgggacttcagacccaagttattgctgcagcaacacagtgtgccctatccacttcccaactagtggcctgtactaaggtggtggcacctacaatcagctcacctgtctgccaagagcaactggtggaggctggacgactggtagccaaagccgtggagggctgtgtgtctgcctcccaggcagctacagaggatgggcaactgttgcgaggggtaggagcagcagccacagctgtcacccaggccytaaatgagctgctgcagcatgtgaaagcccatgccacaggggctgggcctgctggccgttatgaccaggctactgacaccatcctaaccgtcactgagaacatctttagctccatgggtgatgctggggagatggtgcgacaggcccgcatcctggcccaagccacatctgacctggtcaatgccatcaaggctgatgctgagggggaaagtgatctggagaactcccgcaagctcttaagtgctgccaagatcctagctgatgccacagccaagatggtagaggctgccaagggagcagctgcccaccctgacagtgaggagcagcagcagcggctgcgggaggcagctgaggggctgcgcatggccaccaatgcagctgcgcagaatgccatcaagaaaaagctggtgcagcgcctggagcatgcagccaagcaggctgcagcctcagccacacagaccatcgctgcagctcagcacgcagcctctacccccaaggcctctgccggcccccagcccctgctggtgcagagctgcaaggcagtggcagagcagattccactgctggtgcagggcgtccgaggaagccaagcccagcctgacagccccagcgctcagcttgccytcattgctgccagccagagcttcctgcaggcaagtgggaagatggtggcagctgcaaaggcctcagtgccaacgattcaggaccaggcttcagccatgcagctgagtcagtgtgccaagaacctgggyacygcgctggctgaactccggacggctgcccagaaggctcaggaagcatgtggacctttggagatggattctgcactgagtgtggtacagaatctagagaaagatctacaggaagtgaaggcagcagctcgagatggcaagcttaaacccttacctggggagacaatggagaagtgtacccaggacctgggcaacagcaccaaagccgtgagctcagccatcgcccagctactgggagaggttgcccagggcaatgagaattatgcaggtattgcagctcgggatgtggcaggtgggctgcggtcactggcccaggccgctaggggagtcgctgcactgacgtcagatcctgcagtgcaggccattgtacttgatacggccagtgatgtgctggacaaggccagcagcctcattgaggaggcgaaaaaggcagctggccatccaggggaccctgagagccagcagcggcttgcccaggtggctaaagcagtgacccaggctctgaaccgctgtgtcagctgcctacctggccagcgcgatgtggataatgccctgagggcagttggagatgccagcaagcgactcctgagtgactygcttcctcctagcactgggacatttcaagaagctcagagccggttgaatgaagctgctgctgggctgaatcaggcagccacagaactggtgcaggcctctcggggaacccctcaggacctggctcgagcctcaggccgatttggacaggacttcagcaccttcctggaagctggtgtggagatggcaggccaggctcygagccaggaggaccgagcccaagttgtgtccaacttgaagggcatctccatgtcttcaagcaaacttcttctggctgccaaggccctgtccacggaccctgctgcccctaacctcaagagtcagctggctgcagctgccagggcagtaactgacagcatcaatcagctcatcactatgtgcacccagcaggcacccggccagaaggagtgtgataacgccctgcgggaattggagacggtccgggaactcctggagaacccagtscagcccatcaatgacatgtcctactttggttgcctggacagtgtaatggagaactcaaaggtgctgggcgaggccatgactggcatctcccaaaatgccaagaacggaaacctgccagagtttggagatgccatttccacagcctcaaaggcactttgtggcttcaccgaggcagctgcacaggctgcatatctggttggtgtctctgaccccaatagccaagctggacagcaagggctrgtggagcccacacagtttgcccgtgcaaaccaggcaattcagatggcctgccagagtttgggagagcctggctgtacccaggcccaggtgctctctgcagccaccattgtggctaaacacacctctgcactgtgtaacagctgtcgcctggcttctgcccgtaccaccaatcctactgccaagcgccagtttgtacagtcagccaaggaggtggccaacagcacagctaatcttgtcaagaccatcaaggcgctagatggggccttcacagaggagaaccgtgcccagtgccgagcagcaacagcccctctgctggaggctgtggacaatctgagtgcctttgcgtccaaccctgagttctccagcattcctgcccagatcagccctgagggtcgggctgccatggagcccattgtgatctctgccaagacaatgttagagagtgccgggggactcatccagacagcccgggccctcgcagtcaatccccgggaccccccgagctggtcggtgctggccggccactcccgtactgtctcagactccatcaagaagctaattacaagcatgagggacaaggctccagggcagctggagtgtgaaacggccattgcagctctgaacagttgtctacgggacctagaccaggcttccctcgctgcagtcagccagcagcttgctccccgtgagggaatctctcaagaggccttgcacactcagatgctcactgcagtccaagagatctcccatctcattgagccgctggccaatgctgcccgggctgaagcctcccagctgggacacaaggtgtcccagatggcgcagtactttgagccrctcaccctggctgcagtgggtgctgcctccaagaccctgagccacccgcagcagatggcactcctggaccagactaaaacattggcagagtctgccctgcagttgctatacactgccaaggaggctggtggtaacccaaagcaagcagctcacacccaggaagccctggaggaggctgtgcagatgatgacygaggccgtagrggacctgacaacaaccctcaacgaggcagccagtgctgctggggtcgtgggtggcatggtggactccatcacccaggccatcaaccagctagatgaaggaccaatgggtgaaccagaaggttccttcgtggattaccaaacaactatggtgcggacagccaaggccattgcagtgacygttcaggagatggttaccaagtcaaacaccagcccagaggagctgggccctcttgctaaccagctgaccagtgactatggccgtctggcctcggaggccaagcctgcagcggtggctgctgaaaatgaagagataggttcccatatcaaacaccgggtacaggagctgggccatggctgtgccgctctggtcaccaaggcaggcgccctgcagtgcagccccagtgatgcctacaccaagaaggagctcatagagtgtgcccggagagtctctgagaaggtctcccacgtcctggctgcgctccaggctgggaatcgtggcacccaggcctgcatcacagcagccagcrctgtgtctggtatcattgctgacctcgacaccaccatcatgttcgccactgctggcacgctcaatcgtgagggtactgaaactttcgctgaccaccgggagggcatcctgaagactgcraaggtgctggtggaggacaccaaggtcctggtgcaaaacgcagctgggagccaggagaagttggcgcaggctgcccagtcctccgtggcgaccatcacccgcctcgctgatgtggtcaagctgggtgcagccagcctgggagctgaggaccctgagacccaggtggtactaatcaacgcagtgaaagatgtagccaaagccctgggagacctcatcagtgcaacgaaggctgcagctggcaaagttggagatgaccctgctgtgtggcagctaaagaactctgccaaggtgatggtgaccaatgtgacatcattgcttaagacagtaaaagccgtggaagatgaggccaccaaaggcactcgggccctggaggcaaccacagaacacatacggcaggagctggcggttttctgttccccagagccacctgccaagacctctaccccagaagacttcatccgaatgaccaagggtatcaccatggcaaccgccaaggccgttgctgctggcaattcctgtcgccaggaagatgtcattgccacagccaatctgagccgccgtgctattgcagatatgcttcgggcttgcaaggaagcagcttaccacccagaagtggcccctgatgtgcggcttcgagccctgcactatggccgggagtgtgccaatggctacctggaactgctggaccatgtactgctgaccctgcagaagccaagcccagaactgaagcagcagttgacaggacattcaaagcgtgtggctggttccgtcactgagctcatccaggctgctgaagccatgaagggaacagaatgggtagacccagaggaccccacagtcattgctgagaatgagctcctgggagctgcagccgccattgaggctgcagccaaaaagctagagcagctgaagccccgggccaaacccaaggaggcagatgagtccttgaactttgaggagcagatactagaagctgccaagtccattgcagcagccaccagtgcactggtaaaggctgcgtcggctgcccagagagaactagtggcccaagggaaggtgggtgccattccagccaatgcactggacgatgggcagtggtcccagggcctcatttctgctgcccggatggtggctgcggccaccaacaatctgtgtgaggcagccaatgcagctgtacaaggccatgccagccaggagaagctcatctcatcagccaagcaggtagctgcctccacagcccagctccttgtggcctgcaaggtcaaggctgaccaggactcggaggcaatgaaacgacttcaggctgctggcaacgcagtgaagcgagcctcagataatctggtgaaagcagcacagaaggctgcagcctttgaagagcaggagaatgagacagtggtggtgaaagagaagatggttggcggcattgcccagatcatcgcagcacaggaagaaatgcttcggaaggaacgagagctggaagaggcgcggaagaaactggcccagatccggcagcagcagtacaagtttctgccttcagagcttcgagatgagcactaaagaagcctcttctatttaatgcagacccggcccagagactgtgcgtgccactaccaaagccttctgggctgtcggggcccaacctgcccaaccccagcactccccaaagtgcctgccaaaccccagggcctggccccgcccagtcccgcagtacatcccctgtcccctccccaaccccmagtgccttcatgccctagggccccccaagtgcctgcccctccccagagtattaacgctccaagagtattattaacgctgctgtacctcgatctgaatctgccggggccccagcccactccaccctgccagcagcttccrgccagtccccacagcctcatcagctctcttcacygttttttgatactatcttcccccacccccagctacccataggggctgcagagttataagccccaaacaggtcatgctccaataaaaatgattctacctacaacctctgcctggcttcaagggagatacaagttttctcccagggcagtaggagagacagtggggttgaattctgtcacccagcttgatccagcttgaaatgggagaggggaagactggcagtctgcacctgaggtcccttcctccttgcacccggaccctaaagttatccaatggggaagttgtgcctgagaagtcatactcctgttatcctcacctccctggccagcacctaagcctcacaaagtgtcgttctkctgctgctgggacagcagctaccacagttccttgtggctaccaggacattctgttcttcatagctactcagggtatgtcaacaaatccagtccttgaccaaattcaaattttcaaaagaagctttgc

SEQ ID NO: 103 - DNA, 8791 bp, Homo sapiens
aactcgggcgtcgtcctggcgtcctctccggattgcgccgcaccctcgyttcctgccagggaggggctgccgggctttggcggctcccgagcatcgagaacggggccagagcagcttcctgcctgccccccgcgaccatagagcgcgggcccagggcgccgcccgcgggtgggggacgttcccaggacggaagtggccgagagagtgtcgaagggagggcgaggccggagcccgagggcgacccgagaagcggcggggcggcgggccggcgggcggggcgcagagccaggcagcgcaggtatagccaggctggagaaaagaagctgccaccatggttgcactttcactgaagatcagcattgggaatgtggtgaagacgatgcagtttgagccgtctaccatggtgtacgacgcctgccgcatcattcgtgagcggatcccagaggccccagctggtcctcccagcgactttgggctctttctgtcagatgatgaccccaaaaagggtatatggctggaggctgggaaagctttggactactacatgctccgaaatggggacactatggagtacaggaagaaacagagacccctgaagatccgtatgctggatggaactgtgaagacgatcatggtggatgactctaagactgtcactgacatgctcatgaccatctgtgcccgcattggcatcaccaatcatgatgaatattcattggttcgagagctgatggaagagaaaaaggaggaaataacagggaccttaagaaaggacaagacattgctgcgagatgaaaagaagatggagaaactaaagcagaaattgcacacagatgatgagttgaactggctggaccatggtcggacactgagggagcagggtgtagaggagcacgagacgctgctgctgcggaggaagttcttttactcagaccagaatgtggattcccgggaccctgtacagctgaacctcctgtatgtgcaggcacgagatgacatcctgaatggctcccaccctgtctcctttgacaaggcctgtgagtttgctggcttccaatgccagatccagtttgggccccacaatgagcagaagcacaaggctggcttccttgacctgaaggacttcctgcccaaggagtatgtgaagcagaagggagagcgtaagatcttccaggcacacaagaattgtgggcagatgagtgagattgaggccaaggtccgctacgtgaagctagcccgttctctcaagacttacggtgtctccttcttcctggtgaaggaaaaaatgaaagggaagaacaagctagtgcccaggcttctgggcatcaccaaggagtgtgtgatgcgagtggatgagaagaccaaggaagtgatccaggagtggaacctcaccaacatcaaacgctgggctgcgtctcccaaaagcttcaccctggattttggagattaccaagatggctattactcagtacagacaactgaaggggagcagattgcacagctcattgccggctacatcgatatcatcctgaagaagaaaaaaagcaaggatcactttgggctggaaggagatgaggagtctactatgctggaggactcagtgtcccccaaaaagtcaacagtcctgcagcagcaatacaaccgggtggggaaagtggagcatggctctgtggccctgcctgccatcatgcgctctggagcctctggtcctgagaatttccaggtgggcagcatgccccctgcccagcagcagattaccagcggccagatgcaccgaggacacatgcctcctctgacttcagcccagcaggcactcactggaaccattaactccagcatgcaggccgtgcaggctgcccaggccaccctggatgactttgacactctgccgcctcttggccaggatgctgcctctaaggcctggcgtaaaaacaagatggatgaatcaaagcatgagatccactctcaggtagatgccatcacagctggtactgcgtctgtggtgaacctgacagcaggggaccctgctgagacagactataccgcagtgggctgtgcagtcaccacaatctcctccaacctgacggagatgtcccgtggggtgaagctgctggctgccttgctggaggacgaaggcggcagtggtcggcccctgttgcaggcagcaaagggccttgcgggagcagtgtcagaactgctgcgcagtgcccaaccagccagtgctgagccccgtcagaacctgctgcaagcagctgggaacgtgggccaggccagtggggagctgttgcaacaaattggggaaagtgatactgacccccacttccaggatgcgctaatgcagctcgccaaagctgtggcaagtgctgcagctgccctggtcctcaaggccaagagtgtggcccagcggacagaggactcgggacttcagacccaagttattgctgcagcaacacagtgtgccctatccacttcccaactagtggcctgtactaaggtggtggcacctacaatcagctcacctgtctgccaagagcaactggtggaggctggacgactggtagccaaagccgtggagggctgtgtgtctgcctcccaggcagctacagaggatgggcaactgttgcgaggggtaggagcagcagccacagctgtcacccaggccytaaatgagctgctgcagcatgtgaaagcccatgccacaggggctgggcctgctggccgttatgaccaggctactgacaccatcctaaccgtcactgagaacatctttagctccatgggtgatgctggggagatggtgcgacaggcccgcatcctggcccaagccacatctgacctggtcaatgccatcaaggctgatgctgagggggaaagtgatctggagaactcccgcaagctcttaagtgctgccaagatcctagctgatgccacagccaagatggtagaggctgccaagggagcagctgcccaccctgacagtgaggagcagcagcagcggctgcgggaggcagctgaggggctgcgcatggccaccaatgcagctgcgcagaatgccatcaagaaaaagctggtgcagcgcctggagcatgcagccaagcaggctgcagcctcagccacacagaccatcgctgcagctcagcacgcagcctctacccccaaggcctctgccggcccccagcccctgctggtgcagagctgcaaggcagtggcagagcagattccactgctggtgcagggcgtccgaggaagccaagcccagcctgacagccccagcgctcagcttgccytcattgctgccagccagagcttcctgcagccaggtgggaagatggtggcagctgcaaaggcctcagtgccaacgattcaggaccaggcttcagccatgcagctgagtcagtgtgccaagaacctgggyacygcgctggctgaactccggacggctgcccagaaggctcaggaagcatgtggacctttggagatggattctgcactgagtgtggtacagaatctagagaaagatctacaggaagtgaaggcagcagctcgagatggcaagcttaaacccttacctggggagacaatggagaagtgtacccaggacctgggcaacagcaccaaagccgtgagctcagccatcgcccagctactgggagaggttgcccagggcaatgagaattatgcaggtattgcagctcgggatgtggcaggtgggctgcggtcactggcccaggccgctaggggagtcgctgcactgacgtcagatcctgcagtgcaggccattgtacttgatacggccagtgatgtgctggacaaggccagcagcctcattgaggaggcgaaaaaggcagctggccatccaggggaccctgagagccagcagcggcttgcccaggtggctaaagcagtgacccaggctctgaaccgctgtgtcagctgcctacctggccagcgcgatgtggataatgccctgagggcagttggagatgccagcaagcgactcctgagtgactygcttcctcctagcactgggacatttcaagaagctcagagccggttgaatgaagctgctgctgggctgaatcaggcagccacagaactggtgcaggcctctcggggaacccctcaggacctggctcgagcctcaggccgatttggacaggacttcagcaccttcctggaagctggtgtggagatggcaggccaggctcygagccaggaggaccgagcccaagttgtgtccaacttgaagggcatctccatgtcttcaagcaaacttcttctggctgccaaggccctgtccacggaccctgctgcccctaacctcaagagtcagctggctgcagctgccagggcagtaactgacagcatcaatcagctcatcactatgtgcacccagcaggcacccggccagaaggagtgtgataacgccctgcgggaattggagacggtccgggaactcctggagaacccagtscagcccatcaatgacatgtcctactttggttgcctggacagtgtaatggagaactcaaaggtgctgggcgaggccatgactggcatctcccaaaatgccaagaacggaaacctgccagagtttggagatgccatttccacagcctcaaaggcactttgtggcttcaccgaggcagctgcacaggctgcatatctggttggtgtctctgaccccaatagccaagctggacagcaagggctrgtggagcccacacagtttgcccgtgcaaaccaggcaattcagatggcctgccagagtttgggagagcctggctgtacccaggcccaggtgctctctgcagccaccattgtggctaaacacacctctgcactgtgtaacagctgtcgcctggcttctgcccgtaccaccaatcctactgccaagcgccagtttgtacagtcagccaaggaggtggccaacagcacagctaatcttgtcaagaccatcaaggcgctagatggggccttcacagaggagaaccgtgcccagtgccgagcagcaacagcccctctgctggaggctgtggacaatctgagtgcctttgcgtccaaccctgagttctccagcattcctgcccagatcagccctgagggtcgggctgccatggagcccattgtgatctctgccaagacaatgttagagagtgccgggggactcatccagacagcccgggccctcgcagtcaatccccgggaccccccgagctggtcggtgctggccggccactcccgtactgtctcagactccatcaagaagctaattacaagcatgagggacaaggctccagggcagctggagtgtgaaacggccattgcagctctgaacagttgtctacgggacctagaccaggcttccctcgctgcagtcagccagcagcttgctccccgtgagggaatctctcaagaggccttgcacactcagatgctcactgcagtccaagagatctcccatctcattgagccgctggccaatgctgcccgggctgaagcctcccagctgggacacaaggtgtcccagatggcgcagtactttgagccrctcaccctggctgcagtgggtgctgcctccaagaccctgagccacccgcagcagatggcactcctggaccagactaaaacattggcagagtctgccctgcagttgctatacactgccaaggaggctggtggtaacccaaagcaagcagctcacacccaggaagccctggaggaggctgtgcagatgatgacygaggccgtagrggacctgacaacaaccctcaacgaggcagccagtgctgctggggtcgtgggtggcatggtggactccatcacccaggccatcaaccagctagatgaaggaccaatgggtgaaccagaaggttccttcgtggattaccaaacaactatggtgcggacagccaaggccattgcagtgacygttcaggagatggttaccaagtcaaacaccagcccagaggagctgggccctcttgctaaccagctgaccagtgactatggccgtctggcctcggaggccaagcctgcagcggtggctgctgaaaatgaagagataggttcccatatcaaacaccgggtacaggagctgggccatggctgtgccgctctggtcaccaaggcaggcgccctgcagtgcagccccagtgatgcctacaccaagaaggagctcatagagtgtgcccggagagtctctgagaaggtctcccacgtcctggctgcgctccaggctgggaatcgtggcacccaggcctgcatcacagcagccagcrctgtgtctggtatcattgctgacctcgacaccaccatcatgttcgccactgctggcacgctcaatcgtgagggtactgaaactttcgctgaccaccgggagggcatcctgaagactgcraaggtgctggtggaggacaccaaggtcctggtgcaaaacgcagctgggagccaggagaagttggcgcaggctgcccagtcctccgtggcgaccatcacccgcctcgctgatgtggtcaagctgggtgcagccagcctgggagctgaggaccctgagacccaggtggtactaatcaacgcagtgaaagatgtagccaaagccctgggagacctcatcagtgcaacgaaggctgcagctggcaaagttggagatgaccctgctgtgtggcagctaaagaactctgccaaggtgatggtgaccaatgtgacatcattgcttaagacagtaaaagccgtggaagatgaggccaccaaaggcactcgggccctggaggcaaccacagaacacatacggcaggagctggcggttttctgttccccagagccacctgccaagacctctaccccagaagacttcatccgaatgaccaagggtatcaccatggcaaccgccaaggccgttgctgctggcaattcctgtcgccaggaagatgtcattgccacagccaatctgagccgccgtgctattgcagatatgcttcgggcttgcaaggaagcagcttaccacccagaagtggcccctgatgtgcggcttcgagccctgcactatggccgggagtgtgccaatggctacctggaactgctggaccatgtactgctgaccctgcagaagccaagcccagaactgaagcagcagttgacaggacattcaaagcgtgtggctggttccgtcactgagctcatccaggctgctgaagccatgaagggaacagaatgggtagacccagaggaccccacagtcattgctgagaatgagctcctgggagctgcagccgccattgaggctgcagccaaaaagctagagcagctgaagccccgggccaaacccaaggaggcagatgagtccttgaactttgaggagcagatactagaagctgccaagtccattgcagcagccaccagtgcactggtaaaggctgcgtcggctgcccagagagaactagtggcccaagggaaggtgggtgccattccagccaatgcactggacgatgggcagtggtcccagggcctcatttctgctgcccggatggtggctgcggccaccaacaatctgtgtgaggcagccaatgcagctgtacaaggccatgccagccaggagaagctcatctcatcagccaagcaggtagctgcctccacagcccagctccttgtggcctgcaaggtcaaggctgaccaggactcggaggcaatgaaacgacttcaggctgctggcaacgcagtgaagcgagcctcagataatctggtgaaagcagcacagaaggctgcagcctttgaagagcaggagaatgagacagtggtggtgaaagagaagatggttggcggcattgcccagatcatcgcagcacaggaagaaatgcttcggaaggaacgagagctggaagaggcgcggaagaaactggcccagatccggcagcagcagtacaagtttctgccttcagagcttcgagatgagcactaaagaagcctcttctatttaatgcagacccggcccagagactgtgcgtgccactaccaaagccttctgggctgtcggggcccaacctgcccaaccccagcactccccaaagtgcctgccaaaccccagggcctggccccgcccagtcccgcagtacatcccctgtcccctccccaaccccmagtgccttcatgccctagggccccccaagtgcctgcccctccccagagtattaacgctccaagagtattattaacgctgctgtacctcgatctgaatctgccggggccccagcccactccaccctgccagcagcttccrgccagtccccacagcctcatcagctctcttcacygttttttgatactatcttcccccacccccagctacccataggggctgcagagttataagccccaaacaggtcatgctccaataaaaatgattctacctacaacctctgcctggcttcaagggagatacaagttttctcccagggcagtaggagagacagtggggttgaattctgtcacccagcttgatccagcttgaaatgggagaggggaagactggcagtctgcacctgaggtcccttcctccttgcacccggaccctaaagttatccaatggggaagttgtgcctgagaagtcatactcctgttatcctcacctccctggccagcacctaagcctcacaaagtgtcgttctkctgctgctgggacagcagctaccacagttccttgtggctaccaggacattctgttcttcatagctactcagggtatgtcaacaaatccagtccttgaccaaattcaaattttcaaaagaagctttgc

SEQ ID NO: 104 - DNA, 8036 bp, Homo sapiens
  misc_feature (1)...(8036): n = A,T,C or G, or insertion/deletion polymorphism (see Tables 1-2)
atctaccaccttaaaaccctgatctagaaaaaatatatattcatgataggaagttataactaagaaaatttatttgcctcttaatgctcctgaatgaaagraattatccctttgttctttgggaggacttgtgtatctgagattgttgtaataatcagtcattttattaaaaccttgacatgatcaccagggaggaaaaatagagcaatagtcaaaacctgtgtgttagtccaagatgacttctgaagaaatgacagcttctgttctcatacctgtgactcagagaaaagtggtttctgcccagtcggctgcagatgaaagtagtgaaaaggtctcagacatcaatatttcaaaagcacatactgtcagacgaagtggggagacttctcataccatctcacaactgaacaaacttaaagaagaaccttctggaagcaacttgccaaagattctctcaatagcgagggagaaaatagtgagtgatgagaacagtaatgaaaaatgttgggagaaaatcatgccagattctgcgaaaaaccttaacattaactgcaacaacatattgagaaaccatcagcatggccttcctcagagacaattttatgaaatgtacaactctgttgctgaggaagacttgtgtttagaaactggaattccttctccactggaaagaaaggtgttccctggaattcaactggaactagacagaccttccatgggcattagtcctttaggaaatcagtcagtgatcatagagacaggcagagcacaccctgacagcagaagggcagtatttcattttcattatgaagttgacagaagaatgtcagacactttctgtaccctatcagaaaacttaattttagacgattgtggaaattgtgtaccactacctgggggtgaggagaagcaaaagaaaaactatgtggcatatacctgtaaactgatggaattggccaaaaattgtgataataagaatgagcagctgcagtgtgatcattgtgacaccttgaatgataaatacttttgctttgaaggctcttgygagaaggttgacatggtatattcaggtgatagcttttgtaggaaagactttactgacagtcaagctgccaagacctttttgagccattttgaggacttccctgataattgtgatgatgtagaagaagacgcttttaaaagcaaaaaggarcgatccactttgttagtcaggagattctgtaaaaatgacagagaagttaagaaatctgtgtatactggaacaagagcaattgtgagaactctgccttctggccacattgggctgactgcatggagttacatagatcagaagagaaatggtcccttactgccttgtgggagagtaatggaacccccgtcaacagtggagataaggcaagatgggagccaacgtctgtcagaagcccagtggtatcctatctacaatgcagtgagaagagaagaaacagaaaatacagttggatctctactccatttcctcaccaagctcccagcctccgagacagcccatggaaggataagcgttggtccatgcttaaagcaatgtgtccgagacactgtatgtgagtatcgcgccaccctccaaaggacttcaatatcgcagtacatcaccggtwctctcctagaagcaaccacgtctttgggagcaagaagtggccttctcagtacttttggaggatccactggacgaatgatgctgaaagaacgccagccaggcccctctgtggccaattccaatgccctcccttcaagttcagctgggatcagcaaggagctgatcgatctgcagcctctcatccagttcccagaggaagtcgccagcatcctgatggagcaagagcagactatttacckcagggtcttgccagtcgactacctttgcttcttaacacgggacttgggcactcctgaatgccagagctccttgccctgcctcaaagcatccatctcagcgtcgattcttaccactcagaatggagagcacaatgcccttgaagatctggtgatgaggtttaatgaggtgagctcctgggtgacatggctgatcctcacggcaggctccatggaggagaagcgagaagtcttttcatatttggtgcatgtggccaaatgctgctggaacatgggcaactacaacgctgtcatggagttcttggctggcctcaggtcaagaaaagttttaaaaatgtggcagttcatggaccagtctgatattgagaccatgaggagcctgaaggatgctatggcccagcatgagtcctcttgtgagtacagaaaggtggtgacacgtgccctgcacatccctggctgtaaggtggttccattctgtggggtgtttctgaaggagctctgtgaagtgcttgacggcgcctccggtctcatgaagctttgcccgcggtacaattcccaagaagaaactttagagtttgtagcagattacagtggacaagataatttcttacaacgagtgggacaaaatggcttaaagaattcggagaaggagtccactgtcaacagcatctttcaggtcatccggagctgcaatcgaagtctggagacagacgaggaggacagccccagtgaaggaaacagctccaggaaaagctccttgaaggataaaagccgatggcagtttataattggagatttgttggattcagacaatgacatctttgagcaatccaaagaatacgactctcatggttcagaggactcacagaaggccttcgaccatgggacggagctcatcccttggtacgtgctgtccatccaagccgatgtgcaccagttcctgctgcagggggccacggtcatccactacgaccaggacacacacctctctgcccgctgcttcctccagcttcagcccgacaatagcaccttgacctgggtaaagcccacaactgcctccccagccagcagtaaagcaaaacttggtgtacttaataacacagctgagcctggaaaattcccactactgggtaatgctggattaastagcctgacggaaggggtcttggatctttttgcagtgaaggctgtatacatgggccaccctggcattgatatacacactgtgtgtgttcagaacaaactgggtagcatgttcctgtcagagactggtgtgacattgctctatgggcttcagaccacagacaacagattattgcacttcgtggcaccaaagcacacagctaaaatgctcttcagcggattattggaactcactagagctgtgagaaagatgaggaaattccctgaccaaagacagcagtggctgcggaaacagtacgtcagcctttatcaggaggatggacggtatgaaggcccaactttggctcaygctgtggagttgtttggtggcagacggtggagtgctcgaaaccccagccccggaacatcagcaaagaatgctgagaagcccaatatgcagagaaacaataccctgggcataagcactaccaagaaaaagaagaaaatcctcatgagggktgagagtggagaggtaactgacgatgagatggcaacccgaaaggccaagatgcacaaagagtgtcgaagccggagtggttctgatcctcaagacattaatgaacaagaagaatcagaggtgaatgccatcgctaaccctccaaaccccctcccttccagaagagcccactctttgaccacagctgggtcccccaacttggctgccgggacgtcatctcccatcaggccagtgtcctcccctgtgctgtcttcttcaaacaagagcccatccagtgcttggagcagtagtagctggcacgggcggatcaaaggcggcatgaagggatttcagagcttcatggtttcagatagcaacatgagttttgttgaatttgttgagctgttcaaatcattcagtgtcaggagccgcaaggacctgaaggatctgtttgatgtctatgcagtgccctgcaaccgatctggctccgagtcagccccactctacaccaacctgacaattgatgaaaacaccagcgatcttcagcctgacctagatctgttgaccagaaatgtctcggatttggggttgttcattaagagtaaacagcagctatcggacaaccagaggcagatatctgatgccattgctgctgcaagcattgtgacaaatggcactgggattgagagcacatctctgggcatttttggggtgggcatacttcagctcaacgatttcctcgtgaattgccaaggagaacactgcacttatgatgaaatcctcagcatcatccagaagttcgagcctagcatcagtatgtgtcatcagggactaatgtcatttgaagggtttgccaggtttctgatggataaagaaaattttgcctcaaaaaatgatgagtcacaggagaacattaaagaactgcagctacccctctcatactattacatcgaatcttcgcacaatacctacctcacgggccatcagctcaaaggagaatcctcrgtagaactctacagccaggtccttttgcaaggctgtcgaagtgtagaattggactgctgggacggagacgatgggatgcccatcatttatcatggacatacgctgacaaccaagatccccttcaaggaagtggttgaagccattgatcgcagtgccttcatcaactctgacctgccaatcatcatatcgattgagaaccactgttcattgcctcagcaacgaaaaatggcagaaattttcaagactgtgtttggagaaaagctggtgactaaattcttatttgagactgatttctcagatgatccaatgcttccttcacctgaccaactcagaaagaaagttcttcttaaaaacaagaagctaaaagcccatcagacgccagtggatatcttaaagcaaaaggctcatcagttagcatctatgcaagtgcaggcttataatggtgggaatgccaacccccsacctgccartaatgaggaagaggaagatgaggaggacgaatatgattatgactatgaatccctttctgatgacaacattctggaagacagacctgaaaataaatcatgtaatgacaagcttcagtttgaatataatgaagaaatcccaaagaggataaagaaagcagataactctgcttgcaacaaaggaaaggtttatgatatggaactgggagaagaattttatcttgatcagaataaaaaggaaagcagacagattgcaccagagctttctgaccttgtaatctattgtcaagcagtaaaatttccaggactgtcaactctaaatgcatctggctctagcagaggaaaagaaaggaaaagcaggaagtccatttttggcaacaatccgggcagaatgagcccaggggagacagcatcatttaacaaaacatctggaaaaagttcctgtgaaggcattcgacagacctgggaggaatcttcttcccctctcaacccaaccacgtccctcagtgctatcattagaactcccaaatgttatcatatctcgtcgctgaatgaaaatgccgccaaacgtctgtgtcgcaggtattctcagaaactgayccagcacaccgcctgtcagctgctgagaacttaccctgctgccacccgcatcgactcttccaacccgaaccccctcatgttctggctccatgggatacagcttgtggcactcaactaccagactgatgatctccctttacatttaaatgctgcaatgtttgaggcaaatggtggttgtggttatgtattgaaacctccagttctgtgggacaagaactgccccatgtatcagaagttttctccactagaaagagatctggacagcatggatcctgcagtctattctttaactattgtctctggtcagaatgtgtgccccagtaatagcatgggaagccygtgcattgaagtcgacgtcctgggcatgcctctggacagctgccatttccgcacaaagcccatccatcgaaacaccctgaaccccatgtggaacgagcagtttctgttccncgttcacttcgaagatcttgtatttcttcgttttgcagttgtggaaaacaatagttcagcggtaactgctcagagaatcattccactgaaagctttaaaacgaggatatcgacatcttcagctgcgaaaccttcacaatgaagtcttggagatttctagtttattcattaacagcagaaggatggaagaaaattcctctggcaataccatgtcagcctcttcgatgtttaatacagaagaaagaaaatgtttgcagactcacagagtcacggtgcatggggtcccagggccagagccctttaccgttttcactattaatggaggcaccaaggcaaagcagcttctgcagcaaattctgacaaatgaacaagacatcaaacctgttaccacagactattttttgatggaagaaaaatattttatatctaaagaaaagaatgaatgtaggaaacaaccattccagagagccattggtccagaagaggagatcatgcaaattttaagcagctggtttccagaagagggatacatgggcaggattgtsttaaaaacccagcaggaaaacctagaagagaaaaacattgttcaagatgacaaagaggtgatcttgagctcagaggaggagagtttctttgtccaagtgcatgatgtttctccagagcaacctcgaacagtcatcaaagcaccccgcgtcagcactgcacaggatgtcattcagcagaccttatgcaaagccaaatattcctacagcatcctgagcaaccccaatccaagcgactatgtgcttttggaagaggtggtgaaagacactaccaacaagaagactaccacaccaaagtcctctcagcgggtccttctggatcaggagtgtgtgtttcaagcccaaagcaagtggaaaggtgcaggaaaattcatccttaagctaaaggagcaggtgcaggcatctcgagaagataaaaagaaaggcatttctttcgcaagtgaactcaagaagctcaccaagtcaactaaacagccccgaggacttacatcaccttctcagctcttgacctcagaaagtatccaaaccaaggaggagaaacctgtgggtggcttgtcctccagtgacacaatggattaccgacagtgactaasggcagcatgtttaacccaggtgaagatctttaagcaagaagttaaagagtgaacatggtggaaaaaatataattattttcatcagacttaaactggaaattgatgatttctgaactgaagccttcacacatgtgagatccatgctgaggagaagcaaaatggcacagggctagttgccaccaaccaatttactgatgaatgaagcccaggggactgccattttataaatgtcagcagttggaaaaatcgtcacgaattgacttagagcaagggtcagcaagcttgtctgtaaagggccaaacagtaaatattttagggctgggggccataaaatatgttgcaaccacccaattctgccattgtagtgcaaaagcagccatagacaacacatacatgaacgaacgtggctgtattccaataaaactttatttatggacactgaaattggaatttcatatatttttcacatgtcacaaatactcttgttttgactttttttcaaccatttaaaaacttaaaaactattcttaattcaggggccatacaaaaacaggtggcaggctagatttggcccaaggaccttaatttgccaacacaactaagagaagagaactgggaacaaggagcacaaagatctgaaaacaggaaaggaagtttagccatacattttatggccgagaattagaagcttagaattagaagctttggggcatttcaagtgtaaatatgtcctataacataagagtcattaaaattcaatttagttcctgtattgtgtaccacagtgcactcctctttaggatttttttacatatagaaataatattgggttttttttaaggttattgcctattcagttaatagggttgctttaaaaaaggttattg

SEQ ID NO: 105 - DNA, 6877 bp, Homo sapiens
  misc_feature (1)...(6877): n = A,T,C or G, or insertion/deletion polymorphism (see Tables 1-2)
atggtttcagaaggaagtgcagcaggaagagactttgcaggaatggaagaggtgaggcagctccacgtgagattctgcaaagggattaagatttggcaccaggcttggtttctgtgcagcctcttaggcagagagccccaggagagggaagcaggctgtcagctgtggctttgcacgctctcagctgtcttgaaggttggttggctcttcccgctctctgaggtacccaattttaccttgttaaaggatggatgtggatgctggaggcttaaagaagaccagatctacaatgcagtgagaagagaagaaacagaaaatacagttggatctctactccatttcctcaccaagctcccagcctccgagacagcccatggaaggataagcgttggtccatgcttaaagcaatgtgtccgagacactgtatgtgagtatcgcgccaccctccaaaggacttcaatatcgcagtacatcaccggtwctctcctagaagcaaccacgtctttgggagcaagaagtggccttctcagtacttttggaggatccactggacgaatgatgctgaaagaacgccagccaggcccctctgtggccaattccaatgccctcccttcaagttcagctgggatcagcaaggagctgatcgatctgcagcctctcatccagttcccagaggaagtcgccagcatcctgatggagcaagagcagactatttacckcagggtcttgccagtcgactacctttgcttcttaacacgggacttgggcactcctgaatgccagagctccttgccctgcctcaaagcatccatctcagcgtcgattcttaccactcagaatggagagcacaatgcccttgaagatctggtgatgaggtttaatgaggtgagctcctgggtgacatggctgatcctcacggcaggctccatggaggagaagcgagaagtcttttcatatttggtgcatgtggccaaatgctgctggaacatgggcaactacaacgctgtcatggagttcttggctggcctcaggtcaagaaaagttttaaaaatgtggcagttcatggaccagtctgatattgagaccatgaggagcctgaaggatgctatggcccagcatgagtcctcttgtgagtacagaaaggtggtgacacgtgccctgcacatccctggctgtaaggtggttccattctgtggggtgtttctgaaggagctctgtgaagtgcttgacggcgcctccggtctcatgaagctttgcccgcggtacaattcccaagaagaaactttagagtttgtagcagattacagtggacaagataatttcttacaacgagtgggacaaaatggcttaaagaattcggagaaggagtccactgtcaacagcatctttcaggtcatccggagctgcaatcgaagtctggagacagacgaggaggacagccccagtgaaggaaacagctccaggaaaagctccttgaaggataaaagccgatggcagtttataattggagatttgttggattcagacaatgacatctttgagcaatccaaagaatacgactctcatggttcagaggactcacagaaggccttcgaccatgggacggagctcatcccttggtacgtgctgtccatccaagccgatgtgcaccagttcctgctgcagggggccacggtcatccactacgaccaggacacacacctctctgcccgctgcttcctccagcttcagcccgacaatagcaccttgacctgggtaaagcccacaactgcctccccagccagcagtaaagcaaaacttggtgtacttaataacacagctgagcctggaaaattcccactactgggtaatgctggattaastagcctgacggaaggggtcttggatctttttgcagtgaaggctgtatacatgggccaccctggcattgatatacacactgtgtgtgttcagaacaaactgggtagcatgttcctgtcagagactggtgtgacattgctctatgggcttcagaccacagacaacagattattgcacttcgtggcaccaaagcacacagctaaaatgctcttcagcggattattggaactcactagagctgtgagaaagatgaggaaattccctgaccaaagacagcagtggctgcggaaacagtacgtcagcctttatcaggaggatggacggtatgaaggcccaactttggctcaygctgtggagttgtttggtggcagacggtggagtgctcgaaaccccagccccggaacatcagcaaagaatgctgagaagcccaatatgcagagaaacaataccctgggcataagcactaccaagaaaaagaagaaaatcctcatgagggktgagagtggagaggtaactgacgatgagatggcaacccgaaaggccaagatgcacaaagagtgtcgaagccggagtggttctgatcctcaagacattaatgaacaagaagaatcagaggtgaatgccatcgctaaccctccaaaccccctcccttccagaagagcccactctttgaccacagctgggtcccccaacttggctgccgggacgtcatctcccatcaggccagtgtcctcccctgtgctgtcttcttcaaacaagagcccatccagtgcttggagcagtagtagctggcacgggcggatcaaaggcggcatgaagggatttcagagcttcatggtttcagatagcaacatgagttttgttgaatttgttgagctgttcaaatcattcagtgtcaggagccgcaaggacctgaaggatctgtttgatgtctatgcagtgccctgcaaccgatctggctccgagtcagccccactctacaccaacctgacaattgatgaaaacaccagcgatcttcagcctgacctagatctgttgaccagaaatgtctcggatttggggttgttcattaagagtaaacagcagctatcggacaaccagaggcagatatctgatgccattgctgctgcaagcattgtgacaaatggcactgggattgagagcacatctctgggcatttttggggtgggcatacttcagctcaacgatttcctcgtgaattgccaaggagaacactgcacttatgatgaaatcctcagcatcatccagaagttcgagcctagcatcagtatgtgtcatcagggactaatgtcatttgaagggtttgccaggtttctgatggataaagaaaattttgcctcaaaaaatgatgagtcacaggagaacattaaagaactgcagctacccctctcatactattacatcgaatcttcgcacaatacctacctcacgggccatcagctcaaaggagaatcctcrgtagaactctacagccaggtccttttgcaaggctgtcgaagtgtagaattggactgctgggacggagacgatgggatgcccatcatttatcatggacatacgctgacaaccaagatccccttcaaggaagtggttgaagccattgatcgcagtgccttcatcaactctgacctgccaatcatcatatcgattgagaaccactgttcattgcctcagcaacgaaaaatggcagaaattttcaagactgtgtttggagaaaagctggtgactaaattcttatttgagactgatttctcagatgatccaatgcttccttcacctgaccaactcagaaagaaagttcttcttaaaaacaagaagctaaaagcccatcagacgccagtggatatcttaaagcaaaaggctcatcagttagcatctatgcaagtgcaggcttataatggtgggaatgccaacccccsacctgccartaatgaggaagaggaagatgaggaggacgaatatgattatgactatgaatccctttctgatgacaacattctggaagacagacctgaaaataaatcatgtaatgacaagcttcagtttgaatataatgaagaaatcccaaagaggataaagaaagcagataactctgcttgcaacaaaggaaaggtttatgatatggaactgggagaagaattttatcttgatcagaataaaaaggaaagcagacagattgcaccagagctttctgaccttgtaatctattgtcaagcagtaaaatttccaggactgtcaactctaaatgcatctggctctagcagaggaaaagaaaggaaaagcaggaagtccatttttggcaacaatccgggcagaatgagcccaggggagacagcatcatttaacaaaacatctggaaaaagttcctgtgaaggcattcgacagacctgggaggaatcttcttcccctctcaacccaaccacgtccctcagtgctatcattagaactcccaaatgttatcatatctcgtcgctgaatgaaaatgccgccaaacgtctgtgtcgcaggtattctcagaaactgayccagcacaccgcctgtcagctgctgagaacttaccctgctgccacccgcatcgactcttccaacccgaaccccctcatgttctggctccatgggatacagcttgtggcactcaactaccagactgatgatctccctttacatttaaatgctgcaatgtttgaggcaaatggtggttgtggttatgtattgaaacctccagttctgtgggacaagaactgccccatgtatcagaagttttctccactagaaagagatctggacagcatggatcctgcagtctattctttaactattgtctctggtcagaatgtgtgccccagtaatagcatgggaagccygtgcattgaagtcgacgtcctgggcatgcctctggacagctgccatttccgcacaaagcccatccatcgaaacaccctgaaccccatgtggaacgagcagtttctgttccncgttcacttcgaagatcttgtatttcttcgttttgcagttgtggaaaacaatagttcagcggtaactgctcagagaatcattccactgaaagctttaaaacgaggatatcgacatcttcagctgcgaaaccttcacaatgaagtcttggagatttctagtttattcattaacagcagaaggatggaagaaaattcctctggcaataccatgtcagcctcttcgatgtttaatacagaagaaagaaaatgtttgcagactcacagagtcacggtgcatggggtcccagggccagagccctttaccgttttcactattaatggaggcaccaaggcaaagcagcttctgcagcaaattctgacaaatgaacaagacatcaaacctgttaccacagactattttttgatggaagaaaaatattttatatctaaagaaaagaatgaatgtaggaaacaaccattccagagagccattggtccagaagaggagatcatgcaaattttaagcagctggtttccagaagagggatacatgggcaggattgtsttaaaaacccagcaggaaaacctagaagagaaaaacattgttcaagatgacaaagaggtgatcttgagctcagaggaggagagtttctttgtccaagtgcatgatgtttctccagagcaacctcgaacagtcatcaaagcaccccgcgtcagcactgcacaggatgtcattcagcagaccttatgcaaagccaaatattcctacagcatcctgagcaaccccaatccaagcgactatgtgcttttggaagaggtggtgaaagacactaccaacaagaagactaccacaccaaagtcctctcagcgggtccttctggatcaggagtgtgtgtttcaagcccaaagcaagtggaaaggtgcaggaaaattcatccttaagctaaaggagcaggtgcaggcatctcgagaagataaaaagaaaggcatttctttcgcaagtgaactcaagaagctcaccaagtcaactaaacagccccgaggacttacatcaccttctcagctcttgacctcagaaagtatccaaaccaaggaggagaaacctgtgggtggcttgtcctccagtgacacaatggattaccgacagtgactaasggcagcatgtttaacccaggtgaagatctttaagcaagaagttaaagagtgaacatggtggaaaaaatataattattttcatcagacttaaactggaaattgatgatttctgaactgaagccttcacacatgtgagatccatgctgaggagaagcaaaatggcacagggctagttgccaccaaccaatttactgatgaatgaagcccaggggactgccattttataaatgtcagcagttggaaaaatcgtcacgaattgacttagagcaagggtcagcaagcttgtctgtaaagggccaaacagtaaatattttagggctgggggccataaaatatgttgcaaccacccaattctgccattgtagtgcaaaagcagccatagacaacacatacatgaacgaacgtggctgtattccaataaaactttatttatggacactgaaattggaatttcatatatttttcacatgtcacaaatactcttgttttgactttttttcaaccatttaaaaacttaaaaactattcttaattcaggggccatacaaaaacaggtggcaggctagatttggcccaaggaccttaatttgccaacacaactaagagaagagaactgggaacaaggagcacaaagatctgaaaacaggaaaggaagtttagccatacattttatggccgagaattagaagcttagaattagaagctttggggcatttcaagtgtaaatatgtcctataacataagagtcattaaaattcaatttagttcctgtattgtgtaccacagtgcactcctctttaggatttttttacatatagaaataatattgggttttttttaaggttattgcctattcagttaatagggttgctttaaaaaaggttattg

SEQ ID NO: 106 - DNA, 7609 bp, Homo sapiens
  misc_feature (1)...(7609): n = A,T,C or G, or insertion/deletion polymorphism (see Tables 1-2)
atctaccaccttaaaaccctgatctagaaaaaatatatattcatgataggaagttataactaagaaaatttatttgcctcttaatgctcctgaatgaaagraattatccctttgttctttgggaggacttgtgtatctgagattgttgtaataatcagtcattttattaaaaccttgacatgatcaccagggaggaaaaatagagcaatagtcaaaacctgtgtgttagtccaagatgacttctgaagaaatgacagcttctgttctcatacctgtgactcagagaaaagtggtttctgcccagtcggctgcagatgaaagtagtgaaaaggtctcagacatcaatatttcaaaagcacatactgtcagacgaagtggggagacttctcataccatctcacaactgaacaaacttaaagaagaaccttctggaagcaacttgccaaagattctctcaatagcgagggagaaaatagtgagtgatgagaacagtaatgaaaaatgttgggagaaaatcatgccagattctgcgaaaaaccttaacattaactgcaacaacatattgagaaaccatcagcatggccttcctcagagacaattttatgaaatgtacaactctgttgctgaggaagacttgtgtttagaaactggaattccttctccactggaaagaaaggtgttccctggaattcaactggaactagacagaccttccatgggcattagtcctttaggaaatcagtcagtgatcatagagacaggcagagcacaccctgacagcagaagggcagtatttcattttcattatgaagttgacagaagaatgtcagacactttctgtaccctatcagaaaacttaattttagacgattgtggaaattgtgtaccactacctgggggtgaggagaagcaaaagaaaaactatgtggcatatacctgtaaactgatggaattggccaaaaattgtgataataagaatgagcagctgcagtgtgatcattgtgacaccttgaatgataaatacttttgctttgaaggctcttgygagaaggttgacatggtatattcaggtgatagcttttgtaggaaagactttactgacagtcaagctgccaagacctttttgagccattttgaggacttccctgataattgtgatgatgtagaagaagacgcttttaaaagcaaaaaggarcgatccactttgttagtcaggagattctgtaaaaatgacagagaagttaagaaatctgtgtatactggaacaagagcaattgtgagaactctgccttctggccacattgggctgactgcatggagttacatagatcagaagagaaatggtcccttactgccttgtgggagagtaatggaacccccgtcaacagtggagataaggcaagatgggagccaacgtctgtcagaagcccagtggtatcctatctacaatgcagtgagaagagaagaaacagaaaatacagttggatctctactccatttcctcaccaagctcccagcctccgagacagcccatggaaggataagcgttggtccatgcttaaagcaatgtgtccgagacactgtatgtgagtatcgcgccaccctccaaaggacttcaatatcgcagtacatcaccggtwctctcctagaagcaaccacgtctttgggagcaagaagtggccttctcagtacttttggaggatccactggacgaatgatgctgaaagaacgccagccaggcccctctgtggccaattccaatgccctcccttcaagttcagctgggatcagcaaggagctgatcgatctgcagcctctcatccagttcccagaggaagtcgccagcatcctgatggagcaagagcagactatttacckcagggtcttgccagtcgactacctttgcttcttaacacgggacttgggcactcctgaatgccagagctccttgccctgcctcaaagcatccatctcagcgtcgattcttaccactcagaatggagagcacaatgcccttgaagatctggtgatgaggtttaatgaggtgagctcctgggtgacatggctgatcctcacggcaggctccatggaggagaagcgagaagtcttttcatatttggtgcatgtggccaaatgctgctggaacatgggcaactacaacgctgtcatggagttcttggctggcctcaggtcaagaaaagttttaaaaatgtggcagttcatggaccagtctgatattgagaccatgaggagcctgaaggatgctatggcccagcatgagtcctcttgtgagtacagaaaggtggtgacacgtgccctgcacatccctggctgtaaggtggttccattctgtggggtgtttctgaaggagctctgtgaagtgcttgacggcgcctccggtctcatgaagctttgcccgcggtacaattcccaagaagaaactttagagtttgtagcagattacagtggacaagataatttcttacaacgagtgggacaaaatggcttaaagaattcggagaaggagtccactgtcaacagcatctttcaggtcatccggagctgcaatcgaagtctggagacagacgaggaggacagccccagtgaagggaacagctccaggaaaagctccttgaaggataaaagccgatggcagtttataattggagatttgttggattcagacaatgacatctttgagcaatccaaagaatacgactctcatggttcagaggactcacagaaggccttcgaccatgggacggagctcatcccttggtacgtgctgtccatccaagccgatgtgcaccagttcctgctgcagggggccacggtcatccactacgaccaggacacacacctctctgcccgctgcttcctccagcttcagcccgacaatagcaccttgacctgggtaaagcccacaactgcctccccagccagcagtaaagcaaaacttggtgtacttaataacacagctgagcctggaaaattcccactactgggtaatgctggattaastagcctgacggaaggggtcttggatctttttgcagtgaaggctgtatacatgggccaccctggcattgatatacacactgtgtgtgttcagaacaaactgggtagcatgttcctgtcagagactggtgtgacattgctctatgggcttcagaccacagacaacagattattgcacttcgtggcaccaaagcacacagctaaaatgctcttcagcggattattggaactcactagagctgtgagaaagatgaggaaattccctgaccaaagacagcagtggctgcggaaacagtacgtcagcctttatcaggaggatggacggtatgaaggcccaactttggctcaygctgtggagttgtttggtggcagacggtggagtgctcgaaaccccagccccggaacatcagcaaagaatgctgagaagcccaatatgcagagaaacaataccctgggcataagcactaccaagaaaaagaagaaaatcctcatgagggktgagagtggagaggtaactgacgatgagatggcaacccgaaaggccaagatgcacaaagagtgtcgaagccggagtggttctgatcctcaagacattaatgaacaagaagaatcagaggtgaatgccatcgctaaccctccaaaccccctcccttccagaagagcccactctttgaccacagctgggtcccccaacttggctgccgggacgtcatctcccatcaggccagtgtcctcccctgtgctgtcttcttcaaacaagagcccatccagtgcttggagcagtagtagctggcacgggcggatcaaaggcggcatgaagggatttcagagcttcatggtttcagatagcaacatgagttttgttgaatttgttgagctgttcaaatcattcagtgtcaggagccgcaaggacctgaaggatctgtttgatgtctatgcagtgccctgcaaccgatctggctccgagtcagccccactctacaccaacctgacaattgatgaaaacaccagcgatcttcagcctgacctagatctgttgaccagaaatgtctcggatttggggttgttcattaagagtaaacagcagctatcggacaaccagaggcagatatctgatgccattgctgctgcaagcattgtgacaaatggcactgggattgagagcacatctctgggcatttttggggtgggcatacttcagctcaacgatttcctcgtgaattgccaaggagaacactgcacttatgatgaaatcctcagcatcatccagaagttcgagcctagcatcagtatgtgtcatcagggactaatgtcatttgaagggtttgccaggtttctgatggataaagaaaattttgcctcaaaaaatgatgagtcacaggagaacattaaagaactgcagctacccctctcatactattacatcgaatcttcgcacaatacctacctcacgggccatcagctcaaaggagaatcctcrgtagaactctacagccaggtccttttgcaaggctgtcgaagtgtagaattggactgctgggacggagacgatgggatgcccatcatttatcatggacatacgccgacaaccaagatccccttcaaggaagtggttgaagccattgatcgcagtgccttcatcaactctgacctgccaatcatcatatcgattgagaaccactgttcattgcctcagcaacgaaaaatggcagaaattttcaagactgtgtttggagaaaagctggtgactaaattcttatttgagactgatttctcagatgatccaatgcttccttcacctgaccaactcagaaagaaagttcttcttaaaaacaagaagctaaaagcccatcagacgccagtggatatcttaaagcaaaaggctcatcagttagcatctatgcaagtgcaggcttataatggtgggaatgccaacccccsacctgccartaatgaggaagaggaagatgaggaggacgaatatgattatgactatgaatccctttctgatgacaacattctggaagacagacctgaaaataaatcatgtaatgacaagcttcagtttgaatataatgaagaaatcccaaagaggataaagaaagcagataactctgcttgcaacaaaggaaaggtttatgatatggaactgggagaagaattttatcttgatcagaataaaaaggaaagcagacagattgcaccagagctttctgaccttgtaatctatcgtcaagcagtaaaatttccaggactgtcaactctaaatgcatctggctctagcagaggaaaagaaaggaaaagcaggaagtccatttttggcaacaatccgggcagaatgagcccaggggagacagcatcatttaacaaaacatctggaaaaagttcctgtgaaggcattcgacagacctgggaggaatcttcttcccccctcaacccaaccacgtccctcagtgctatcattagaactcccaaatgttatcatatctcgtcgctgaatgaaaatgccgccaaacgtctgtgtcgcaggtattctcagaaactgayccagcacaccgcctgtcagctgctgagaacttaccctgctgccacccgcatcgactcttccaacccgaaccccctcatgttctggctccatgggatacagcttgtggcactcaactaccagactgatgatctccctttacatttaaatgctgcaatgtttgaggcaaatggtggttgtggttatgtattgaaacctccagttctgtgggacaagaactgccccatgtatcagaagttttctccactagaaagagatctggacagcatggatcctgcagtctattctttaactattgtctctggtcagaatgtgtgccccagtaatagcatgggaagccygtgcattgaagtcgacgtcctgggcatgcctctggacagctgccatttccgcacaaagcccatccatcgaaacaccctgaaccccatgtggaacgagcagtttctgttccncgttcacttcgaagatcttgtatttcttcgttttgcagttgtggaaaacaatagttcagcggtaactgctcagagaatcattccactgaaagctttaaaacgaggatatcgacatcttcagctgcgaaaccttcacaatgaagtcttggagatttctagtttattcattaacagcagaaggatggaagaaaattcctctggcaataccatgtcagcctcttcgatgtttaatacagaagaaagaaaatgtttgcagactcacagagtcacggtgcatggggtcccagggccagagccctttaccgttttcactattaatggaggcaccaaggcaaagcagcttctgcagcaaattctgacaaatgaacaagacatcaaacctgttaccacagactattttttgatggaagaaaaatattttatatctaaagaaaagaatgaatgtaggaaacaaccattccagagagccattggtccagaagaggagatcatgcaaattttaagcagctggtttccagaagagggatacatgggcaggattgtsttaaaaacccagcaggaaaacctagaagagaaaaacattgttcaagatgacaaagaggtgatcttgagctcagaggaggagagtttctttgtccaagtgcatgatgtttctccagagcaacctcgaacagtcatcaaagcaccccgcgtcagcactgcacaggatgtcattcagcagaccttatgcaaagccaaatattcctacagcatcctgagcaaccccaatccaagcgactatgtgcttttggaagaggtggtgaaagacactaccaacaagaagactaccacaccaaagtcctctcagcgggtccttctggatcaggagtgtgtgtttcaagcccaaagcaagtggaaaggtgcaggaaaattcatccttaagctaaaggagcaggtgcaggcatctcgagaagataaaaagaaaggcatttctttcgcaagtgaactcaagaagctcaccaagtcaactaaacagccccgaggacttacatcaccttctcagctcttgacctcagaaagtatccaaaccaaggaggagaaacctgtgggtggcttgtctccagtgacacaatggattaccgacagtgactaagsgcagcatgtttaacccaggtggagatctttaagcaagaagttaaagagtgaacatggtggaaaaaatataattattttcatcagacttaaactggaaattgatgatttctgaactgaagccttcacacatgtgagatccatgctgaggagaagcaaaatggcacagggctagttgccaccaaccaatttactgatgaatgaagcccaggggactgccattttataaatgtcagcagttggaaaaatcgtcacgaattgacttagagcaagggtcagcaagcttgtctgtaaagggccaaacagtaaatattttagggctgggggccataaaatatgttgcaaccacccaattctgccattgtagtgcaaaagcagccatagacaacacatacatgaacgaacgtggctgtattccaataaaactttatttatggacactgaaaaaaaaaaaaaaaaaaaa

SEQ ID NO: 107 - DNA, 435 bp, Homo sapiens
ggcctaacttatgtgtcatgcaaaggatggctcttggaaaaatgcaaagaagcargggccgctaagggagagatgtgaaggtcaaggaagctctgagctcctgacagccgcccttccagccttctcctgccttccatagagagatgctatggactcttggtccagagactcaaattcaaggaaaagaagaggcaacatktgcagtgttgatccttgagttgaacaaagagtggtcaggagaagaaaccaacaagaaatgtaacctacctcyagaactcaggaactcaggtacccttaaggrtatcagaaacaatgaaatatggattggcagaagcatcttcaccaccatcttcagatgtaattaatgcagctgttgaatttggttgactatccacctataattaccacattgcccattacagatttttgctgcct

SEQ ID NO: 108 - DNA, 6638 bp, Homo sapiens
gctttttataactatgatgccagaggagcggatgaactttctttacagatcggagacactgtgcacatcttagaaacatatgaagggtggtaccgaggttacacgttacgaaaaaagtctaagaagggtatatttcctgcttcatatattcatcttaaagaagcgatagttgaaggaaaagggcaacatgaaacagtcatcccgggtgacctccccctcatccaggaagtcaccacgacactccgagagtggtccaccatctggaggcagctctacgtgcaagataacagggagatgtttcgaagtgtgcggcacatgatctatgaccttattgaatggcgatcacaaattctttctggaactctgcctcaggatgaactcaaagaactgaagaagaaggtcacagccaaaattgattatggaaacagarttctagatttggacctggtggttagagatgaagatgggaatattttggatccagaattaactagcacgattagtctcttcagagctcatgaaatagcttctaaacaagtggaggaaaggttacaagaggaaaaatctcaaaagcagaacatagatattaacagacaagccaagtttgctgcaaccccttctctggccttgtttgtgaacctcaaaaatgtggtttgtaaaataggagaagatgctgaagtcctcatgtctctatatgaccctgtggagtccaaattcatcagtgagaactacctggttcgctggtccagttcaggattacctaaagacatagacagattacataatttgcgagccgtgtttactgacctcggaagcaaagacctgaaaagggagaaaatcagttttgtctgtcagattgttcgcgtgggtcgcatggagctgagggacaacaacaccaggaaactgacctcggggttgcggcgaccttttggagtggctgtgatggatgtaacagatataatmaatggaaaagtagatgatgaagataagcagcatttcattccctttcagccggtggcaggggagaatgacttccttcagactgttataaacaaagtcatcgctgccaaagaagtcaaccacaaggggcagggtttgtgggtaacattgaaattacttcctggagatatccatcagatccgaaaagagtttccgcatttagtggacaggaccacagctgtggctcgaaaaacagggtttccggagataatcatgcctggtgatgttcgaaatgatatctaygtaacattagttcaaggagattttgataaaggaagcaaaacaacagcgaagaacgtggaggtcacggtgtctgtgtacgatgaggatgggaaacgattagagcatgtgattttcccgggtgctggtgatgaagcratttcagagtacaaatctgtgatttactaccaagtaaagcagccacgctggtttgagactgttaaggtggccattcccatcgaggacgttaaccgcagtcaccttcggtttaccttccgccacaggtcatcacaggactctaaggataaatctgagaaaatatttgcactagcatttgtcaagctgatgagatacgatggtaccmccctgcgagacggagagcacgatcttatcgtctataaggccgaagcraagaagctggaagatgctgccacgtacttgagtctgccctccacgaaggcagagttggaagaaaagggccactcggccaccggcaagagcatgcagagccttgggagctgcaccattagcaaggactccttccagatctccacgctcgtgtgctccaccaaactgactcagaacgtggaccttctggggctcttgaaatggcgctccaacaccagcctgctgcagcagaacttgaggcagctgatgaaagtcgatggtggtgaagtagtgaagtttcttcaggacacgttggatgccctcttcaacatcatgatggagaactcagagagtgagacttttgacacgttagtctttgatgctctggtatttatcattggactgattgctgatagaaaatttcagcattttaatcctgttttggaaacttacattaagaaacactttagtgcaacgttagcctacacgaagttgacaaaagtgttgaagaactacgtggacggtgctgagaagccgggagtaaatgagcagctgtacaaagccatgaaagcgctagaatccatcttcaagttcatcgtgcgctccaggatcctgttcaatcaactgtatgaaaacaagggagaggctgacttcgtggaatctttgctgcagctcttcaggtccatcaatgacatgatgagcagcatgtcagaccagaccgtccgggtgaagggggcagcactgaaatacttaccaacgatcgtcaacgatgtgaaattggtgtttgatcccaaagagctcagcaaaatgwttactgaattcatcctcaatgttcccatgggcttgctgaccatccagaaactctactgcttgatcgaaatygtccacagtgacctcttcacacagcatgactgcagagagatcctgcttcccatgatgascgatcagctcaagtaccatctggagagacaggaggacctggaggcctgctgtcagctgctcagccacatcctggaggtgctgtacaggaaggacgtggggccaacccagaggcacgtccagattatcatggagaaacttctccggaccgtgaaccgaaccgtcatttccatgggacgrgattctgaactcattggaaacttcgtggcttgcatgacagctattttacgacaaatggaagattaccattatgcccacttgatcaagacttttgggaaaatgaggactgatgtggtagatttcctaatggaaacattcatcatgtttaagaacctcattggaaagaacgtttaccccttcgactgggtgatcatgaacatggtgcaaaataaagtcttcctgcgagcaattaatcagtatgcagatatgctgaacaaaaaatttctggatcaagccaactttgagctacagctgtggaacaactacttycacctggctgttgctttccttactcaagagtccctgcaactggagaatttttcaagtgccaagagagccaaaatccttaacaagtacggagatatgaggagacagattggctttgaaatcagagacatgtggtacaaccttggtcaacacaagataaagttcattccagaaatggtgggcccaatattagaaatgacattaattcccgagacggagctgcgcaaagccaccatccccatcttctttgatatgatgcagtgtgaattccattcracccgaagcttccaaatgtttgaaaatgagatcatcaccaagctggatcatgaagtcgaaggaggcagaggagacgaacagtacaaagtgttatttgataaaatccttctrgaacactgcaggaagcacaaatacctcgccaaaacaggagaaacttttgtaaaactcgttgtgcgcttaatggaaaggcttttggattatagaaccatcatgcacgacgagaacaaagaaaaccgcatgagctgcaccgtcaatgtgctgaayttctacaaagaaattgaaagagaagaaatgtatataaggtatttgtacaagctctgtgacctgcacaaggagtgtgataactacaccgaagcggcttacaccttgcttctccatgcaaagcttcttaagtggtcggaggatgtgtgtgtggcccacctcacccagcgggacgggtaccaggccaccacgcagggacagctgaaggagcagctctaccaggaaatcatccactacttcgacaaaggcaagatgtgggaggaggccattgccttgggcaaggagctagccgagcagtatgagaacgaaatgtttgattatgagcaactcagcgaattgctgaaaaaacaggctcagttttatgaaaacatcgtcaaagtgatcaggcccaagcctgactattttgctgttggctactacggacaagggttccccacattcctgcggggaaaagttttcatttaccgagggaaagagtatgagcgccgggaagattttgaggctcggctcttaactcagtttccaaacgccgagaaaatgaagacaacatctccaccaggcgaygatattaaaaaytctcctggccagtatattcagtgcttcacagtgaagcccaaactcgatctgcctcctaagtttcacaggccagtgtcagagcagattgtaagtttttacagggtgaacgaggtccagcgatttgaatattctcggccaatccggaagggagagaaaaacccagacaatgaatttgcgaatatgtggatcgagagaaccatatayacaactgcmtataaattacctggaattttaaggtggtttgaggtcaagtctgttttcatggtggaaatcagccccctggagaatgccatygagaccatgcagctgacgaacgacaagatcaacagcatggtgcagcagcacctggatgaccccagcctgcccatcaacccgctctccatgctcctgaacggcatygtggacccagctgtcatggggggcttcgcaaactaygaaaaggccttctttacagaccggtacctgcaggagcaccctgaggcccatgaaaagatcgagaagctcaaggacctgattgcttggcagattccttttctggccgaagggatcagaatccatggagacaaagtcacggaggcactgaggccgttccacgagaggatggaggcctgtttcaaacagctgaaggaaaaggtggagaaagagtacggcgtccgaatcatgccctcaagtctggatgatagaagaggcagccgcccccggtccatggtgcggtccttcacratgccttcctcatcccgccctctgtctgtggcctctgtctcttccctctcatcggacagcaccccttccagaccaggctccgacgggtttgccctggagcctctcctgccaaagaaaatgcactccaggtcccaggacaagctggacaaggatgacctggagaaggagaagaaggacaaraaraarraaaaaaggaacagcaaacatcaagagatatttgagaaagaatttaaacccaccgacatttccctgcagcagtctgaggctgtgatcctttcggaaaygataagtcccctgcggccccagagaccraagagccaggtgatgaacgtcattggaagcgaaaggcgcttctyrgtgtccccctcgtcaccgtcctcccagcaaacaccccctccagttacaccaagrgccaagctcagcttcagcatgcagtcgagcttggagctgaacggcatgacggggrcggacgtggccgatgtcccaccccctctgcctctcaaaggcagcgtggcagattacgggaatttgatggaaaaccaggacttgctgggctcgccaacacctccacctccccctccacaccagaggcatctgccacctccactgcccagcaaaactccgcctcctccccctccaaagacaactcgcaagcagrcatcggtggactcygggatcgtgcagtgacrtcgcaagsctctctggaaagagtgtgctgcccctccccatctccatgccctctccttctgtgtcccctgagtctgctgtttacctcattgggcctgtgatgttaacatttcgtgckactgctttttcttcaaaggagttcagttctcaccatggagtgagtggcctttagcgtcatggagcaaggtgggtctgggaggtagatatgggtccgggatgtgcyatcgtagttaycagagttgggggcctctgagtgtgtctggctctgagagagtctgagtcttgcccaaacattctttctttttgtgccaaatgacttgcatttgcaaagagctcaattgctctgagctcagccaagtaggagaggctaggccatcactcttrggaagctgtgtagtgatgatgtataagaatcctcctcactgtcatgggatgttgtatccagcccctccttgttccagccggtggtgtgacttcgttggttgaggtgtgtctccaacctacatcagaccatgaagttcaacccctccagggaagctcctgatttcccctgcataattgaaaataggatatttctcagctattgaacagttactaatttatggggtggaaacagcattaagaatactgaatcaaatggaaaaacaaatgaatacaggaagataagtgttcgttcttttctgaaaaagagtatgtgtaccacaagagctggttttaattgggtgaattgtttttgtcctcattctgtacagaaatttgtatatatgatggttcttagaacttgttttaatttttgtggtccttctgtttattataataggcgtccaccaatgattatccatatgtgttcttaatttttaactgctggaagtgttaaaacacacacacacacacacacacacatttttttttysagaactccaaagtcctgaaaattttggtggacaatgatttttaaaaaactaactttgtataacctaatatttgtattctctcatctatatttttttattcactataatcatgatactcttctaatagacttaaaagttaatcattgacaacgaaaaataaaatgttatttt

SEQ ID NO: 109 - DNA, 6519 bp, Homo sapiens
gcacgagcggctccggcggcgccatgacgcgctgggtgcccaccaagcgcgaggagaagtacggcgtggctttttataactatgatgccagaggagcggatgaactttctttacagatcggagacactgtgcacatcttagaaacatatgaagggtggtaccgaggttacacgttacgaaaaaagtctaagaagggtatatttcctgcttcatatattcatcttaaagaagcgatagttgaaggaaaagggcaacatgaaacagtcatcccgggtgacctccccctcatccaggaagtcaccacgacactccgagagtggtccaccatctggaggcagctctacgtgcaagataacagggagatgtttcgaagtgtgcggcacatgatctatgaccttattgaatggcgatcacaaattctttctggaactctgcctcaggatgaactcaaagaactgaagaagaaggtcacagccaaaattgattatggaaacagarttctagatttggacctggtggttagagatgaagatgggaatattttggatccagaattaactagcacgattagtctcttcagagctcatgaaatagcttctaaacaagtggaggaaaggttacaagaggaaaaatctcaaaagcagaacatagatattaacagacaagccaagtttgctgcaaccccttctctggccttgtttgtgaacctcaaaaatgtggtttgtaaaataggagaagatgctgaagtcctcatgtctctatatgaccctgtggagtccaaattcatcagtgagaactacctggttcgctggtccagttcaggattacctaaagacatagacagattacataatttgcgagccgtgtttactgacctcggaagcaaagacctgaaaagggagaaaatcagttttgtctgtcagattgttcgcgtgggtcgcatggagctgagggacaacaacaccaggaaactgacctcggggttgcggcgaccttttggagtggctgtgatggatgtaacagatataatmaatggaaaagtagatgatgaagataagcagcatttcattccctttcagccggtggcaggggagaatgacttccttcagactgttataaacaaagtcatcgctgccaaagaagtcaaccacaaggggcagggtttgtgggtaacattgaaattacttcctggagatatccatcagatccgaaaagagtttccgcatttagtggacaggaccacagctgtggctcgaaaaacagggtttccggagataatcatgcctggtgatgttcgaaatgatatctaygtaacattagttcaaggagattttgataaaggaagcaaaacaacagcgaagaacgtggaggtcacggtgtctgtgtacgatgaggatgggaaacgattagagcatgtgattttcccgggtgctggtgatgaagcratttcagagtacaaatctgtgatttactaccaagtaaagcagccacgctggtttgagactgttaaggtggccattcccatcgaggacgttaaccgcagtcaccttcggtttaccttccgccacaggtcatcacaggactctaaggataaatctgagaaaatatttgcactagcatttgtcaagctgatgagatacgatggtaccmccctgcgagacggagagcacgatcttatcgtctataaggccgaagcraagaagctggaagatgctgccacgtacttgagtctgccctccacgaaggcagagttggaagaaaagggccactcggccaccggcaagagcatgcagagccttgggagctgcaccattagcaaggactccttccagatctccacgctcgtgtgctccaccaaactgactcagaacgtggaccttctggggctcttgaaatggcgctccaacaccagcctgctgcagcagaacttgaggcagctgatgaaagtcgatggtggtgaagtagtgaagtttcttcaggacacgttggatgccctcttcaacatcatgatggagaactcagagagtgagacttttgacacgttagtctttgatgctctggtatttatcattggactgattgctgatagaaaatttcagcattttaatcctgttttggaaacttacattaagaaacactttagtgcaacgttagcctacacgaagttgacaaaagtgttgaagaactacgtggacggtgctgagaagccgggagtaaatgagcagctgtacaaagccatgaaagcgctagaatccatcttcaagttcatcgtgcgctccaggatcctgttcaatcaactgtatgaaaacaagggagaggctgacttcgtggaatctttgctgcagctcttcaggtccatcaatgacatgatgagcagcatgtcagaccagaccgtccgggtgaagggggcagcactgaaatacttaccaacgatcgtcaacgatgtgaaattggtgtttgatcccaaagagctcagcaaaatgwttactgaattcatcctcaatgttcccatgggcttgctgaccatccagaaactctactgcttgatcgaaatygtccacagtgacctcttcacacagcatgactgcagagagatcctgcttcccatgatgascgatcagctcaagtaccatctggagagacaggaggacctggaggcctgctgtcagctgctcagccacatcctggaggtgctgtacaggaaggacgtggggccaacccagaggcacgtccagattatcatggagaaacttctccggaccgtgaaccgaaccgtcatttccatgggacgrgattctgaactcattggaaacttcgtggcttgcatgacagctattttacgacaaatggaagattaccattatgcccacttgatcaagacttttgggaaaatgaggactgatgtggtagatttcctaatggaaacattcatcatgtttaagaacctcattggaaagaacgtttaccccttcgactgggtgatcatgaacatggtgcaaaataaagtcttcctgcgagcaattaatcagtatgcagatatgctgaacaaaaaatttctggatcaagccaactttgagctacagctgtggaacaactacttycacctggctgttgctttccttactcaagagtccctgcaactggagaatttttcaagtgccaagagagccaaaatccttaacaagtacggagatatgaggagacagattggctttgaaatcagagacatgtggtacaaccttggtcaacacaagataaagttcattccagaaatggtgggcccaatattagaaatgacattaattcccgagacggagctgcgcaaagccaccatccccatcttctttgatatgatgcagtgtgaattccattcracccgaagcttccaaatgtttgaaaatgagatcatcaccaagctggatcatgaagtcgaaggaggcagaggagacgaacagtacaaagtgttatttgataaaatccttctrgaacactgcaggaagcacaaatacctcgccaaaacaggagaaacttttgtaaaactcgttgtgcgcttaatggaaaggcttttggattatagaaccatcatgcacgacgagaacaaagaaaaccgcatgagctgcaccgtcaatgtgctgaayttctacaaagaaattgaaagagaagaaatgtatataaggtatttgtacaagctctgtgacctgcacaaggagtgtgataactacaccgaagcggcttacaccttgcttctccatgcaaagcttcttaagtggtcggaggatgtgtgtgtggcccacctcacccagcgggacgggtaccaggccaccacgcagggacagctgaaggagcagctctaccaggaaatcatccactacttcgacaaaggcaagatgtgggaggaggccattgccttgggcaaggagctagccgagcagtatgagaacgaaatgtttgattatgagcaactcagcgaattgctgaaaaaacaggctcagttttatgaaaacatcgtcaaagtgatcaggcccaagcctgactattttgctgttggctactacggacaagggttccccacattcctgcggggaaaagttttcatttaccgagggaaagagtatgagcgccgggaagattttgaggctcggctcttaactcagtttccaaacgccgagaaaatgaagacaacatctccaccaggcgaygatattaaaaaytctcctggccagtatattcagtgcttcacagtgaagcccaaactcgatctgcctcctaagtttcacaggccagtgtcagagcagattgtaagtttttacagggtgaacgaggtccagcgatttgaatattctcggccaatccggaagggagagaaaaacccagacaatgaatttgcgaatatgtggatcgagagaaccatatayacaactgcmtataaattacctggaattttaaggtggtttgaggtcaagtctgttttcatggtggaaatcagccccctggagaatgccatygagaccatgcagctgacgaacgacaagatcaacagcatggtgcagcagcacctggatgaccccagcctgcccatcaacccgctctccatgctcctgaacggcatygtggacccagctgtcatggggggcttcgcaaactaygaaaaggccttctttacagaccggtacctgcaggagcaccctgaggcccatgaaaagatcgagaagctcaaggacctgattgcttggcagattccttttctggccgaagggatcagaatccatggagacaaagtcacggaggcactgaggccgttccacgagaggatggaggcctgtttcaaacagctgaaggaaaaggtggagaaagagtacggcgtccgaatcatgccctcaagtctggatgatagaagaggcagccgcccccggtccatggtgcggtccttcacratgccttcctcatcccgccctctgtctgtggcctctgtctcttccctctcatcggacagcaccccctccagaccaggctccgacgggtttgccctggagcctctcctgccaaagaaaatgcactccaggtcccaggacaagctggacaaggatgacctggagaaggagaagaaggacaaraaraarraaaaaaggaacagcaaacatcaagagatatttgagaaagaatttaaacccaccgacatttccctgcagcagtctgaggctgtgatcctttcggaaaygataagtcccctgcggccccagagaccraagagccaggtgatgaacgtcattggaagcgaaaggcgcttctyrgtgtccccctcgtcaccgtcctcccagcaaacaccccctccagttacaccaagrgccaagctcagcttcagcatgcagtcgagcttggagctgaacggcatgacggggrcggacgtggccgatgtcccaccccctctgcctctcaaaggcagcgtggcagattacgggaatttgatggaaaaccaggacttgctgggctcgccaacacctccacctccccctccacaccagaggcatctgccacctccactgcccagcaaaactccgcctcctccccctccaaagacaactcgcaagcagrcatcggtggactcygggatcgtgcagtgacrtcgcaagsctctctggaaagagtgtgctgcccctccccatctccatgccctctccttctgtgtcccctgagtctgctgtttacctcattgggcctgtgatgttaacatttcgtgckactgctttttcttcaaaggagttcagttctcaccatggagtgagtggcctttagcgtcatggagcaaggtgggtctgggaggtagatatgggtccgggatgtgcyatcgtagttaycagagttgggggcctctgagtgtgtctggctctgagagagtctgagtcttgcccaaacattctttctttttgtgccaaatgacttgcatttgcaaagagctcaattgctctgagctcagccaagtaggagaggctaggccatcactcttrggaagctgtgtagtgatgatgtataagaatcctcctcactgtcatgggatgttgtatccagcccctccttgttccagccggtggtgtgacttcgttggttgaggtgtgtctccaacctacatcagaccatgaagttcaacccctccagggaagctcctgatttcccctgcataattgaaaataggatattctcagctattgaacagttactaatttatggggtggaaacagcattaagaatactgaatcaaatggaaaaacaaatgaatacaggaagataagtgttcgttcttttctgaaaaaagagtatgtgtaccacaagagctggttttaattgggtgaattgtttttgtcctcattctgtacagaaatttgtatatatgatggttcttagaacttgttttaatttttgtggtccttctgtttattataataggcgtccaccaatgattatccatatgtgttcttaatttttaactgctggaagtgttaaaacacacacaccccggaattc

SEQ ID NO: 110 - DNA, 1340 bp, Homo sapiens
gccgcggtcgacccctccgggakgggggccagggcagcctccgcggctatcccgggagtcctgctccgacaccacctccacaggggaagccgctcggagagacgcagggacccaggcaagggatgcgggcaaacgcgccaagggttcrgcagaggggcgtgaccgccagttggccgggctgagcgaggcgccagagggaagcctgcaaggtacgtctgcgagagccgggtgcgggcgcggcaggggaaaaggggggcgctsrctctcttaccgccaggtccggattgcggctgtccctgtgtgacacggctcggatgacccccgctcgccagcttcgccagccgcgtccgctctcccagcgctccgaacgtgcctcgtcgccgaccgccacacacaggaaccgcttacccaccagctctgcccgcgtctctaccgccatagctgtcgctgccgaagcggccgctgcytcctccagtgcgagggaaccgatgaaacctcactcctaccggccgctcatgctgaggagagcggaccgggacacagcagcggacccgaaagagcgcagactcgggacgaaccggccgctctgccccggacacagcgacctcgggccctccccgcaaacactcctttggactcccagattcgcagccttgtgctgcagcgccacacaagaaaactgaaacaaaacccaacgcggccgtcgaagaccccgaggcagcccagccgccgccaccgcgccgcggccagtactgctccgtctccctccccgggcagcggcggcgcgcagcgcgtctccttccgccggcgcgggcggggcagcagccgcgggagggtcggcggaaccaccgcagacggaaagtagtgcccggccctgcggaggcggcagcggccactgggtccgtccagatccagaggcggcggcggcggcggcagcgggagacgaaaaaatgaagagggccgcgggaaagtaggcgacagctattcaaagcttttgggggtctacctttgtattcgttgctccctcagaggtggaggtgaggggaaagtgaagtgtagtggttccactctgatcacaaaataaactcctgggttgacgcctcacccgcggtttgatgttcagagcacacagcgcccgccgcctgagttagcctgaattagcagtcccgcagtaacagcagcagagcaggacaacacttctactgaaaastaagccccaaagtcacagcagaaccaaccgttcatgacttcaagggaaaacgagggggaaaatgtgatcctttcattcttctcatttgtggtgatactaattacatgtttaagctattcacagatttaaa

SEQ ID NO: 111 - DNA, 2711 bp, Homo sapiens
  misc_feature (1)...(2711): n = A,T,C or G, or insertion/deletion polymorphism (see Tables 1-2)
acgcacagcagtgacgacacacaaggtttcggggactgagtgggtttcagactttctctcaggatttccgctggcttcaggttccggtcaggcgtcgggacagagcctgatccaggcttcggcggccggtggcagctctcgatcagctctcgcagtcggagaggcggctaaggaaaggtgccacagcagagacgcgaaggagaggccctagaaccttttcaaagaagaatggaagaaaccatgaagcttgctamgatggaagacacagtggagtactgcctgttcctgataccagatgagtcaagggactcagataaacataaagagattcttcagaagtacattgagagaataatcactcngtttgcacctatgctggtcccctacatctggcagaatcagcctttcaatcttaaatataaacctgggaaaggaggtgttcctgctcatatgtttggcgtgacaaagtttggggataacattgaggatgaatggtttattgtttatgtaataaagcagatcacaaaggaatttccagagttagtagcaaggattgaagacaatgatggtgaattcttgttaatagaagctgctgactttctccctaaatggctggatcctgaaaatagcaccaatagggtatttttctgccatggggaattgtgtattatccctgcwccaagaaaatctggagcagaatcttggttacccaccacacccccaacaattccacaagcattgaatataatcacagcacattcagaaaaaatacttgcttcagaatctatacgagctgctgtgrataggcgcatcagagggtaggtcacattcactaaatgtctatatgcacaattggtgcaacaaaggtttgtgccagaccggcggagtggatacaggctgcctcctccatctgatccccagtaccgagcccatgaattgggcatgaaattggctcatggatttgagatcttatgctccaaatgtagcccacatttttctgactgcaagaaatcccttgtgactgcctcaccactctgggccagtttccttgaaagtctgaaaaagaatgattactttaagggactgatagaaggttctgctcagtaccgggaaaggctagaaatggcagagaattacttccagctctcagtagactggccagaaagttctcttgctatgagccctggtgaagaaatcttaaccttattacagacaataccatttgatatagaagaccttaagaaagaagcagctaatcttcccccagaggatgatgaccagtggttagatctctcaccagatcagctggaccagctgctgcaggaagctgttggcaaaaaagaatcygagtctgtttcyaaggaggagaaggagcagaactatgacttaactsaagtctcagagagcatgaaagcyttcatatccaaagtctcaacccacaagggagcagagctgcctcgaraaccttctgargctccaatcacttttgatgcagattcttttcttaattattttgataagattttagggccaaggcctartgagtcagattctgatgatctggatgatgaagactttgaatgtttagatagtgatgatgacttggactttgaaacacacgaacctggcgaagaggcttccctgaaaggaacacttgataatctcaagtcatacatggcccagatggaccaggaactagcacacacctgcatcagcaaaagtttcaccactaggaaccaagtggaacctgtatcccagactaccgataacaattcagatgaggaagatkctggtacgggagaatctgttatggcaccagtagatgtwgacctgaacctggtttcaaatatattggaatcctatagctcccaagctggactggcaggacctgcttccaatcttttacaaagcatgggagtgcagctgcctgacaacaccgrtcacagaccaacaagtaagccaacaaaaaattaaccagcacatttagcttctcttttttctttttaaataaatattgaatatgattctgttcatttctagtttagattactcatttrgtaaaaatgtttcttcattacaagttttacagattgacttctccatgagccccaaatgtggccctcttggcacaagtctttgtgatctcagctgtgggttatacacaggttttgaactcggcagggtagaatctagcccctagacaaccttgagatgaaattcacacacttcatgctaaagacataccctaccacaatatacccttggagtaattctaaatatttaaatttctcccttactgctattcatcctcagatcaaaatttcaagttgacaaatttggatttgaaaactsattcactttttcaatttttttaatgaggcayaacatgcatatggttaagtgcacaaatcttaagtgtacagtcagtgaatttttgcatgtatgtatgtacctgaagcaagatatagaacttatttacttgtaaataacagctatattgatatgtcacataccaaaaaatttaccctttaaattatacaattcagtggtttttagtatatttacaaaattgtgcaaccatccctaccatctaattctagaatattagaaaccccatactcactaatagtctctcattcccttctactcccagcccctagaaaccacwagtctactttctgtctctatggatttgcctattttggatattt

SEQ ID NO: 112 - DNA, 2708 bp, Homo sapiens
  misc_feature (1)...(2708): n = A,T,C or G, or insertion/deletion polymorphism (see Tables 1-2)
acgcacagcagtgacgacacacaaggtttcggggactgagtgggtttcagactttctctcaggatttccgctggcttcaggttccggtcaggcgtcgggacagagcctgatccaggcttcggcggccggtggcagctctcgatcagctctcgcagtcggagaggcggctaaggaaaggtgccacagcagagacgcgaaggagaggccctagaaccttttcaaagaagaatggaagaaaccatgaagcttgctamgatggaagacacagtggagtactgcctgttcctgataccagatgagtcaagggactcagataaacataaagagattcttcagaagtacattgagagaataatcactcngtttgcacctatgctggtcccctacatctggcagaatcagcctttcaatcttaaatataaacctgggaaaggaggtgttcctgctcatatgtttggcgtgacaaagtttggggataacattgaggatgaatggtttattgtttatgtaataaagcagatcacaaaggaatttccagagttagtagcaaggattgaagacaatgatggtgaattcttgttaatagaagctgctgactttctccctaaatggctggatcctgaaaatagcaccaatagggtatttttctgccatggggaattgtgtattatccctgcwccaagaaaatctggagcagaatcttggttacccaccacacccccaacaattccacaagcattgaatataatcacagcacattcagaaaaaatacttgcttcagaatctatacgagctgctgtgrataggcgcatcagaggggtcacattcactaaatgtctatatgcacaattggtgcaacaaaggtttgtgccagaccggcggagtggatacaggctgcctcctccatctgatccccagtaccgagcccatgaattgggcatgaaattggctcatggatttgagatcttatgctccaaatgtagcccacatttttctgactgcaagaaatcccttgtgactgcctcaccactctgggccagtttccttgaaagtctgaaaaagaatgattactttaagggactgatagaaggttctgctcagtaccgggaaaggctagaaatggcagagaattacttccagctctcagtagactggccagaaagttctcttgctatgagccctggtgaagaaatcttaaccttattacagacaataccatttgatatagaagaccttaagaaagaagcagctaatcttcccccagaggatgatgaccagtggttagatctctcaccagatcagctggaccagctgctgcaggaagctgttggcaaaaaagaatcygagtctgtttcyaaggaggagaaggagcagaactatgacttaactsaagtctcagagagcatgaaagcyttcatatccaaagtctcaacccacaagggagcagagctgcctcgaraaccttctgargctccaatcacttttgatgcagattcttttcttaattattttgataagattttagggccaaggcctartgagtcagattctgatgatctggatgatgaagactttgaatgtttagatagtgatgatgacttggactttgaaacacacgaacctggcgaagaggcttccctgaaaggaacacttgataatctcaagtcatacatggcccagatggaccaggaactagcacacacctgcatcagcaaaagtttcaccactaggaaccaagtggaacctgtatcccagactaccgataacaattcagatgaggaagatkctggtacgggagaatctgttatggcaccagtagatgtwgacctgaacctggtttcaaatatattggaatcctatagctcccaagctggactggcaggacctgcttccaatcttttacaaagcatgggagtgcagctgcctgacaacaccgrtcacagaccaacaagtaagccaacaaaaaattaaccagcacatttagcttctcttttttctttttaaataaatattgaatatgattctgttcatttctagtttagattactcatttrgtaaaaatgtttcttcattacaagttttacagattgacttctccatgagccccaaatgtggccctcttggcacaagtctttgtgatctcagctgtgggttatacacaggttttgaactcggcagggtagaatctagcccctagacaaccttgagatgaaattcacacacttcatgctaaagacataccctaccacaatatacccttggagtaattctaaatatttaaatttctcccttactgctattcatcctcagatcaaaatttcaagttgacaaatttggatttgaaaactsattcactttttcaatttttttaatgaggcayaacatgcatatggttaagtgcacaaatcttaagtgtacagtcagtgaatttttgcatgtatgtatgtacctgaagcaagatatagaacttatttacttgtaaataacagctatattgatatgtcacataccaaaaaatttaccctttaaattatacaattcagtggtttttagtatatttacaaaattgtgcaaccatccctaccatctaattctagaatattagaaaccccatactcactaatagtctctcattcccttctactcccagcccctagaaaccacwagtctactttctgtctctatggatttgcctattttggatattt

SEQ ID NO: 113 - DNA, 3043 bp, Homo sapiens
cagcatcgccttttcctcccgtttctccttccactcccagctccacatcctcctcctattctcccctctcccctcttcaaacccccaccttccagttccctcacctcccctttcggctggtcccctggggcttgcagcaagagggagagagagctcctgacaggattgatggtccttccccaccctgtcctctcatccgctccctccccagcaggcacagacatccccctacaaaaggcaggagcccaggctgtgtggaaacagctgctctcagacgcctttccatttgctctctgctggctaggctgggctgtgcctctgctccctcttcctctagctgagagtgggcacctggggtaccgggcccccccacctcattccccatgaatgctgtgggaagtcctgaggggcaggagctgcaaaagctggggagtggagcctgggacaaccccgcctacagtggtcccccttccccacacgggacgctgagagtctgcaccatctccagcacggggcctctccagccccaacccaagaagcctgaagatgaaccccaggagacggcatacaggacccaggtrtccagctgctgcctccatatctgtcaaggcatcagaggactttggggaacaaccctgactgagaacacagctgagaaccgggaactttatatcaagaccaccctgagggagctgttggtatatattgtgttcctggtggacatctgtctactgacctatggaatgacaagctccagtgcttattactacaccaaagtgatgtctgagctcttcttacatactccatcagacactggagtctcctttcaggccatcagcagcatggcggacttctgggattttgcccagggcccactactggacagtttgtattggaccaaatggtacaacaaccagagcctgggccatggctcccactccttcatctactatgagaacatgctgctgggggttccgaggctgcggcagctaaaggtcygcaatgactcctgtgtggtgcatgaagacttccgggaggacattctgagctgctatgatgtctactctccagacaaagaagaacaactcccctttgggcccttcaatggcacagcgtggacataccactcgcaggatgagttggggggcttctcccactggggcaggctcacaagctacagcggaggtggctactacctggaccttccaggatcccracagggtagtgcagaggctctccgggcccttcaggaggggctgtggctggacaggggcactcgagtggtgttcatcgacttctcagtctacaatgccaatatcaatcttttctgtgtcctgaggctggtggtggagtttccagctacaggaggtgccatcccatcctggcaaatccgcacagtcaagctgatccgctatgtcagcaactgggacttctttatcgttggctgtgaggtcatcttctgcgtcttcatcttctactatgtggtggaagagatmctggagctccacattcacyggcttcgctacctcagcagcatctggaacatactggacctggtgrtcatcttgctctccattgtggctgtgggcttccacatattccgaaccctcgaggtgaatcggctcatggggaagctcctgcagcagccaaacacgtatgcagactttgagttcctcgccttctggcagacacagtacaacaacatgaatgctgtcaacctcttcttcgcctggatcaagatattcaagtacatcagcttcaacaaaaccatgacccagctctcctccacgctggcccgctgtgccaaggacatcctgggcttcgccgtcatgttcttcattgktttcttcgcctatgcccaactcggctacctgcttttcgggacccaagtggaaaactttagcactttcatcaagtgcattttcactcagttccggataatcctcggggactttgactacaatgctatcgacaatgccaaccgcatcctgggccctgcctactttgtcacctatgtcttcttcgtcttcttcgtgctcctgaacatgttcctggccatcatcaatgacacatattcagaggtcaaggaggagctggctggacagaaggatgagctgcaactttctgacctcctgaaacagggctacaacaagaccctactaagactgcgtctgaggaaggagagggtttcggatgtgcagaaggtcctgcagggtggggagcaggagatccagtttgaggatttcaccaacaccttaagggaactgggacacgcagagcatgaaatcactgagctcacggccaccttcaccaagtttgacagagatgggaatcgtattctggatgagaaggaacaggaaaaaatgcgacaggacctggaggaagagagggtggccctcaacactgagattgagaaactaggccdatctattgtgagcagcccacaaggcaaatcgggtccagaggctgccagagcaggaggctgggtttcaggagaagaattctacatgctcacaaggagagttctgcagctggagactgtcctggaaggagtagtgtcccagattgatgctgtaggctcaaagctgaaaatgctggagaggaaggggtggctggctccctccccaggcgtgaaggaacaagctatttggaagcacccgcagccagccccagctgtgaccccagacccctggggagtccagggtgggcaggagagtgaggttccctataaaagagaagaggaaghcttagaggagaggagactctcccgtggtgagattccaacgttgcagaggagttaagtgtgaggcactcccggagcaaagtctatgaaggatcttctgcaagaggctgcctcctggtccactgaacctggaaactgagtgggctttaaccaggagataaaaatggagcctgaagggaatcaggcaaggaaatgaactcaggattcagagatctttgaattaatatgtggtgggttctgacattattcttccataagaccatgtgggtttccatggtggctatcaataaaactccttag

SEQ ID NO: 114 - DNA, 3223 bp, Homo sapiens
cagcatcgccttttcctcccgtttctccttccactcccagctccacatcctcctcctattctcccctctcccctcttcaaacccccaccttccagttccctcacctcccctttcggctggtcccctggggcttgcagcaagagggagagagagctcctgacaggattgatggtccttccccaccctgtcctctcatccgctccctccccagcaggcacagacatccccctacaaaaggcaggagcccaggctgtgtggaaacagctgctctcagacgcctttccatttgctctctgctggctaggctgggctgtgcctctgctccctcttcctctagctgagagtgggcacctggggtaccgggcccccccacctcattccccatgaatgctgtgggaagtcctgaggggcaggagctgcaaaagctggggagtggagcctgggacaaccccgcctacagtggtcccccttccccacacgggacgctgagagtctgcaccatctccagcacggggcctctccagccccaacccaagaagcctgaagatgaaccccaggagacggcatacaggacccaggtrtccagctgctgcctccatatctgtcaaggcatcagaggactttggggaacaaccctgactgagaacacagctgagaaccgggaactttatatcaagaccaccctgagggagctgttggtatatattgtgttcctggtggacatctgtctactgacctatggaatgacaagctccagtgcttattactacaccaaagtgatgtctgagctcttcttacatactccatcagacactggagtctcctttcaggccatcagcagcatggcggacttctgggattttgcccagggcccactactggacagtttgtattggaccaaatggtacaacaaccagagcctgggccatggctcccactccttcatctactatgagaacatgctgctgggggttccgaggctgcggcagctaaaggtcygcaatgactcctgtgtggtgcatgaagacttccgggaggacattctgagctgctatgatgtctactctccagacaaagaagaacaactcccctttgggcccttcaatggcacagcgtggacataccactcgcaggatgagttggggggcttctcccactggggcaggctcacaagctacagcggaggtggctactacctggaccttccaggatcccracagggtagtgcagaggctctccgggcccttcaggaggggctgtggctggacaggggcactcgagtggtgttcatcgacttctcagtctacaatgccaatatcaatcttttctgtgtcctgaggctggtggtggagtttccagctacaggaggtgccatcccatcctggcaaatccgcacagtcaagctgatccgctatgtcagcaactgggacttctttatcgttggctgtgaggtcatcttctgcgtcttcatcttctactatgtggtggaagagatmctggagctccacattcacyggcttcgctacctcagcagcatctggaacatactggacctggtgrtcatcttgctctccattgtggctgtgggcttccacatattccgaaccctcgaggtgaatcggctcatggggaagctcctgcagcagccaaacacgtatgcagactttgagttcctcgccttctggcagacacagtacaacaacatgaatgctgtcaacctcttcttcgcctggatcaagatattcaagtacatcagcttcaacaaaaccatgacccagctctcctccacgctggcccgctgtgccaaggacatcctgggcttcgccgtcatgttcttcattgktttcttcgcctatgcccaactcggctacctgcttttcgggacccaagtggaaaactttagcactttcatcaagtgcattttcactcagttccggataatcctcggggactttgactacaatgctatcgacaatgccaaccgcatcctgggccctgcctactttgtcacctatgtcttcttcgtcttcttcgtgctcctgaactgtgctgaaaggctgggctctggggaccctgagaggcagggattgatgggctgccgaactggggttgagagcactgacccctttggaacacgtgtcttggacattaatggggtcagtgggctcaatcctttcagtgggtctgggggtgaggacccaggtccccacttcattttccagaacatgttcctggccatcatcaatgacacatattcagaggtcaaggaggagctggctggacagaaggatgagctgcaactttctgacctcctgaaacagggctacaacaagaccctactaagactgcgtctgaggaaggagagggtttcggatgtgcagaaggtcctgcagggtggggagcaggagatccagtttgaggatttcaccaacaccttaagggaactgggacacgcagagcatgaaatcactgagctcacggccaccttcaccaagtttgacagagatgggaatcgtattctggatgagaaggaacaggaaaaaatgcgacaggacctggaggaagagagggtggccctcaacactgagattgagaaactaggccdatctattgtgagcagcccacaaggcaaatcgggtccagaggctgccagagcaggaggctgggtttcaggagaagaattctacatgctcacaaggagagttctgcagctggagactgtcctggaaggagtagtgtcccagattgatgctgtaggctcaaagctgaaaatgctggagaggaaggggtggctggctccctccccaggcgtgaaggaacaagctatttggaagcacccgcagccagccccagctgtgaccccagacccctggggagtccagggtgggcaggagagtgaggttccctataaaagagaagaggaaghcttagaggagaggagactctcccgtggtgagattccaacgttgcagaggagttaagtgtgaggcactcccggagcaaagtctatgaaggatcttctgcaagaggctgcctcctggtccactgaacctggaaactgagtgggctttaaccaggagataaaaatggagcctgaagggaatcaggcaaggaaatgaactcaggattcagagatctttgaattaatatgtggtgggttctgacattattcttccataagaccatgtgggtttccatggtggctatcaataaaactccttag

SEQ ID NO: 115 - DNA, 2872 bp, Homo sapiens
ttagaacccgacattgtgctctgtacttcctagccattcattcgcttcaagtgctctgaaatttaatttaaaaaatcatagttggaatcctttcggtcactttctctttctcccttcgttcctccctttccctcttgattcttccttgaggcgcaaacacctgagagaggcttctgtccctcggcggtctccgtaagtaagtgaaccgttattggctggagggcgctgacgtctgattgttgcgcggtcgcatttttccggggaacgcggattcgcattcccaattttaggtggcagtcgcaacccrtactattcggacagatggcacagaaaccgctgcgcctcttggcttgtggagatgttgaaggaaagtttgatattttattcaatagagttcaagcaattcagaagaaaagtggaaactttgatctgctgttgtgtgtaggaaatttctttggctccacccaagatgctgaatgggaggagtataagactggcatcaagaaagctcctattcagacatatgtgcttggtgctaataaccaggaaacagtaaaatatttccaggatgctgatggatgtgaattagctgaaaacattacttatctgggtcgtaaaggtatcttcactggaagctcggggctgcagattgtgtacctcagtgggacagaatccttaaatgagccagtaccaggttatagttttagtcccaaggatgtgtcttctctgagaatgatgctgtgtacaacctcccagtttaagggtgttgatatcttgctcacatccccatggcccaagtrtgtggggaactttgggaattcttctggagaagtggataccaaaaaatgtggttctgctttggtttccagtcttgccacgggcttgaaaccaagataccattttgctgctttggaaaagacctattatgagaggcttccatatcgaaaccatatcattctacaggaaaatgcacagcatgccacccggtttatagctctggcaaatgttggaaatccagaaaagaaaaagtatctttacgcrttcagtattgttcccatgaagctaatggatgcagcagaactggtaaaacagcctcyggatgtcactgaaaacccttacagaaaatctgggcaggaagcatccataggaaagcaaattcttgcccctgtggaagaatcagcctgtcagtttttctttgatttaaatgaaaagcagggaagraagcgttcatccacaggtagagatagcaaatcttctcctcatccaaagcagcctcgcaaacctcctcagcctccaggaccctgctggttttgccttgctagccctgaagtggaaaaacatttggtggtcaacatcggcacacattgctaccttgccctggccaaaggaggcttatctgatgaccatgtcctcatcctgcctattggacactaccagtcagtggtggagctttcagcagaggtggtagaagaggtggagaagtataaggccactctgagacggttctttaagagtcgagggaaatggtgtgttgtatttgagagaaattataagagccatcacctccagctacaggtcattcctgtcccaatcagctgctctactactgatgacattaaagatgccttcattacccaggcacaggagcagcagatagagctgttggaaatcccagagcactctgacatcaagcagattgcacagccaggagcagcatatttttatgttgaacttgacacaggagaaaagcttttccacagaattaaaaagaattttcctttgcagtttggaagggaggtcctggccagtgaagccatccttaatgttcctgataagtctgactggaggcagtgtcagatcagcaaggaagacgaggagaccctggctcrccgcttccrgaaagactttgagccctatgactttactctggatgactaaaacaaagggaagaactttttatgaactccacaggaagtagtaargcttttttttttttttaattaaaagaattttttttgagacaaagtctcgctctgtcacccaagcaggattgcagtggcataactgtggctcactgtagcctcaacctcctgggctctagagttcctcccacctcrgcctcatgagtagctgggaccacaggcgcawgctaccatgcctggcaaacttttttgattttttatagagacaggagggtctccctgtgttgcccaggctggtctgtaatgcctaggctcaagggatcctctgccttggcttcttaacctgctgggattacaagcatgagacaccattcctggcctagaagcctatttttaaagaaactacaatctcccatggggactgtttccctgcctcttttgtgcagtcccatggaacttgcctacagcaagaggcctaagattgaatctttttggggaaaagtcattctaggatgaaaatcctatgttaaggccgggcgcagtggctcacgcctgtaatcccagtactttgggaagccgaggcaggtggatcacctgaggtgaggagtttgagaccagcctggccaacatggtgaaaccccgtctttactaaagctacaaaaattagctgggcgtggtgccaggcrcttgtartcccrgctrctcaggaggctgaggcrggagaattgcttgagcctgggaggtggaggttgcagtgagccaagatcgctccattgcactccagcctgggtgacagtgaaactccrtctcaaaaataaaagaataaaagtatgtctgtcatccagctcctatgtctgttatccagctccaagtacagcttgtgtatatcaacattttcaaaaacctttaaactaccaaatgaaatccagatgtttttccatggttgagaa

SEQ ID NO: 116 - DNA, 2657 bp, Homo sapiens
ttagaacccgacattgtgctctgtacttcctagccattcattcgcttcaagtgctctgaaatttaatttaaaaaatcatagttggaatcctttcggtcactttctctttctcccttcgttcctccctttccctcttgattcttccttgaggcgcaaacacctgagagaggcttctgtccctcggcggtctccgtaagtaagtgaaccgttattggctggagggcgctgacgtctgattgttgcgcggtcgcatttttccggggaacgcggattcgcattcccaattttaggtggcagtcgcaacccrtactattcggacagatggcacagaaaccgctgcgcctcttggcttgtggagatgttgaaggaaagtttgatattttattcaatagagttcaagcaattcagaagaaaagtggaaactttgatctgctgttgtgtgtaggaaatttctttggctccacccaagatgctgaatgggaggagtataagactggcatcaagaaagctcctattcagacatatgtgcttggtgctaataaccaggaaacagtaaaatatttccaggatgctgatggatgtgaattagctgaaaacattacttatctggggagaagtggataccaaaaaatgtggttctgctttggtttccagtcttgccacgggcttgaaaccaagataccattttgctgctttggaaaagacctattatgagaggcttccatatcgaaaccatatcattctacaggaaaatgcacagcatgccacccggtttatagctctggcaaatgttggaaatccagaaaagaaaaagtatctttacgcrttcagtattgttcccatgaagctaatggatgcagcagaactggtaaaacagcctcyggatgtcactgaaaacccttacagaaaatctgggcaggaagcatccataggaaagcaaattcttgcccctgtggaagaatcagcctgtcagtttttctttgatttaaatgaaaagcagggaagraagcgttcatccacaggtagagatagcaaatcttctcctcatccaaagcagcctcgcaaacctcctcagcctccaggaccctgctggttttgccttgctagccctgaagtggaaaaacatttggtggtcaacatcggcacacattgctaccttgccctggccaaaggaggcttatctgatgaccatgtcctcatcctgcctattggacactaccagtcagtggtggagctttcagcagaggtggtagaagaggtggagaagtataaggccactctgagacggttctttaagagtcgagggaaatggtgtgttgtatttgagagaaattataagagccatcacctccagctacaggtcattcctgtcccaatcagctgctctactactgatgacattaaagatgccttcattacccaggcacaggagcagcagatagagctgttggaaatcccagagcactctgacatcaagcagattgcacagccaggagcagcatatttttatgttgaacttgacacaggagaaaagcttttccacagaattaaaaagaattttcctttgcagtttggaagggaggtcctggccagtgaagccatccttaatgttcctgataagtctgactggaggcagtgtcagatcagcaaggaagacgaggagaccctggctcrccgcttccrgaaagactttgagccctatgactttactctggatgactaaaacaaagggaagaactttttatgaactccacaggaagtagtaargcttttttttttttttaattaaaagaattttttttgagacaaagtctcgctctgtcacccaagcaggattgcagtggcataactgtggctcactgtagcctcaacctcctgggctctagagttcctcccacctcrgcctcatgagtagctgggaccacaggcgcawgctaccatgcctggcaaacttttttgattttttatagagacaggagggtctccctgtgttgcccaggctggtctgtaatgcctaggctcaagggatcctctgccttggcttcttaacctgctgggattacaagcatgagacaccattcctggcctagaagcctatttttaaagaaactacaatctcccatggggactgtttccctgcctcttttgtgcagtcccatggaacttgcctacagcaagaggcctaagattgaatctttttggggaaaagtcattctaggatgaaaatcctatgttaaggccgggcgcagtggctcacgcctgtaatcccagtactttgggaagccgaggcaggtggatcacctgaggtgaggagtttgagaccagcctggccaacatggtgaaaccccgtctttactaaagctacaaaaattagctgggcgtggtgccaggcrcttgtartcccrgctrctcaggaggctgaggcrggagaattgcttgagcctgggaggtggaggttgcagtgagccaagatcgctccattgcactccagcctgggtgacagtgaaactccrtctcaaaaataaaagaataaaagtatgtctgtcatccagctcctatgtctgttatccagctccaagtacagcttgtgtatatcaacattttcaaaaacctttaaactaccaaatgaaatccagatgtttttccatggttgagaa

SEQ ID NO: 117 - DNA, 2250 bp, Homo sapiens
ttagaacccgacattgtgctctgtacttcctagccattcattcgcttcaagtgctctgaaatttaatttaaaaaatcatagttggaatcctttcggtcactttctctttctcccttcgttcctccctttccctcttgattcttccttgaggcgcaaacacctgagagaggcttctgtccctcggcggtctccgtaagtaagtgaaccgttattggctggagggcgctgacgtctgattgttgcgcggtcgcatttttccggggaacgcggattcgcattcccaattttaggtggcagtcgcaacccrtactattcggacagatggcacagaaaccgctgcgcctcttggcttgtggagatgttgaaggaaagtttgatattttattcaatagagttcaagcaattcagaagaaaagtggaaactttgatctgctgttgtgtgtaggaaatttctttggctccacccaagatgctgaatgggaggagtataagactggcatcaagaaagctcctattcagacatatgtgcttggtgctaataaccaggaaacagtaaaatatttccaggatgctgatggatgtgaattagctgaaaacattacttatctgggtcgtaaaggtatcttcactggaagctcggggctgcagattgtgtacctcagtgggacagaatccttaaatgagccagtaccaggttatagttttagtcccaaggatgtgtcttctctgagaatgatgctgtgtacaacctcccagtttaagggtgttgatatcttgctcacatccccatggcccaagtrtgtggggaactttgggaattcttctggagaagtggataccaaaaaatgtggttctgctttggtttccagtcttgccacgggcttgaaaccaagataccattttgctgctttggaaaagacctattatgagaggcttccatatcgaaaccatatcattctacaggaaaatgcacagcatgccacccggtttatagctctggcaaatgttggaaatccagaaaagaaaaagtatctttacgcrttcagtattgttcccatgaagctaatggatgcagcagaactggtaaaacagcctcyggatgtcactgaaaacccttacagaaaatctgggcaggaagcatccataggaaagcaaattcttgcccctgtggaagaatcagcctgtcagtttttctttgatttaaatgaaaagcagggaagraagcgttcatccacaggtagagatagcaaatcttctcctcatccaaagcagcctcgcaaacctcctcagcctccaggaccctgctggttttgccttgctagccctgaagtggaaaaacatttggtggtcaacatcggcacacattgctaccttgccctggccaaaggaggcttatctgatgaccatgtcctcatcctgcctattggacactaccagtcagtggtggagctttcagcagaggtggtagaagaggtggagaagtataaggccactctgagacggttctttaagagtcgagggaaatggtgtgttgtatttgagagaaattataagagccatcacctccagctacaggtcattcctgtcccaatcagctgctctactactgatgacattaaagatgccttcattacccaggcacaggagcagcagatagagctgttggaaatcccagagcactctgacatcaagcagattgcacagccaggagcagcatatttttatgttgaacttgacacaggagaaaagcttttccacagaattaaaaagaattttcctttgcagtttggaagggaggtcctggccagtgaagccatccttaatgttcctgataagtctgactggaggcagtgtcagatcagcaaggaagacgaggagaccctggctcrccgcttccrgaaagactttgagccctatgactttactctggatgactaaaacaaagggaagaactttttatgaactccacaggaagtagtaargcttttttttttttttaattaaaagaattttttttgagacaaagtctcgctctgtcacccaagcaggattgcatgagccaagatcgctccattgcactccagcctgggtgacagtgaaactccrtctcaaaaataaaagaataaaagtatgtctgtcatccagctcctatgtctgttatccagctccaagtacagcttgtgtatatcaacattttcaaaaacctttaaactaccaaatgaaatccagatgtttttccatggttgagaa

SEQ ID NO: 118 - DNA, 3018 bp, Homo sapiens
cgagacttccagtccgaggtcctgctttctgctatggaactattccacatgacaagtggaggtgatgcagygatgttcagagacggcaaagagcctcagccaagtgcagaagctgctgctgccccttctcttgccaacatctcctgcttcacccagaagctggtggagaagctgtacagtgggatgttctcggcagaccccaggcatatcctcctcttcatcctggagcacatcatggtggtcattgagactgcctcttctcaaagggacactgtcctcagcactttatacagcagtttaaataaagtcattctttattgcctatccaagccccagcagtccctctccgaatgcctcrgccttctcagcatcctgggctttctgcaggagcactgggatgttgtctttgccacctacaattccaacatcagcttcctcctgtgtctcatgcattgccttttgctactcaatgagagaagttacccagaaggatttggattggagcccaagcctagaatgtctacttatcatcaagtcttcctttccccaaatgaagacgtgaaagaaaaaagagaagacttaccaagtttgagtgatgtccaacacaacatccagaagacagtgcagactctctggcagcagctggtggcacaraggcagcagaccctggaggatgccttcaagatcgatctctctgtgaaacctggagagagggaagtgaagattgaagasgtcacaccgctctgggaggagacgatgctcaaggcctggcagcattacttagcatctgagaagaagycactggcaagtcgttcaaatgttgcacaccacagcaaagtcactttgtggagtggaagcctgtcctcagccatgaagctgatgcccgggmggcaggccaaggaccctgagtgcaagacagaggattttgtgtcatgtatagagaactacagaagaagaggacaagagctatatgcatctttatacaaagaccatgtgcaaaggcgaaaatgtggcaacatcaaggcagccaacgcctgggccaggatccaggagcagctttttggggasctgggcttgtggagccagggggaagaaaccaagccctgttccccatgggaactcgactggagagaaggaccagctcgaatgaggaaacgcatcaaacgcttgtctcctttggaggccctgagctcaggaaggcacaaggaaagccaagacaaaaatgatcatatttctcaaacaaatgctgaaaaccaagatgaactgacactgagggaggctgagggcgagccggacgaggtgggggtggactgcacccagctgaccttcttcccagccttacacgaaagtctgcactcagaagacttcttggaactgtgtcgggaaagacaagttattttacaagagcttcttgataaagaaaaggtgacgcagaagttctccctggtgattgtgcagggccacctggtgtcagaaggggtcctgctttttggccaccaacacttctacatctgcgagaacttcacactgtctcccacggswgatgtctactgtacccgtcactgcttatccaacatcagcgatccgttcattttcaacctgtgcagcaaagacaggtccactgaccattactcgtgccagtgccacagctacgctgacatgcgggagctacggcaggctcgcttcctcctgcaggacatcgccctggagatcttcttccacaatggatattccaagtttcttgtcttctacaacaatgatcggagtaaggyctttaaaagcttctgctctttccaacccagcctgaaggggaaagccacctcggaggacmccctcartctaaggagataccccggctctgacaggatcatgctgcagaagtggcagaaaagggacatcagcaattttgagtatctcatgtacctcaacaccgcggctgggagaacctgcaatgactacatgcagtacccagtgttcccctgggtcctcgcagactacacctcagagacattgaacttggcaaatccgaagattttccgggatctttcaaagcccatgggggctcagaccaaggaaaggaagctgaaatttatccagaggtttaaagaagttgagaaaactgaaggagacatgactgtccagtgccactactacacccactactcctcggccatcatcgtggcctcctacctggtccggatgccacccttcacccaggccttctgcgctctgcagggcggaagcttcgacgtggcagacagaatgttccacagtgtgaagagcacgtgggagtcggcctccagagagaacatgagtgacrtcagggagctgaccccagagttcttctacctgcctgagttcttaaccaactgcaacggggtagagttcggctgcatgcaggacgggactrtgctaggagacgtgcagctccctccctgggctgatggggaccctcggaaattcatcagcctgcacagaaaggccctggaaagtgactttgtcagtgccaacctccaccattggatagaccttatttttgggtayaagcagcaggggccagccgcagtggatgctgttaatatcttccacccctacttctacggtgacagaatggacctcagcagcatcactgaccccctcatcaaaagcaccatcctggggtttgtcagcaactttggacaggtgcccaaacagctctttaccaaacctcacccagccaggactgcagcagggaagcctctgcctggaaaggatgtctccacccccgtgagcctgcctggccacccacagccctttttctacagcctgcagtcgctgaggccctcccaggtcacggtcaaaggtgattccctggccatgcattgtttggtgtcctgtcccagggttgtcccttcagtggctgggttcctctggaggtccagcaccacatacctgggcaaagtattggggactgactttgaatggctgcatctccagtcacagccagattctaggggggtgtcatctctgggaagtgtc

SEQ ID NO: 119 - DNA, 1986 bp, Homo sapiens
atgtctgtggtggggcctgtatctgtcaaggcagagtgtgtatgtttgctttccgaggagatccagtgctccctggccagtcatatccagtccctggtgaagtcggagaagaaccgccaggtcatgtgcgaagcaggcttgcttgggaccctcatggcctcctgccacagggccctggtcaccagtggcagccccctccactcacgcctcatcaggatctttgagaagctcgcttcccaggccattgaaccggatgtgctaagctgtttgtttattccaaccctgtccacagttatgggaaccagcactgagtactctgtctctggaggaattgggacaggtgccaccagaccgttccctcctcctggaggtctgaccttctcctgctggttcctgatcagccggcatggagctgccactgagggccacccgctgcgcttcctgacgttggtgcgccacctggccaggactgagcaaccctttgtttgcttctccgtcagcctctgcccagacgacctctccttggttgtttctacagaagagaaggagtttcagcctctggggaaaaacattgggaggccctatgaaacagtggaagcggctgacacccttgtacacagcacaactgcctatccaactctctgggactcggcctacaatggagtctctgtggagtgtagcaccacacgtgagactcagtgttcatgctgtcttccagatgtcatggaacctgaggatgactccgagccttctgcaggatgccagcttcagatgttatacatccaggctctaccagggcctttcctttctatggatccatccgcatttgtggatgtttatggatatattgctactcctcgagtctggaaacaaaagtcttcattaatctggcgtcttggccccacatacctctttgaagaagccatttcaatggaaactctggaagttattaacaaacttggcccaagatattgtggtaacttccaagctgtgcatgtccaaggggaggacctggacagtgaagccacgccctttgttgcagaagaaagagtttcttttggacttcacatagccagctcctctatcaccagtgtagcggacatcagaaatgcttacaatgaggtggacagccgcctgatcgccaaagagatgaacatttcatcccgtgacaatgccatgcccgtgttcttgctgaggaattgtgctggccacctgtcagggtctctgcggaccattggagctgttgctgtgggtcaattaggggtgagggtattccactccagccctgctgccagcagcctggacttcattggcgggcctgccatcctcctgggcctcatctccttagcgacagatgaccataccatgtatgcggctgtgaaagttctgcactcggtcctgaccagtaatgccatgtgtgacttcctgatgcaacacatctgtgggtaccagataatggcgtttctcctgaggaagaaggcytctctcctgaaccatcgaatttttcagctgatcctctcagtggctggcactgtggagctgggcttcaggtcatctgctatcaccaacactggtgtcttccagcacatcctctgcaatttygagctctggatgaatactgcagacaatctggagctcagcctcttttcccatcttttggaaatccttcaatcaccaagggaaggacccaggaatgctgaagctgcccaccaggcacagcttatacccaagctcatcttcctattcaatgagccgagcctcatcccctccaagatcyccaccatcattggcatcctggcctgtcagctgaggggccacttcagcacccaggacttgctcaggattgggctgtttgttgtgtacaccctcaagccttcgtcggtgaatgagaggcagatctgcatggacggagccctggacccttccctgcctggtgagaagacctttgccagttcgaaggcagtaggacggccctyacggaacccc

SEQ ID NO: 120 - DNA, 4199 bp, Homo sapiens
cgagacttccagtccgaggtcctgctttctgctatggaactattccacatgacaagtggaggtgatgcagygatgttcagagacggcaaagagcctcagccaagtgcagaagctgctgctgccccttctcttgccaacatctcctgcttcacccagaagctggtggagaagctgtacagtgggatgttctcggcagaccccaggcatatcctcctcttcatcctggagcacatcatggtggtcattgagactgcctcttctcaaagggacactgtcctcagcactttatacagcagtttaaataaagtcattctttattgcctatccaagccccagcagtccctctccgaatgcctcrgccttctcagcatcctgggctttctgcaggagcactgggatgttgtctttgccacctacaattccaacatcagcttcctcctgtgtctcatgcattgccttttgctactcaatgagagaagttacccagaaggatttggattggagcccaagcctagaatgtctacttatcatcaagtcttcctttccccaaatgaagacgtgaaagaaaaaagagaagacttaccaagtttgagtgatgtccaacacaacatccagaagacagtgcagactctctggcagcagctggtggcacaraggcagcagaccctggaggatgccttcaagatcgatctctctgtgaaacctggagagagggaagtgaagattgaagasgtcacaccgctctgggaggagacgatgctcaaggcctggcagcattacttagcatctgagaagaagycactggcaagtcgttcaaatgttgcacaccacagcaaagtcactttgtggagtggaagcctgtcctcagccatgaagctgatgcccgggmggcaggccaaggaccctgagtgcaagacagaggattttgtgtcatgtatagagaactacagaagaagaggacaagagctatatgcatctttatacaaagaccatgtgcaaaggcgaaaatgtggcaacatcaaggcagccaacgcctgggccaggatccaggagcagctttttggggasctgggcttgtggagccagggggaagaaaccaagccctgttccccatgggaactcgactggagagaaggaccagctcgaatgaggaaacgcatcaaacgcttgtctcctttggaggccctgagctcaggaaggcacaaggaaagccaagacaaaaatgatcatatttctcaaacaaatgctgaaaaccaagatgaactgacactgagggaggctgagggcgagccggacgaggtgggggtggactgcacccagctgaccttcttcccagccttacacgaaagtctgcactcagaagacttcttggaactgtgtcgggaaagacaagttattttacaagagcttcttgataaagaaaaggtgacgcagaagttctccctggtgattgtgcagggccacctggtgtcagaaggggtcctgctttttggccaccaacacttctacatctgcgagaacttcacactgtctcccacggswgatgtctactgtacccgtcactgcttatccaacatcagcgatccgttcattttcaacctgtgcagcaaagacaggtccactgaccattactcgtgccagtgccacagctacgctgacatgcgggagctacggcaggctcgcttcctcctgcaggacatcgccctggagatcttcttccacaatggatattccaagtttcttgtcttctacaacaatgatcggagtaaggyctttaaaagcttctgctctttccaacccagcctgaaggggaaagccacctcggaggacmccctcartctaaggagataccccggctctgacaggatcatgctgcagaagtggcagaaaagggacatcagcaattttgagtatctcatgtacctcaacaccgcggctgggagaacctgcaatgactacatgcagtacccagtgttcccctgggtcctcgcagactacacctcagagacattgaacttggcaaatccgaagattttccgggatctttcaaagcccatgggggctcagaccaaggaaaggaagctgaaatttatccagaggtttaaagaagttgagaaaactgaaggagacatgactgtccagtgccactactacacccactactcctcggccatcatcgtggcctcctacctggtccggatgccacccttcacccaggccttctgcgctctgcagggcggaagcttcgacgtggcagacagaatgttccacagtgtgaagagcacgtgggagtcggcctccagagagaacatgagtgacrtcagggagctgaccccagagttcttctacctgcctgagttcttaaccaactgcaacggggtagagttcggctgcatgcaggacgggactrtgctaggagacgtgcagctccctccctgggctgatggggaccctcggaaattcatcagcctgcacagaaaggccctggaaagtgactttgtcagtgccaacctccaccattggatagaccttatttttgggtayaagcagcaggggccagccgcagtggatgctgttaatatcttccacccctacttctacggtgacagaatggacctcagcagcatcactgaccccctcatcaaaagcaccatcctggggtttgtcagcaactttggacaggtgcccaaacagctctttaccaaacctcacccagccaggactgcagcagggaagcctctgcctggaaaggatgtctccacccccgtgagcctgcctggccacccacagccctttttctacagcctgcagtcgctgaggccctcccaggtcacggtcaaagatatgtacctcttttctctaggctcagagtcccccaaaggggccattggccacattgtctctactgagaagaccattctggctgtagagaggaacaaagtgctgctgcctcctctctggaacaggaccttcagytggggctttgatgacttcagctgctgcttggggagctacggctcygacaaggtcctgatgacattcgagaacctggctgcctggggccgctgtctgtgcgccgtgtgcccatccccaacaacgatygtcacctctgggaccagcactgtggtgtgtgtgtgggagctcagcatgaccaaaggccgcccgaggggcttgcgcctccggcaggccttgtatggacacacacaggctgtcacgtgcctggcagcgtcagtcaccttcagcctcctggtgagcggctcccaggactgcacctgtatcctgtgggatctggaccacctcacccacgtgacccgcctgcccrcccatcgggaaggcatctcagccatcaccatcagtgacgtctcaggcaccattgtctcctgtgcgggagcacacttgtccctgtggaatgtcaatggacagcccctggccagcatcaccacagcctggggcccagaaggagccataacctgytgctgcctgatggagggcccagcatgggacacaagccagatcatcatcaccgggagtcaagacggcatggtccgggtttggaagactgaggatgtgaagatgtctgytcctggacggccagcaggagaggagccccyggctcagcctccaagcccaagaggccacaagtgggagaagaacctggccttgagtcgagagctggacgttagcattgctttgacagggaagcccagcaaaaccagccccgcagtgactgctctggccgtgtccagaaaccacaccaaactcctggttggtgatgagagggggagaatattctgctggtctgcagatgggtaggaagagagaggcagcagaggctctggcacaacagtgccaggctgagggtggcagaggtgactggggcctgagctctgcctacagaagaaacccccagggcctccttccccacagttctcaaggaagggcctctggcaatcacagctctgcagcccaaccctctccatggccgatgggayttctatgaaaaggatgagcacacacactcggagggctgagcagcacgctggaaactgtgacttggtgatgcccagctgcacacgaaattacacatgactcaccttattaagggctattgcactgaaaaaaaaaaaagatgggtcgcttactggaaattattgtattgtctttattttattaaagcaactatgttttaaatgcagaag

SEQ ID NO: 121 - DNA, 1536 bp, Homo sapiens
cgagacttccagtccgaggtcctgctttctgctatggaactattccacatgacaagtggaggtgatgcagygatgttcagagacggcaaagagcctcagccaagtgcagaagctgctgctgccccttctcttgccaacatctcctgcttcacccagaagctggtggagaagctgtacagtgggatgttctcggcagaccccaggcatatcctcctcttcatcctggagcacatcatggtggtcattgagactgcctcttctcaaagggacactgtcctcagcactttatacagcagtttaaataaagtcattctttattgcctatccaagccccagcagtccctctccgaatgcctcrgccttctcagcatcctgggctttctgcaggagcactgggatgttgtctttgccacctacaattccaacatcagcttcctcctgtgtctcatgcattgccttttgctactcaatgagagaagttacccagaaggatttggattggagcccaagcctagaatgtctacttatcatcaagtcttcctttccccaaatgaagacgtgaaagaaaaaagagaagacttaccaagtttgagtgatgtccaacacaacatccagaagacagtgcagactctctggcagcagctggtggcacaraggcagcagaccctggaggatgccttcaagatcgatctctctgtgaaacctggagagagggaagtgaagattgaagasgtcacaccgctctgggaggagacgatgctcaaggcctggcagcattacttagcatctgagaagaagycactggcaagtcgttcaaatgttgcacaccacagcaaagtcactttgtggagtggaagcctgtcctcagccatgaagctgatgcccgggmggcaggccaaggaccctgagtgcaagacagaggattttgtgtcatgtatagagaactacagaagaagaggacaagagctatatgcatctttatacaaagaccatgtgcaaaggcgaaaatgtggcaacatcaaggcagccaacgcctgggccaggatccaggagcagctttttggggasctgggcttgtggagccagggggaagaaaccaagccctgttccccatgggaactcgactggagagaaggaccagctcgaatgaggaaacgcatcaaacgcttgtctcctttggaggccctgagctcaggaaggcacaaggaaagccaagacaaaaatgatcatatttctcaaacaaatgctgaaaaccaagatgaactgacactgagggaggctgagggcgagccggacgaggtgggggtggactgcacccagctgaccttcttcccagccttacacgaaagtctgcactcagaagacttcttggaactgtgtcgggaaagacaagttattttacaagagcttcttgataaagaaaagccccataggatttgttctcactctcccagaagtaagaaggggcgttggaagaaccctggtacctatggcatggcccaagggccgtgtcaagggaaggatgaaggatcctgt

SEQ ID NO: 122 - DNA, 8009 bp, Homo sapiens
tgtgtcaggctctccctccagaacctctccaggctcacggacactctccctgcccctgaagtgagcgaggctgtaagcctgatcttgggattcgtgaaggactcctaccccgtctcctcggctctgttcctggagtttgagaattcagagggctatcctctgctgctcaaagtgttacttcggtatgatgggctgacccagagcgaagtggacccgcatctggaggagctccttgggctggtggtgtggctgacaacctgtgggaggtcagagctgaaggtgtttgacagcatcacttaccctcagcttgaaggcttcaagttccatcatgaggcatctggggtgactgttaagaatcttcaggccttccaggtcctacagaatgttttccacaaagccagtgactctgtcctctgcatacaagtcttgtcagtcatcaggaccatgtgggcctggaatgctcgaaacttcttcctgctggagtggaccctgcagcccatctcgcagtttgtagagatcatgcmcctgaagccggccccagtgcaggaacacttcttccagcttctagaggccctggtgttcgagctgcactacgtgcctcatgagatcctgcgaaaggtacagcatctgatcaaggagagccctgggccatcctgcaccctcatggccctgcagagcatcctcagcatcgctggtggggaccccctcttcaccgacatcttccgggactcagggctcctgggcctgctactggcacagcttcggaagcaagccaagatcatgaggaaggagatccagtgctccctggccagtcatatccagtccctggtgaagtcggagaagaaccgccaggtcatgtgcgaagcaggcttgcttgggaccctcatggcctcctgccacagggccctggtcaccagtggcagccccctccactcacgcctcatcaggatctttgagaagctcgcttcccaggccattgaaccggatgtgctaaggtaccacatgctgcatattcagtgccgccaagctgggcagccatatgctgggctgcaccctggagtcacacaggccccgcagcccttgggggaatcccaggattcaactactgctcttcagacggcgctgagcctcatctccatgacctccccacgcaacctgcagcctcagagggcagccctggccccatcgtttgtggaatttgacatgtccgtggaaggttatggctgtttgtttattccaaccctgtccacagttatgggaaccagcactgagtactctgtctctggaggaattgggacaggtgccaccagaccgttccctcctcctggaggtctgaccttctcctgctggttcctgatcagccggcatggagctgccactgagggccacccgctgcgcttcctgacgttggtgcgccacctggccaggactgagcaaccctttgtttgcttctccgtcagcctctgcccagacgacctctccttggttgtttctacagaagagaaggagtttcagcctctggatgtcatggaacctgaggatgactccgagccttctgcaggatgccagcttcaggtcaggtgtggccagctcctggcttgtggtcagtggcatcacttggctgtggttgtcactaaggaaatgaaaaggcattgtacagtttccacctgtctggatggacaggtcattggctctgccaagatgttatacatccaggctctaccagggcctttcctttctatggatccatccgcatttgtggatgtttatggatatattgctactcctcgagtctggaaacaaaagtcttcattaatctggcgtcttggccccacatacctctttgaagaagccatttcaatggaaactctggaagttattaacaaacttggcccaagatattgtggtaacttccaagctgtgcatgtccaagccacgccctttgttgcagaagaaagagtttcttttggacttcacatagccagctcctctatcaccagtgtagcggacatcagaaatgcttacaatgaggtggacagccgcctgatcgccaaagagatgaacatttcatcccgtgacaatgccatgcccgtgttcttgctgaggaattgtgctggccacctgtcagggtctctgcggaccattggagctgttgctgtgggtcaattaggggtgagggtattccactccagccctgctgccagcagcctggacttcattggcgggcctgccatcctcctgggcctcatctccttagcgacagatgaccataccatgtatgcggctgtgaaagttctgcactcggtcctgaccagtaatgccatgtgtgacttcctgatgcaacacatctgtgggtaccagataatggcgtttctcctgaggaagaaggcytctctcctgaaccatcgaatttttcagctgatcctctcagtggctggcactgtggagctgggcttcaggtcatctgctatcaccaacactggtgtcttccagcacatcctctgcaatttygagctctggatgaatactgcagacaatctggagctcagcctcttttcccatcttttggaaatccttcaatcaccaagggaaggacccaggaatgctgaagctgcccaccaggcacagcttatacccaagctcatcttcctattcaatgagccgagcctcatcccctccaagatcyccaccatcattggcatcctggcctgtcagctgaggggccacttcagcacccaggacttgctcagcaaatattatgtctctttacatccattttctctcaaatctgaattcttttttgtagctggaagccaaacatctggaaagacaatctggctcagaaaccagttgctggagatgctgctcagtgtaatatcttccccccagcttcatctgtcctctgagtcaaaggaagagatgtttctgaaactggggcctgactggttcctgctgctcctgcagggccacctgcatgccagcaccactgtgctggcattgaagctgctgctgtactttctggcaagcccctccctccgcacacggtttagagatggcctgtgtgcaggatcctgggtggaacgcagcactgagggcrtggatattgtaatggacaacctgaagagccagtcaccactgcctgagcaaagcccatgcctgcttcctgggttccgtgtcttgaatgactttctggcccaccacgtccacattccagaggtctacctcatcgtctccaccttcttcctgcagacaccactcacagagctgatggacgggcccaaagacagccttgatgccatgcttcagtggctcctgcagaggcaccaccaggaagaagtcctccaggctgggctgtgcacagaaggtgccttgctcctcctggaaatgctgaaggccaccatgagccagcccctggcaggttctgaggatggtgcctgggcacagaccttcccggccagcgtgctgcagttcctcagcctcgtccaccgcacctacccccaggacccagcgtggcragccccggagttcctccagaccttggccatagccgccttccccctgggakcccaaaagggggttggggctgagtccacccggaacacyagcagtcctgaggccgcagctgaaggcgacagcacagtggagggtctccaggctcccaccaaggcacatcccgcccggaggaagctgagggagttcacgcagctcctcttgagggagctcctgcttggagcctccagccccaagcagtggctgcccctggaggtgctcctggaggcttctccagaccacgccaccagccaacagaagcgagacttccagtccgaggtcctgctttctgctatggaactattccacatgacaagtggaggtgatgcagygatgttcagagacggcaaagagcctcagccaagtgcagaagctgctgctgccccttctcttgccaacatctcctgcttcacccagaagctggtggagaagctgtacagtgggatgttctcggcagaccccaggcatatcctcctcttcatcctggagcacatcatggtggtcattgagactgcctcttctcaaagggacactgtcctcagcactttatacagcagtttaaataaagtcattctttattgcctatccaagccccagcagtccctctccgaatgcctcrgccttctcagcatcctgggctttctgcaggagcactgggatgttgtctttgccacctacaattccaacatcagcttcctcctgtgtctcatgcattgccttttgctactcaatgagagaagttacccagaaggatttggattggagcccaagcctagaatgtctacttatcatcaagtcttcctttccccaaatgaagacgtgaaagaaaaaagagaagacttaccaagtttgagtgatgtccaacacaacatccagaagacagtgcagactctctggcagcagctggtggcacaraggcagcagaccctggaggatgccttcaagatcgatctctctgtgaaacctggagagagggaagtgaagattgaagasgtcacaccgctctgggaggagacgatgctcaaggcctggcagcattacttagcatctgagaagaagycactggcaagtcgttcaaatgttgcacaccacagcaaagtcactttgtggagtggaagcctgtcctcagccatgaagctgatgcccgggmggcaggccaaggaccctgagtgcaagacagaggattttgtgtcatgtatagagaactacagaagaagaggacaagagctatatgcatctttatacaaagaccatgtgcaaaggcgaaaatgtggcaacatcaaggcagccaacgcctgggccaggatccaggagcagctttttggggasctgggcttgtggagccagggggaagaaaccaagccctgttccccatgggaactcgactggagagaaggaccagctcgaatgaggaaacgcatcaaacgcttgtctcctttggaggccctgagctcaggaaggcacaaggaaagccaagacaaaaatgatcatatttctcaaacaaatgctgaaaaccaagatgaactgacactgagggaggctgagggcgagccggacgaggtgggggtggactgcacccagctgaccttcttcccagccttacacgaaagtctgcactcagaagacttcttggaactgtgtcgggaaagacaagttattttacaagagcttcttgataaagaaaaggtgacgcagaagttctccctggtgattgtgcagggccacctggtgtcagaaggggtcctgctttttggccaccaacacttctacatctgcgagaacttcacactgtctcccacggswgatgtctactgtacccgtcactgcttatccaacatcagcgatccgttcattttcaacctgtgcagcaaagacaggtccactgaccattactcgtgccagtgccacagctacgctgacatgcgggagctacggcaggctcgcttcctcctgcaggacatcgccctggagatcttcttccacaatggatattccaagtttcttgtcttctacaacaatgatcggagtaaggyctttaaaagcttctgctctttccaacccagcctgaaggggaaagccacctcggaggacmccctcartctaaggagataccccggctctgacaggatcatgctgcagaagtggcagaaaagggacatcagcaattttgagtatctcatgtacctcaacaccgcggctgggagaacctgcaatgactacatgcagtacccagtgttcccctgggtcctcgcagactacacctcagagacattgaacttggcaaatccgaagattttccgggatctttcaaagcccatgggggctcagaccaaggaaaggaagctgaaatttatccagaggtttaaagaagttgagaaaactgaaggagacatgactgtccagtgccactactacacccactactcctcggccatcatcgtggcctcctacctggtccggatgccacccttcacccaggccttctgcgctctgcagggcggaagcttcgacgtggcagacagaatgttccacagtgtgaagagcacgtgggagtcggcctccagagagaacatgagtgacrtcagggagctgaccccagagttcttctacctgcctgagttcttaaccaactgcaacggggtagagttcggctgcatgcaggacgggactrtgctaggagacgtgcagctccctccctgggctgatggggaccctcggaaattcatcagcctgcacagaaaggccctggaaagtgactttgtcagtgccaacctccaccattggatagaccttatttttgggtayaagcagcaggggccagccgcagtggatgctgttaatatcttccacccctacttctacggtgacagaatggacctcagcagcatcactgaccccctcatcaaaagcaccatcctggggtttgtcagcaactttggacaggtgcccaaacagctctttaccaaacctcacccagccaggactgcagcagggaagcctctgcctggaaaggatgtctccacccccgtgagcctgcctggccacccacagccctttttctacagcctgcagtcgctgaggccctcccaggtcacggtcaaagatatgtacctcttttctctaggctcagagtcccccaaaggggccattggccacattgtctctactgagaagaccattctggctgtagagaggaacaaagtgctgctgcctcctctctggaacaggaccttcagytggggctttgatgacttcagctgctgcttggggagctacggctcygacaaggtcctgatgacattcgagaacctggctgcctggggccgctgtctgtgcgccgtgtgcccatccccaacaacgatygtcacctctgggaccagcactgtggtgtgtgtgtgggagctcagcatgaccaaaggccgcccgaggggcttgcgcctccggcaggccttgtatggacacacacaggctgtcacgtgcctggcagcgtcagtcaccttcagcctcctggtgagcggctcccaggactgcacctgtatcctgtgggatctggaccacctcacccacgtgacccgcctgcccrcccatcgggaaggcatctcagccatcaccatcagtgacgtctcaggcaccattgtctcctgtgcgggagcacacttgtccctgtggaatgtcaatggacagcccctggccagcatcaccacagcctggggcccagaaggagccataacctgytgctgcctgatggagggcccagcatgggacacaagccagatcatcatcaccgggagtcaagacggcatggtccgggtttggaagactgaggatgtgaagatgtctgytcctggacggccagcaggagaggagccccyggctcagcctccaagcccaagaggccacaagtgggagaagaacctggccttgagtcgagagctggacgttagcattgctttgacagggaagcccagcaaaaccagccccgcagtgactgctctggccgtgtccagaaaccacaccaaactcctggttggtgatgagagggggagaatattctgctggtctgcagatgggtaggaagagagaggcagcagaggctctggcacaacagtgccaggctgagggtggcagaggtgactggggcctgagctctgcctacagaagaaacccccagggcctccttccccacagttctcaaggaagggcctctggcaatcacagctctgcagcccaaccctctccatggccgatgggayttctatgaaaaggatgagcacacacactcggagggctgagcagcacgctggaaactgtgacttggtgatgcccagctgcacacgaaattacacatgactcaccttattaagggctattgcactgaaaaaaaaaaaagatgggtcgcttactggaaattattgtattgtctttattttattaaagcaactatgttttaaatgcagaag

SEQ ID NO: 123 - DNA, 736 bp, Homo sapiens
ggggagattcagtgtggtgggggactgagtgtggcagggactccccagcagtgagggtctctctcttcctcttgtgctcttgctggggctggtggtccargggtcttactccttggaggccatgtgggcmatgaggtccaycaccctgttgctgtagccaaattcgttgtcatacctagaaatgagcttgacaaagtggtcgttgagggcaatgccagccccagcgtcraagrtggaggagtgggtcaggtccaccactgacacgttggcagtggggacacggaaggccatgccagtgagcttcccgttcagctcagggatgaccttgcccacagccttggcagcgccagtagaggcagggatgatgttctggctgttgtcatacttctcatggttcacacccatgacgaacatgggggcrtcagcagagggggcagagatgatgacccttttggctcccccttgcctccccaaagcacatttcttccattctgtcttccactcactcctggaagatggtgatgggatttccattgatgacaagcttcccgttctcagccttgacggtgccatggaatttgccatgggtggaatcatattggaacatctttggggctcaccatgtagcactcaccatgtagttgaggtcaatgaaggggtcattgatggcaacaatatccactttaccagagttaaaagcagccctggtgaccaggcgcccaatacgaccaaatct

SEQ ID NO: 124 - DNA, 1892 bp, Homo sapiens
cccgttagaggcggcttgtgtccacgggacgcgggcggatcttctccggccatgaggaagccagccgctggcttccttccctcactcctgaaggtgctgctcctgcctctggcacctgccgcagcccaggattcgactcaggcctccactccaggcagccctctctctcctaccgaatacgaacgcttcttcgcactgctgactccaacctggaaggcagagactacctgccgtctccgtgcaacccacggctgccggaatcccacactcgtccagctggaccaatatgaaaaccacggcttagtgcccgatggtgctgtctgctccaacctcccttatgcctcctggtttgagtctttctgccagttcactcactaccgttgctccaaccacgtctactatgccaagagagtcctrtgttcccagccagtcwctattctctcacctaacactctcaaggagatagaagcttcagctgaagtctcacccaccacgatgacctcccccatctcaccccacttcacagtgacagaacgccagaccttccagccctggcctgagaggctcagcaacaacgtggaagagctcctacaatcctccttgtccctgggaggccaggagcaagcgccagagcacaagcaggagcaaggagtggagcacaggcaggagccgacacaagaacacaagcaggaagaggggcagaaacaggaagagcaagaagaggaacaggaagaggagggaaagcaggaagaaggacaggggactaaggagggacgggaggctgtgtctcagctgcagacagactcagagcccaagtttcactctgaatctctatcttctaacccttcctcttttgctccccgggtacgagaagtagagtctactcctatgataatggagaacatccaggagctcattcgatcagcccaggaaatagatgaaatgaatgaaatatatgatgagaactcctactggagaaaccaaaaccctggcagcctcctgcagctgccccacacagaggccttgctggtgctgtgctattcgatcgtggagaatrcctgcatcataacccccacagccaaggcctggaagtayatggaggaggagatccttggtttcgggaagtcggtctgtgacagccttgggcggcgacacatgtctacctgtgccctctgtgacttctgctccttgaagctggagcagtgccactcagaggccagcctgcagcggcaacaatgcgacacctcccacaagactccctttgtcagccccttgcttgcctcccagagcctgtccatcggcaaccaggtagggtccccagaatcaggccgcttttacgggctggatttgtacggtgggctccacatggacttctggtgtgcccggcttgccacgaaaggctgtgaagatgtccgagtctctgggtggctccagactgagttccttagcttccaggatggggatttccctaccaagatttgtgacacagactatatccagtacccaaactactgttccttcaaaagccagcagtgtctgatgagaaaccgcaatcggaaggtgtcccgcatgagatgtctgcagaatgagacttacagtgcgctgagccctggcaaaagtgaggacgttgtgcttcgatggagccaggagttcagcaccttgactctaggccagttcggatgagctggcgtctattctgcccacaccccagcccaacctgcccacgttctctattgttttgagaccccattgctttcaggctgccccttctgggtctgttactcggcccctactcacatttccttgggttggagcaacagtcccagagagggccayggtgggagctgcgccctccttaaaagatgactttacataaaatgttgatcttcagc

SEQ ID NO: 125 - DNA, 1352 bp, Homo sapiens
ccgagtcaccgcctgccgccgcgcccccggtttctataaattgagcccgcagcctcccgcttcgctctctgctcctcctgttcgacagtcagccgcatcttcttttgcgtcgccagccgagccacatcgctsagacaccatggggaaggtgaaggtcggagtcaacggatttggtcgtattgggcgcctggtcaccagggctgcttttaactctggtaaagtggatattgttgccatcaatgaccccttcattgacctcaactacatggtttacatgttccaatatgattccacccatggcaaattccatggcaccgtcaaggctgagaacgggaagcttgtcatcaatggaaatcccatcaccatcttccaggagcgagatccctccaaaatcaagtggggcgatgctggcgctgagtacgtcgtggagtccactggcgtcttcaccaccatggagaaggctggggctcatttgcaggggggagccaaaagggtcatcatctctgccccctctgctgaygcccccatgttcgtcatgggtgtgaaccatgagaagtatgacaacagcctcaagatcatcagcaatgcctcctgcaccaccaactgcttagcacccctggccaaggtcatccatgacaactttggtatcgtggaaggactcatgaccacagtccatgccatcactgccacccagaagactgtggatggcccctccgggaaactgtggcgtgatggccgcggggctctccagaacatcatccctgcctctactggcgctgccaaggctgtgggcaaggtcatccctgagctgaacgggaagctcactggcatggccttccgtgtccccactgccaacgtgtcagtggtggacctgacctgccgtctagaaaamcctgccaaatatgatgacatcaagaaggtggtgaagcaggcgtcggagggccccytcaagggcrtcytgggctacactgagcaccaggtggtctcctctkacttcaacagcgacacccactcctccaycttygacgctggggctggcattgccctcaacgaccactttgtcaagctcatttcctggtatgacaacgaatttggctacagcaacagggtgrtggacctcatkgcccacatggcctccaaggagtaagacccytggaccaccagccccagcaagagcacaagaggaagagagagaccctcactgctggggagtccctgccacactcagtcccccaccacactgaatctcccctcctcacagttkccatgtagaccccttgaaraggggaggggcctagggagccgcmccttgtcatgtaccatcaataaagtaccctgtgctcaaccagtta

SEQ ID NO: 126 - DNA, 1242 bp, Homo sapiens
gttcgacagtcagccgcatcttcttttgcccgagccacatcgctsagacaccatggggaaggtgaaggtcggagtcaacggatttggtcgtattgggcgcctggtcaccagggctgcttttaactctggtaaagtggatattgttgccatcaatgaccccttcattgacctcaactacatggtttacatgttccaatatgattccacccatggcaaattccatggcaccgtcaaggctgagaacgggaagcttgtcatcaatggaaatcccatcaccatcttccaggagcgagatccctccaaaatcaagtggggcgatgctggcgctgagtacgtcgtggagtccactggcgtcttcaccaccatggagaaggctggggctcatttgcaggggggagccaaaagggtcatcatctctgccccctctgctgaygcccccatgttcgtcatgggtgtgaaccatgagaagtatgacaacagcctcaagatcatcagcaatgcctcctgcaccaccaactgcttagcacccctggccaaggtcatccatgacaactttggtatcgtggaaggactcatgaccacagtccatgccatcactgccacccagaagactgtggatggcccctccgggaaactgtggcgtgatggccgcggggctctccagaacatcatccgctgtgggcaaggtcatccctgagctgaacgggaagctcactggcatggccttccgtgtccccactgccaacgtgtcagtggtggacctgacctgccgtctagaaaamcctgccaaatatgatgacatcaagaaggtggtgaagcaggcgtcggagggccccytcaagggcrtcytgggctacactgagcaccaggtggtctcctctkacttcaacagcgacacccactcctccaycttygacgctggggctggcattgccctcaacgaccactttgtcaagctcatttcctggtatgacaacgaatttggctacagcaacagggtgrtggacctcatkgcccacatggcctccaaggagtaagacccytggaccaccagccccagcaagagcacaagaggaagagagagaccctcactgctggggagtccctgccacactcagtcccccaccacactgaatctcccctcctcacagttkccatgtagaccccttgaaraggggaggggcctagggagccgcmccttgtcatgtaccatcaataaagtaccctgtgctcaaccagtta

SEQ ID NO: 127 - DNA, 1158 bp, Homo sapiens
gttcgacagtcagccgcatcttcttttgcccgagccacatcgctsagacaccatggggaaggtgaaggtcggagtcaacggatttggtcgtattgggcgcctggtcaccagggctgcttttaactctggtaaagtggatattgttgccatcaatgaccccttcattgacctcaactacatggtttacatgttccaatatgattccacccatggcaaattccatggcaccgtcaaggctgagaacgggaagcttgtcatcaatggaaatcccatcaccatcttccaggagcgagatccctccaaaatcaagtggggcgatgctggcgctgagtacgtcgtggagtccactggcgtcttcaccaccatggagaaggctggggctcatttgcaggggggagccaaaagggtcatcatctctgccccctctgctgaygcccccatgttcgtcatgggtgtgaaccatgagaagtatgacaacagcctcaagatcatcagcaatgcctcctgcaccaccaactgcttagcacccctggccaaggtcatccatgacaactttggtatcgtggaaggactcatgaccacagtccatgccatcactgccacccagaagactgtggatggcccctccgggaaactgtggcgtgatggccgcggggctctccagaacatcatccctgcctctactggcgctgccaaggctgtgggcaaggtcatccctgagctgaacgggaagctcactggcatggccttccgtgtccccactgccaacgtgtcagtggtggacctgacctgccgtctagaaaamcctgccaaatatgatgacatcaagaaggtggtgaagcaggcgtcggagggccccytcaagggcrtcytgggctacactgagcaccaggtggtctcctctkacttcaacagcgacacccactcctccaycttygacgctggggctggcattgccctcaacgaccactttgtcaagctcatttcctggtatgacaacgaatttggctacagcaacagggtgrtggacctcatkgcccacatggcctccaaggagtaagacccytggaccaccagccccagcaagagcactcccccaccacactgaatctcccctcctcacagttkccatgtagaccccttgaaraggggaggggc

SEQ ID NO: 128 - DNA, 2402 bp, Homo sapiens
ggccagagaggagccaggagccatgagggtggcattaggcatgctctggctcttggcccttgcgtggcccccccaggcccggggcttctgcccctctcaatgcagctgcagcctccatatcatgggtgatggcagcaaggccaggacagtagtgtgcaacgaccccgacatgaccctgcccccggcgtccatccccccggacacctccagactgcgcctggagcggacggccatacgcagggttcctggcgaggccttcaggcccctgggccgcctggagcagctgtggctgccttacaacgccctcagcgagctcaacgccctcatgctgcggggyctgcgacgcctgcgggagctgcggctgcccgggaaccgcctggccgccttcccctgggcggcgctcagggacgcccccaagctgcggctgctggacctgcaggccaaccgcctctcggctgtgcccgctgaggccgcgcgcttcmtggagaacctcaccttcctcgacctctccagcaaccagctgatgaggctcccgcaggagctcatcgtctcctgggctcacctggagaccggtatctttcctcccggccaccaccccaggcgggtcctagggctacaggacaacccctgggcatgtgactgccgactctatgacctggttcatcttttggatggctgggccccaaacttggccttcattgagactgaactgagatgtgccagcccacgtagcctggccggagtggccttcagccagcttgaactgaggaagtgccagggcccagagctycatcmaggagtggccagcatcaggtcccttttgggtggcacagcaytgctacgctgtggagctactggagtccctgggcccgagatgagctggaggagggccaatggcaggccccttaayggtacagtgcaccaggaagtctccagtgacggcacgagctggactctgctgggcctgcctgcagtgtcccaccttgactccggagactacatctgccaagccaagaacttcctgggagcctctgaaactgttatctccttgattgtcactgagccrccgacttccacagaacacagtgggagcccaggrgcactatgggcaaggacaggtggcggaggggaagctgctgcttacaacaacaagctggtggccaggcatgtcccccagattcccaaamccgctgtcctggccactggaccctctgtgcccagcacaaaggaggagctgacccttgagcacttccagatggatgccctgggagagctctctgatgggcgggcaggaccctcagaggcacgaatggtgaggtctgtgaaggtggtgggggacacttaccacagcgtgtccttggtgtggaaggcaccccaggctaagaacacaactgccttcagtgtcctctacgcggtctttgggcagcacagcatgcggygggtgattgtgcagcctgggaagaccagagtgaccatcactgggctgttgcccaagaccaagtatgtggcgtgtgtctgtgtgcagggcctggtgccccggaaggagcagtgtgttattttctccaccaatgaagtggtggatgctgagaacactcagcagcttatcaatgtggtggtgatcagtgtggccatcgtcattgccctgcctctcacgctgcttgtctgctgcagtgctcttcagaagcgctgccgaaagtgcttcaacaaggactccactgaggccacagttacctacgtcaacctagagagactgggctacagcgaggacggcttggaggagctgtcccggcacrgtgtcagcgaggctgacaggcttctctcagctcgttccagtgtggactttcaggcctttggagtcaaagggggcaggagaatcaatgagtacttctgctgagggatatgcctccgcaactcacamacctgcctgcccacgctccttctttagytctgacacctgagtacrcgatcacccactcttacctgctcgggtacctgcttactcagatacttacacacaacaacagcagcagcagctgctactgcaacaaccgctaacacttgttaagcacttactacagactagaaagtgttctaagtgctaaattcttgtaacaatcatttgcagcaggcatcactattctctccatttccctggggtggggggttaagaaacttgcctgtatcagtcagcttttgctgtataacaaatgaaagcaaaatcttggtgatgtatagcagtgaacacttattttcacactcacaggcctgtgggttgattagggtggctctgctctgtgtgtttcatttggagcctgggctggagagtagcagtgggtacctrgggcaggtttctctcgtggtgaggttgaatgataatagaggaatgattgttcatgcaatgc

SEQ ID NO: 129 - DNA, 505 bp, Homo sapiens
accgatgaatgggattagtgcccttacaaaaggggcccaccaaagctgccttgttccttctactatgtgaggacacatctagaagttaccatcaatgaaccagaaagtgggccctcaccaggcaccaaatctgccagcactctgatcttggacttccagcctcctgaactgttgtstgcattcaaaagagcattctattaaagctaccttaatttggcgcttatttttcttaatcatgtttctgacaatcatagtgtgtggaatggttgctgctttaagygcaataagagctaactgccatcaagagccatcagtatgtcttcaagctgcatgcccagaaagctggattggttttcaaagaaagtgtttctatttttctgatgacaccaagaactggacatcaagtcagaggttttgtgactcacaagatgctgatcttgctcaggttgaaagcttccaggaactggtttcctatcctgggagcaggagagtgtgcctatttgaa

SEQ ID NO: 130 - DNA, 2706 bp, Homo sapiens
accgatgaatgggattagtgcccttacaaaaggggcccaccaaagctgccttgttccttctactatgtgaggacacatctagaagttaccatcaatgaaccagaaagtgggccctcaccaggcaccaaatctgccagcactctgatcttggacttccagcctcctgaactgttgtstgcattcaaaagagcattctattaaagctaccttaatttggcgcttatttttcttaatcatgtttctgacaatcatagtgtgtggaatggttgctgctttaagygcaataagagctaactgccatcaagagccatcagtatgtcttcaagctgcatgcccagaaagctggattggttttcaaagaaagtgtttctatttttctgatgacaccaagaactggacatcaagtcagaggttttgtgactcacaagatgctgatcttgctcaggttgaaagcttccaggaactgaatttcctgttgagatataaaggcccatctgatcactggattgggctgagcagagaacaaggccaaccatggaaatggataaatggtactgaatggacaagacagttagtcatgaaagaagatggtgccaacttgtatgttgcaaaggtttcacaagttcctcgaatgaatccaagacctgtcatggtttcctatcctgggagcaggagagtgtgcctatttgaatgacaaaggtgccagtagtgccaggcactacacagagaggaagtggatttgttccaaatcagatatacatgtctagatgttacagcaaagccccaactaatctttagaagcatattggaactgataactccattttaaaatgagcaaagaatttatttcttataccaacaggtatatgaaaatrtgctcaatatcactaataactgggaaaatacaaatcaaaatcatagtaaaatattacctgttttcatggtgctaatattacctgttctcccactgctaatgacatacccgagactgagtaatttataaataaaagagatttaattgactcatagttccacatggctggggaggtcttgcaatcatgacagaaggcaaatgggaagcaaagtcatgtcttatgtggtggcrggcagggggacttgtgcacaggaactcctatttatacaaccatcagatatcttgagacaagaacagtatggggctccctggtgtgattccgtcctgcgcggctgttctctggagcagcattcatttatcttcgtctgccttgtctcctacctaagtgtgtgtcgccacccgatggaagattygatggacatggacatgagccccctgaggccccagaactatcttttcagttgtgaactaaaggccgacaaagatgatcactttaaggtggataatgatgaaaatgagaccagttatctttaagaacggtcagctcaggggctggtgcaaaggatgaactgcrcattgttgaagcagaggccatgaatgaygaaggcagtccaattaaagtaacactggcaactttgaaaatgtctgtacagccaacggtttytcttgggggctttgaaataacaccaccagtggacttaaggttgaagtgtggttcagggccagtgcatattagtggacagcacttagtagctgtgaaggaaggtgcagagtcagaagatgaagaagaggaggatgtgaaactcttaagtatatctggaaagcagtctgcccctggaggtggtgctgctgmtgmtgatgatgawgawgatgatgatgatgatgatgacgaggaagctgaagaaaaagcgccagtgaagaaatctatacgagatactccagccaaaaatgcacaaaagtcaaatcagaatggaaaagactcaaaaccatcatcaacaccaagatcaaaaggacaagaatccttcaaaaaacaggaaaaatctcctraaacaccaaaaggatctagttctgtagaagacattaaagcaaaaatgcaagcaagtatagaaaaacgtggttctcttcccaaagtggaaaccaagttcatcaattatgtgaagaatttcttctggatgactgaccaagaggctattcaagatctctggcagtggaggaagtctctttaagaaacrgttgatatctggctgtcctttttatagtgcagagtgagaactttccctaccatgtttgataaatgttgtccaggttctattgccaagaatgtgttgtccaaaatgcctgtttagtttttaaagatggaactccaccctttgcttggttttaagtatgtatgggatgctatgataggacatagtagtagcagtggtcagacatggaaatggtggggagacaaaagtatacacgtgaaataaaactcagtattttaataaagtaaaaaaaaaaaaaaggtatggggaaaactgcccccataaagcaattgtctccacctggccctgccctttgcatgtggagattattacaattcaaggtgaaatttgggtggagacacaaccaaaccatatyagatggctatatcaaaaagacaagaaataacaagcattggtgagagtgtggagaagacggaacccttgtacacagttggtgggaacacagtttggtgcagccattatagaaaacgtcatggaggttcctaaagaaattagaaatgaaatcaccacctcataaagatatctgctttcctgtttattataacacatctttattcataatag

SEQ ID NO: 131 - DNA, 2542 bp, Homo sapiens
cactcatagaaactggaggcaaaatgcatgacagtaacaatgtggagaaagacattacaccatctgaattgcctgcaaasccaggttgtstgcattcaaaagagcattctattaaagctaccttaatttggcgcttatttttcttaatcatgtttctgacaatcatagtgtgtggaatggttgctgctttaagygcaataagagctaactgccatcaagagccatcagtatgtcttcaagctgcatgcccagaaagctggattggttttcaaagaaagtgtttctatttttctgatgacaccaagaactggacatcaagtcagaggttttgtgactcacaagatgctgatcttgctcaggttgaaagcttccaggaactgaatttcctgttgagatataaaggcccatctgatcactggattgggctgagcagagaacaaggccaaccatggaaatggataaatggtactgaatggacaagacagtttcctatcctgggagcaggagagtgtgcctatttgaatgacaaaggtgccagtagtgccaggcactacacagagaggaagtggatttgttccaaatcagatatacatgtctagatgttacagcaaagccccaactaatctttagaagcatattggaactgataactccattttaaaatgagcaaagaatttatttcttataccaacaggtatatgaaaatrtgctcaatatcactaataactgggaaaatacaaatcaaaatcatagtaaaatattacctgttttcatggtgctaatattacctgttctcccactgctaatgacatacccgagactgagtaatttataaataaaagagatttaattgactcatagttccacatggctggggaggtcttgcaatcatgacagaaggcaaatgggaagcaaagtcatgtcttatgtggtggcrggcagggggacttgtgcacaggaactcctatttatacaaccatcagatatcttgagacaagaacagtatggggctccctggtgtgattccgtcctgcgcggctgttctctggagcagcattcatttatcttcgtctgccttgtctcctacctaagtgtgtgtcgccacccgatggaagattygatggacatggacatgagccccctgaggccccagaactatcttttcagttgtgaactaaaggccgacaaagatgatcactttaaggtggataatgatgaaaatgagaccagttatctttaagaacggtcagctcaggggctggtgcaaaggatgaactgcrcattgttgaagcagaggccatgaatgaygaaggcagtccaattaaagtaacactggcaactttgaaaatgtctgtacagccaacggtttytcttgggggctttgaaataacaccaccagtggacttaaggttgaagtgtggttcagggccagtgcatattagtggacagcacttagtagctgtgaaggaaggtgcagagtcagaagatgaagaagaggaggatgtgaaactcttaagtatatctggaaagcagtctgcccctggaggtgggcagaaaaaagtaaaacttbctgctgctgctgmtgmtgatgatgawgawgatgatgatgatgatgatgacgaggaagctgaagaaaaagcgccagtgaagaaatctatacgagatactccagccaaaaatgcacaaaagtcaaatcagaatggaaaagactcaaaaccatcatcaacaccaagatcaaaaggacaagaatccttcaaaaaacaggaaaaatctcctraaacaccaaaaggatctagttctgtagaagacattaaagcaaaaatgcaagcaagtatagaaaaacgtggttctcttcccaaagtggaaaccaagttcatcaattatgtgaagaatttcttctggatgactgaccaagaggctattcaagatctctggcagtggaggaagtctctttaagaaaatagtttaaacaatttgttaaaaattttccatcttatttcatttctgtaacrgttgatatctggctgtcctttttatagtgcagagtgagaactttccctaccatgtttgataaatgttgtccaggttctattgccaagaatgtgttgtccaaaatgcctgtttagtttttaaagatggaactccaccctttgcttggttttaagtatgtatgggatgctatgataggacatagtagtagcagtggtcagacatggaaatggtggggagacaaaagtatacacgtgaaataaaactcagtattttaataaagtaaaaaaaaaaaaaaggtatggggaaaactgcccccataaagcaattgtctccacctggccctgccctttgcatgtggagattattacaattcaaggtgaaatttgggtggagacacaaccaaaccatatyagatggctatatcaaaaagacaagaaataacaagcattggtgagagtgtggagaagacggaacccttgtacacagttggtgggaacacagtttggtgcagccattatagaaaacgtcatggaggttcctaaagaaatta

SEQ ID NO: 132 - DNA, 2595 bp, Homo sapiens
accgatgaatgggattagtgcccttacaaaaggggcccaccaaagctgccttgttccttctactatgtgaggacacatctagaagttaccatcaatgaaccagaaagtgggccctcaccaggcaccaaatctgccagcactctgatcttggacttccagcctcctgaactgttgtstgcattcaaaagagcattctattaaagctaccttaatttggcgcttatttttcttaatcatgtttctgacaatcatagtgtgtggaatggttgctgctttaagygcaataagagctaactgccatcaagagccatcagtatgtcttcaagctgcatgcccagaaagctggattggttttcaaagaaagtgtttctatttttctgatgacaccaagaactggacatcaagtcagaggttttgtgactcacaagatgctgatcttgctcaggttgaaagcttccaggaactgaatttcctgttgagatataaaggcccatctgatcactggattgggctgagcagagaacaaggccaaccatggaaatggataaatggtactgaatggacaagacagtttcctatcctgggagcaggagagtgtgcctatttgaatgacaaaggtgccagtagtgccaggcactacacagagaggaagtggatttgttccaaatcagatatacatgtctagatgttacagcaaagccccaactaatctttagaagcatattggaactgataactccattttaaaatgagcaaagaatttatttcttataccaacaggtatatgaaaatrtgctcaatatcactaataactgggaaaatacaaatcaaaatcatagtaaaatattacctgttttcatggtgctaatattacctgttctcccactgctaatgacatacccgagactgagtaatttataaataaaagagatttaattgactcatagttccacatggctggggaggtcttgcaatcatgacagaaggcaaatgggaagcaaagtcatgtcttatgtggtggcrggcagggggacttgtgcacaggaactcctatttatacaaccatcagatatcttgagacaagaacagtatggggctccctggtgtgattccgtcctgcgcggctgttctctggagcagcattcatttatcttcgtctgccttgtctcctacctaagtgtgtgtcgccacccgatggaagattygatggacatggacatgagccccctgaggccccagaactatcttttcagttgtgaactaaaggccgacaaagatgatcactttaaggtggataatgatgaaaatgagaccagttatctttaagaacggtcagctcaggggctggtgcaaaggatgaactgcrcattgttgaagcagaggccatgaatgaygaaggcagtccaattaaagtaacactggcaactttgaaaatgtctgtacagccaacggtttytcttgggggctttgaaataacaccaccagtggacttaaggttgaagtgtggttcagggccagtgcatattagtggacagcacttagtagctgtgaaggaaggtgcagagtcagaagatgaagaagaggaggatgtgaaactcttaagtatatctggaaagcagtctgcccctggaggtggmgmtgatgatgawgawgatgatgatgatgatgatgacgaggaagctgaagaaaaagcgccagtgaagaaatctatacgagatactccagccaaaaatgcacaaaagtcaaatcagaatggaaaagactcaaaaccatcatcaacaccaagatcaaaaggacaagaatccttcaaaaaacaggaaaaatctcctraaacaccaaaaggatctagttctgtagaagacattaaagcaaaaatgcaagcaagtatagaaaaacgtggttctcttcccaaagtggaaaccaagttcatcaattatgtgaagaatttcttctggatgactgaccaagaggctattcaagatctctggcagtggaggaagtctctttaagaaaatagtttaaacaatttgttaaaaattttccatcttatttcatttctgtaacrgttgatatctggctgtcctttttatagtgcagagtgagaactttccctaccatgtttgataaatgttgtccaggttctattgccaagaatgtgttgtccaaaatgcctgtttagtttttaaagatggaactccaccctttgcttggttttaagtatgtatgggatgctatgataggacatagtagtagcagtggtcagacatggaaatggtggggagacaaaagtatacacgtgaaataaaactcagtattttaataaagtaaaaaaaaaaaaaaggtatggggaaaactgcccccataaagcaattgtctccacctggccctgccctttgcatgtggagattattacaattcaaggtgaaatttgggtggagacacaaccaaaccatatyagatggctatatcaaaaagacaagaaataacaagcattggtgagagtgtggagaagacggaacccttgtacacagttggtgggaacacagtttggtgcagccattatagaaaacgtcatggaggttcctaaagaaatta

SEQ ID NO: 133 - DNA, 2582 bp, Homo sapiens
accgatgaatgggattagtgcccttacaaaaggggcccaccaaagctgccttgttccttctactatgtgaggacacatctagaagttaccatcaatgaaccagaaagtgggccctcaccaggcaccaaatctgccagcactctgatcttggacttccagcctcctgaactgttgtstgcattcaaaagagcattctattaaagctaccttaatttggcgcttatttttcttaatcatgtttctgacaatcatagtgtgtggaatggttgctgctttaagygcaataagagctaactgccatcaagagccatcagtatgtcttcaagctgcatgcccagaaagctggattggttttcaaagaaagtgtttctatttttctgatgacaccaagaactggacatcaagtcagaggttttgtgactcacaagatgctgatcttgctcaggttgaaagcttccaggaactgaatttcctgttgagatataaaggcccatctgatcactggattgggctgagcagagaacaaggccaaccatggaaatggataaatggtactgaatggacaagacagtttcctatcctgggagcaggagagtgtgcctatttgaatgacaaaggtgccagtagtgccaggcactacacagagaggaagtggatttgttccaaatcagatatacatgtctagatgttacagcaaagccccaactaatctttagaagcatattggaactgataactccattttaaaatgagcaaagaatttatttcttataccaacaggtatatgaaaatrtgctcaatatcactaataactgggaaaatacaaatcaaaatcatagtaaaatattacctgttttcatggtgctaatattacctgttctcccactgctaatgacatacccgagactgagtaatttataaataaaagagatttaattgactcatagttccacatggctggggaggtcttgcaatcatgacagaaggcaaatgggaagcaaagtcatgtcttatgtggtggcrggcagggggacttgtgcacaggaactcctatttatacaaccatcagatatcttgagacaagaacagtatggggctccctggtgtgattccgtcctgcgcggctgttctctggagcagcattcatttatcttcgtctgccttgtctcctacctaagtgtgtgtcgccacccgatggaagattygatggacatggacatgagccccctgaggccccagaactatcttttcagttgtgaactaaaggccgacaaagatgatcactttaaggtggataatgatgaaaatgagaccagttatctttaagaacggtcagctcaggggctggtgcaaaggatgaactgcrcattgttgaagcagaggccatgaatgaygaaggcagtccaattaaagtaacactggcaactttgaaaatgtctgtacagccaacggtttytcttgggggctttgaaataacaccaccagtggacttaaggttgaagtgtggttcagggccagtgcatattagtggacagcacttagtagctgtgaaggaaggtgcagagtcagaagatgaagaagaggaggatgtgaaactcttaagtatatctggaaagctgctgmtgmtgatgatgawgawgatgatgatgatgatgatgacgaggaagctgaagaaaaagcgccagtgaagaaatctatacgagatactccagccaaaaatgcacaaaagtcaaatcagaatggaaaagactcaaaaccatcatcaacaccaagatcaaaaggacaagaatccttcaaaaaacaggaaaaatctcctraaacaccaaaaggatctagttctgtagaagacattaaagcaaaaatgcaagcaagtatagaaaaacgtggttctcttcccaaagtggaaaccaagttcatcaattatgtgaagaatttcttctggatgactgaccaagaggctattcaagatctctggcagtggaggaagtctctttaagaaaatagtttaaacaatttgttaaaaattttccatcttatttcatttctgtaacrgttgatatctggctgtcctttttatagtgcagagtgagaactttccctaccatgtttgataaatgttgtccaggttctattgccaagaatgtgttgtccaaaatgcctgtttagtttttaaagatggaactccaccctttgcttggttttaagtatgtatgggatgctatgataggacatagtagtagcagtggtcagacatggaaatggtggggagacaaaagtatacacgtgaaataaaactcagtattttaataaagtaaaaaaaaaaaaaaggtatggggaaaactgcccccataaagcaattgtctccacctggccctgccctttgcatgtggagattattacaattcaaggtgaaatttgggtggagacacaaccaaaccatatyagatggctatatcaaaaagacaagaaataacaagcattggtgagagtgtggagaagacggaacccttgtacacagttggtgggaacacagtttggtgcagccattatagaaaacgtcatggaggttcctaaagaaatta

SEQ ID NO: 134 - DNA, 2025 bp, Homo sapiens
gtttcctatcctgggagcaggagagtgtgcctatttgaatgacaaaggtgccagtagtgccaggcactacacagagaggaagtggatttgttccaaatcagatatacatgtctagatgttacagcaaagccccaactaatctttagaagcatattggaactgataactccattttaaaatgagcaaagaatttatttcttataccaacaggtatatgaaaatrtgctcaatatcactaataactgggaaaatacaaatcaaaatcatagtaaaatattacctgttttcatggtgctaatattacctgttctcccactgctaatgacatacccgagactgagtaatttataaataaaagagatttaattgactcatagttccacatggctggggaggtcttgcaatcatgacagaaggcaaatgggaagcaaagtcatgtcttatgtggtggcrggcagggggacttgtgcacaggaactcctatttatacaaccatcagatatcttgagacaagaacagtatggggctccctggtgtgattccgtcctgcgcggctgttctctggagcagcattcatttatcttcgtctgccttgtctcctacctaagtgtgtgtcgccacccgatggaagattygatggacatggacatgagccccctgaggccccagaactatcttttcagttgtgaactaaaggccgacaaagatgatcactttaaggtggataatgatgaaaatgagaccagttatctttaagaacggtcagctcaggggctggtgcaaaggatgaactgcrcattgttgaagcagaggccatgaatgaygaaggcagtccaattaaagtaacactggcaactttgaaaatgtctgtacagccaacggtttytcttgggggctttgaaataacaccaccagtggacttaaggttgaagtgtggttcagggccagtgcatattagtggacagcacttagtagctgtgaaggaaggtgcagagtcagaagatgaagaagaggaggatgtgaaactcttaagtatatctggaaagcagtctgcccctggaggtggmgmtgatgatgawgawgatgatgatgatgatgatgacgaggaagctgaagaaaaagcgccagtgaagaaatctatacgagatactccagccaaaaatgcacaaaagtcaaatcagaatggaaaagactcaaaaccatcatcaacaccaagatcaaaaggacaagaatccttcaaaaaacaggaaaaatctcctraaacaccaaaaggatctagttctgtagaagacattaaagcaaaaatgcaagcaagtatagaaaaacgtggttctcttcccaaagtggaaaccaagttcatcaattatgtgaagaatttcttctggatgactgaccaagaggctattcaagatctctggcagtggaggaagtctctttaagaaaatagtttaaacaatttgttaaaaattttccatcttatttcatttctgtaacrgttgatatctggctgtcctttttatagtgcagagtgagaactttccctaccatgtttgataaatgttgtccaggttctattgccaagaatgtgttgtccaaaatgcctgtttagtttttaaagatggaactccaccctttgcttggttttaagtatgtatgggatgctatgataggacatagtagtagcagtggtcagacatggaaatggtggggagacaaaagtatacacgtgaaataaaactcagtattttaataaagtaaaaaaaaaaaaaaggtatggggaaaactgcccccataaagcaattgtctccacctggccctgccctttgcatgtggagattattacaattcaaggtgaaatttgggtggagacacaaccaaaccatatyagatggctatatcaaaaagacaagaaataacaagcattggtgagagtgtggagaagacggaacccttgtacacagttggtgggaacacagtttggtgcagccattatagaaaacgtcatggaggttcctaaagaaatta

SEQ ID NO: 135 - DNA, 2628 bp, Homo sapiens
accgatgaatgggattagtgcccttacaaaaggggcccaccaaagctgccttgttccttctactatgtgaggacacatctagaagttaccatcaatgaaccagaaagtgggccctcaccaggcaccaaatctgccagcactctgatcttggacttccagcctcctgaactgttgtstgcattcaaaagagcattctattaaagctaccttaatttggcgcttatttttcttaatcatgtttctgacaatcatagtgtgtggaatggttgctgctttaagygcaataagagctaactgccatcaagagccatcagtatgtcttcaagctgcatgcccagaaagctggattggttttcaaagaaagtgtttctatttttctgatgacaccaagaactggacatcaagtcagaggttttgtgactcacaagatgctgatcttgctcaggttgaaagcttccaggaactgaatttcctgttgagatataaaggcccatctgatcactggattgggctgagcagagaacaaggccaaccatggaaatggataaatggtactgaatggacaagacagtttcctatcctgggagcaggagagtgtgcctatttgaatgacaaaggtgccagtagtgccaggcactacacagagaggaagtggatttgttccaaatcagatatacatgtctagatgttacagcaaagccccaactaatctttagaagcatattggaactgataactccattttaaaatgagcaaagaatttatttcttataccaacaggtatatgaaaatrtgctcaatatcactaataactgggaaaatacaaatcaaaatcatagtaaaatattacctgttttcatggtgctaatattacctgttctcccactgctaatgacatacccgagactgagtaatttataaataaaagagatttaattgactcatagttccacatggctggggaggtcttgcaatcatgacagaaggcaaatgggaagcaaagtcatgtcttatgtggtggcrggcagggggacttgtgcacaggaactcctatttatacaaccatcagatatcttgagacaagaacagtatggggctccctggtgtgattccgtcctgcgcggctgttctctggagcagcattcatttatcttcgtctgccttgtctcctacctaagtgtgtgtcgccacccgatggaagattygatggacatggacatgagccccctgaggccccagaactatcttttcagttgtgaactaaaggccgacaaagatgatcactttaaggtggataatgatgaaaatgagaccagttatctttaagaacggtcagctcaggggctggtgcaaaggatgaactgcrcattgttgaagcagaggccatgaatgaygaaggcagtccaattaaagtaacactggcaactttgaaaatgtctgtacagccaacggtttytcttgggggctttgaaataacaccaccagtggacttaaggttgaagtgtggttcagggccagtgcatattagtggacagcacttagtagctgtgaaggaaggtgcagagtcagaagatgaagaagaggaggatgtgaaactcttaagtatatctggaaagcagtctgcccctggaggtgggcagaaaaaagtaaaacttbctgctgctgctgmtgmtgatgatgawgawgatgatgatgatgatgatgacgaggaagctgaagaaaaagcgccagtgaagaaatctatacgagatactccagccaaaaatgcacaaaagtcaaatcagaatggaaaagactcaaaaccatcatcaacaccaagatcaaaaggacaagaatccttcaaaaaacaggaaaaatctcctraaacaccaaaaggatctagttctgtagaagacattaaagcaaaaatgcaagcaagtatagaaaaacgtggttctcttcccaaagtggaaaccaagttcatcaattatgtgaagaatttcttctggatgactgaccaagaggctattcaagatctctggcagtggaggaagtctctttaagaaaatagtttaaacaatttgttaaaaattttccatcttatttcatttctgtaacrgttgatatctggctgtcctttttatagtgcagagtgagaactttccctaccatgtttgataaatgttgtccaggttctattgccaagaatgtgttgtccaaaatgcctgtttagtttttaaagatggaactccaccctttgcttggttttaagtatgtatgggatgctatgataggacatagtagtagcagtggtcagacatggaaatggtggggagacaaaagtatacacgtgaaataaaactcagtattttaataaagtaaaaaaaaaaaaaaggtatggggaaaactgcccccataaagcaattgtctccacctggccctgccctttgcatgtggagattattacaattcaaggtgaaatttgggtggagacacaaccaaaccatatyagatggctatatcaaaaagacaagaaataacaagcattggtgagagtgtggagaagacggaacccttgtacacagttggtgggaacacagtttggtgcagccattatagaaaacgtcatggaggttcctaaagaaatta

SEQ ID NO: 136 - DNA, 2536 bp, Homo sapiens
cactcatagaaactggaggcaaaatgcatgacagtaacaatgtggagaaagacattacaccatctgaattgcctgcaaasccaggttgtstgcattcaaaagagcattctattaaagctaccttaatttggcgcttatttttcttaatcatgtttctgacaatcatagtgtgtggaatggttgctgctttaagygcaataagagctaactgccatcaagagccatcagtatgtcttcaagctgcatgcccagaaagctggattggttttcaaagaaagtgtttctatttttctgatgacaccaagaactggacatcaagtcagaggttttgtgactcacaagatgctgatcttgctcaggttgaaagcttccaggaactgaatttcctgttgagatataaaggcccatctgatcactggattgggctgagcagagaacaaggccaaccatggaaatggataaatggtactgaatggacaagacagtttcctatcctgggagcaggagagtgtgcctatttgaatgacaaaggtgccagtagtgccaggcactacacagagaggaagtggatttgttccaaatcagatatacatgtctagatgttacagcaaagccccaactaatctttagaagcatattggaactgataactccattttaaaatgagcaaagaatttatttcttataccaacaggtatatgaaaatrtgctcaatatcactaataactgggaaaatacaaatcaaaatcatagtaaaatattacctgttttcatggtgctaatattacctgttctcccactgctaatgacatacccgagactgagtaatttataaataaaagagatttaattgactcatagttccacatggctggggaggtcttgcaatcatgacagaaggcaaatgggaagcaaagtcatgtcttatgtggtggcrggcagggggacttgtgcacaggaactcctatttatacaaccatcagatatcttgagacaagaacagtatggggctccctggtgtgattccgtcctgcgcggctgttctctggagcagcattcatttatcttcgtctgccttgtctcctacctaagtgtgtgtcgccacccgatggaagattygatggacatggacatgagccccctgaggccccagaactatcttttcagttgtgaactaaaggccgacaaagatgatcactttaaggtggataatgatgaaaatgagaccagttatctttaagaacggtcagctcaggggctggtgcaaaggatgaactgcrcattgttgaagcagaggccatgaatgaygaaggcagtccaattaaagtaacactggcaactttgaaaatgtctgtacagccaacggtttytcttgggggctttgaaataacaccaccagtggacttaaggttgaagtgtggttcagggccagtgcatattagtggacagcacttagtagctgtgaaggaaggtgcagagtcagaagatgaagaagaggaggatgtgaaactcttaagtatatctggaaagcagtctgcccctggaggtgggcatgmtgatgatgawgawgatgatgatgatgatgatgacgaggaagctgaagaaaaagcgccagtgaagaaatctatacgagatactccagccaaaaatgcacaaaagtcaaatcagaatggaaaagactcaaaaccatcatcaacaccaagatcaaaaggacaagaatccttcaaaaagacattaaagcaaaaatgcaagcaagtatagaaaaacgtggttctcttcccaaagtggaaaccaagttcatcaattatgtgaagaatttcttctggatgactgaccaagaggctattcaagatctctggcagtggaggaagtctctttaagaaaatagtttaaacaatttgttaaaaattttccatcttatttcatttctgtaacrgttgatatctggctgtcctttttatagtgcagagtgagaactttccctaccatgtttgataaatgttgtccaggttctattgccaagaatgtgttgtccaaaatgcctgtttagtttttaaagatggaactccaccctttgcttggttttaagtatgtatgggatgctatgataggacatagtagtagcagtggtcagacatggaaatggtggggagacaaaagtatacacgtgaaataaaactcagtattttaataaagtaaaaaaaaaaaaaaggtatggggaaaactgcccccataaagcaattgtctccacctggccctgccctttgcatgtggagattattacaattcaaggtgaaatttgggtggagacacaaccaaaccatatyagatggctatatcaaaaagacaagaaataacaagcattggtgagagtgtggagaagacggaacccttgtacacagttggtgggaacacagtttggtgcagccattatagaaaacgtcatggaggttcctaaagaaattagaaatgaaatcaccacctcataaagatatctgctttcctgtttattataacacatctttattcataatam

SEQ ID NO: 137 - DNA, 2710 bp, Homo sapiens
accgatgaatgggattagtgcccttacaaaaggggcccaccaaagctgccttgttccttctactatgtgaggacacatctagaagttaccatcaatgaaccagaaagtgggccctcaccaggcaccaaatctgccagcactctgatcttggacttccagcctcctgaactgttgtstgcattcaaaagagcattctattaaagctaccttaatttggcgcttatttttcttaatcatgtttctgacaatcatagtgtgtggaatggttgctgctttaagygcaataagagctaactgccatcaagagccatcagtatgtcttcaagctgcatgcccagaaagctggattggttttcaaagaaagtgtttctatttttctgatgacaccaagaactggacatcaagtcagaggttttgtgactcacaagatgctgatcttgctcaggttgaaagcttccaggaactgaatttcctgttgagatataaaggcccatctgatcactggattgggctgagcagagaacaaggccaaccatggaaatggataaatggtactgaatggacaagacagttagtcatgaaagaagatggtgccaacttgtatgttgcaaaggtttcacaagttcctcgaatgaatccaagacctgtcatggtttcctatcctgggagcaggagagtgtgcctatttgaatgacaaaggtgccagtagtgccaggcactacacagagaggaagtggatttgttccaaatcagatatacatgtctagatgttacagcaaagccccaactaatctttagaagcatattggaactgataactccattttaaaatgagcaaagaatttatttcttataccaacaggtatatgaaaatrtgctcaatatcactaataactgggaaaatacaaatcaaaatcatagtaaaatattacctgttttcatggtgctaatattacctgttctcccactgctaatgacatacccgagactgagtaatttataaataaaagagatttaattgactcatagttccacatggctggggaggtcttgcaatcatgacagaaggcaaatgggaagcaaagtcatgtcttatgtggtggcrggcagggggacttgtgcacaggaactcctatttatacaaccatcagatatcttgagacaagaacagtatggggctccctggtgtgattccgtcctgcgcggctgttctctggagcagcattcatttatcttcgtctgccttgtctcctacctaagtgtgtgtcgccacccgatggaagattygatggacatggacatgagccccctgaggccccagaactatcttttcagttgtgaactaaaggccgacaaagatgatcactttaaggtggataatgatgaaaatgagaccagttatctttaagaacggtcagctcaggggctggtgcaaaggatgaactgcrcattgttgaagcagaggccatgaatgaygaaggcagtccaattaaagtaacactggcaactttgaaaatgtctgtacagccaacggtttytcttgggggctttgaaataacaccaccagtggacttaaggttgaagtgtggttcagggccagtgcatattagtggacagcacttagtagctgtgaaggaaggtgcagagtcagaagatgaagaagaggaggatgtgaaactcttaagtatatctggaaagcagtctgcccctggaggtgggcagaaaaaagtaaaacttbctgctgctgctgmtgmtgatgatgawgawgatgatgatgatgatgatgacgaggaagctgaagaaaaagcgccagtgaagaaatctatacgagatactccagccaaaaatgcacaaaagtcaaatcagaatggaaaagactcaaaaccatcatcaacaccaagatcaaaaggacaagaatccttcaaaaaacaggaaaaatctcctraaacaccaaaaggatctagttctgtagaagacattaaagcaaaaatgcaagcaagtatagaaaaacgtggttctcttcccaaagtggaaaccaagttcatcaattatgtgaagaatttcttctggatgactgaccaagaggctattcaagatctctggcagtggaggaagtctctttaagaaaatagtttaaacaatttgttaaaaattttccatcttatttcatttctgtaacrgttgatatctggctgtcctttttatagtgcagagtgagaactttccctaccatgtttgataaatgttgtccaggttctattgccaagaatgtgttgtccaaaatgcctgtttagtttttaaagatggaactccaccctttgcttggttttaagtatgtatgggatgctatgataggacatagtagtagcagtggtcagacatggaaatggtggggagacaaaagtatacacgtgaaataaaactcagtattttaataaagtaaaaaaaaaaaaaaggtatggggaaaactgcccccataaagcaattgtctccacctggccctgccctttgcatgtggagattattacaattcaaggtgaaatttgggtggagacacaaccaaaccatatyagatggctatatcaaaaagacaagaaataacaagcattggtgagagtgtggagaagacggaacccttgtacacagttggtgggaacacagtttggtgcagccattatagaaaacgtcatggaggttcctaaagaaatta

SEQ ID NO: 138 - DNA, 2670 bp, Homo sapiens
ggcctgtcgtccgggcaacccgggagmgtttgtccacacaatttctgctccgactctgcggactactgcagtggagcttgactcttaatgtctggcagtaagaaaaagaaagtcaccaaagctgaacgattgaagctgctacaagaggaggaggagagacgactgaaagaggaagttactgtcttgaagaaaggagaactgacacttttctcatatctaccatgtaataaagactgtgacttctataaaagattccaccactacatcttgaaaatattaggagtaattttaagggcttaaaaatacagtgatctattcactgagaaaaaaattatttttggttctttagaggaagccmgtttgaaatatgagaaagaagaaatggaaaggcttgaaatacagcgaattgagaaagaaaaatggcatcgacttgaagcaaaagatctagaaaggagaaatgaagaacttgaagaactttatttattagagaggtgttttcctgaagcagagaaattgaaacaggaaactaaattgctttctcagtggaagcactacattcaatgtgatgggagtcctgatccttcagtagcccaagaaatgaacacgtttattagtttgtggaaagagaaaacaaatgagacttttgaggaagtgattgagaagagtaaagtagtgctaaatttaattgagaaattgaaatttattttactggaaactccaccatgtgatttgcaagataaaaatataatacagtaccaagaatcaatactacaactgcaggagctccttcatcttaaattcggtgtagccacagaaatacttctcaaacaagctagtactttggcagatctggacagtggaaatatggaaaaagtcattaaagatgaaaatgttactctgtatgtgtgggcaaacctcaagaagaatccaaggcacagaagtgttagattctctgaaacacaaattggatttgagattccaaggatattagcaacaagtgacattgctgtacgactcctgcatacccactatgatcatgtttctgcactgcaccctgtttcaacaccatcaaaagaatacacttctgcagtaactgagcttgtcaaagatgatgttaagaatgtagaaaaagcaatcagcaaggaggtcgaagaagagtccaaacaacaagaaagagggtctcacttaattcaggaggaagaaataaaagttgaggaggaacaaggtgatattgaagtgaaaatgagttctgctgaggaagaatctgaagccataaaatgtgaacgagagatgaaagtattaagtgaaactgtttcagcagcacagttgttgctggtagagaattcttctgaaaagccagatttctttgaagacaatgtggtggatttatgccagttcacaactctgggtggagtataccacttggatattttggagcttcctccacagtgtaaaccagtgaagggatggatgattgtggaaatactcaaagaaggattacagaaatacacatatcctccggaaactacagaagagtttgagacagaaaatgctttcccacctatagaggtcacacttgaggttcatgagaatgtaatcttttttgaggatcctgtggttgtaaggtgggatgctgaaggtaaacattggagaactgatggcatcagcaatgtatcctacaaaccaaaagaaagacttgtaacattcagcctggacacctttggccctgttaccttgattcaagatgctcatattaacatgccgtaccagtcatgggaactaagaccacttgatgtaaataaagtacttttaactgtgactacagtatttrctgagattcaaatacaaattaaggaaaacctctgcatgttatcttcaatcaaactaaaagacaagaaacacatctctattttggaaggaacctggatgactcctrttcctttcattattgctttgaaagaagctggactgaatatctttcctactagacactctcatttttatgttattataaacaataaggttcctttggtagaagtgaaagcttatcgacagatggccctactaagttctgcttttgcatttggttggagcaagtggaacctactatgtaattctacaaaagtcgtatttaaggkgagggaacmccttactgaagaatgtactgagaatcctaattgggcccttttaatgtttagtggtgacagagcacaaagactgaagatcaaggaagagagtgaggcattttctgaagcacttaaagaagaaactgagtttcattctactttatatcacatggtgaaggattttgcttctgaggaagcaatggagaaagtcaggagttccaactgtcagtttgtcaactctgtgtgccacatgctgctctctaccagattgctcagctactcctaacctccacttacaaactgtattgtaagtatgaagaaccaagcatggtgaaagacaggtatttctgcaacacaatgtaatgagtgaatgaatacatttcaaatcaactattaaaaattttctaatctgcattttctactcaagttttattttaaaaacagtatttttttttcctttgaatacttggcctgttaagaatttcagctttcactctatsaagatttaaatgattctttatttcaataaactttaacaaacaat

SEQ ID NO: 139 - DNA, 1989 bp, Homo sapiens
ttaattgagaaattgaaatttattttactggaaactccaccatgtgatttgcaagataaaaatataatacagtaccaagaatcaatactacaactgcaggagctccttcatcttaaattcggtgtagccacagaaatacttctcaaacaagctagtactttggcagatctggacagtggaaatatggaaaaagtcattaaagatgaaaatgttactctgtatgtgtgggcaaacctcaagaagaatccaaggcacagaagtgttagattctctgaaacacaaattggatttgagattccaaggatattagcaacaagtgacattgctgtacgactcctgcatacccactatgatcatgtttctgcactgcaccctgtttcaacaccatcaaaagaatacacttctgcagtaactgagcttgtcaaagatgatgttaagaatgtagaaaaagcaatcagcaaggaggtcgaagaagagtccaaacaacaagaaagagggtctcacttaattcaggaggaagaaataaaagttgaggaggaacaaggtgatattgaagtgaaaatgagttctgctgaggaagaatctgaagccataaaatgtgaacgagagatgaaagtattaagtgaaactgtttcagcagcacagttgttgctggtagagaattcttctgaaaagccagatttctttgaagacaatgtggtggatttatgccagttcacaactctgggtggagtataccacttggatattttggagcttcctccacagtgtaaaccagtgaagggatggatgattgtggaaatactcaaagaaggattacagaaatacacatatcctccggaaactacagaagagtttgagacagaaaatgctttcccacctatagaggtcacacttgaggttcatgagaatgtaatcttttttgaggatcctgtggttgtaaggtgggatgctgaaggtaaacattggagaactgatggcatcagcaatgtatcctacaaaccaaaagaaagacttgtaacattcagcctggacacctttggccctgttaccttgattcaagatgctcatattaacatgccgtaccagtcatgggaactaagaccacttgatgtaaataaagtacttttaactgtgactacagtatttrctgagattcaaatacaaattaaggaaaacctctgcatgttatcttcaatcaaactaaaagacaagaaacacatctctattttggaaggaacctggatgactcctrttcctttcattattgctttgaaagaagctggactgaatatctttcctactagacactctcatttttatgttattataaacaataaggttcctttggtagaagtgaaagcttatcgacagatggccctactaagttctgcttttgcatttggttggagcaagtggaacctactatgtaattctacaaaagtcgtatttaaggkgagggaacmccttactgaagaatgtactgagaatcctaattgggcccttttaatgtttagtggtgacagagcacaaagactgaagatcaaggaagagagtgaggcattttctgaagcacttaaagaagaaactgagtttcattctactttatatcacatggtgaaggattttgcttctgaggaagcaatggagaaagtcaggagttccaactgtcagtttgtcaactctgtgtgccacatgctgctctctaccagattgctcagctactcctaacctccacttacaaactgtattgtaagtatgaagaaccaagcatggtgaaagacaggtatttctgcaacacaatgtaatgagtgaatgaatacatttcaaatcaactattaaaaattttctaatctgcattttctactcaagttttattttaaaaacagtatttttttttcctttgaatacttggcctgttaagaatttcagctttcactctatsaagatttaaatgattctttatttcaataaactttaacaaacaat

SEQ ID NO: 140 - DNA, 261 bp, Homo sapiens
gtatttgaaaagatgtgtttttcaagtaacttgcatgttaatagccttttttatgatgtggcctttgttmagtctggcagtaagaaaaagaaagtcaccaaagctgaacgattgaagctgctacaagaggaggaggagagacgactgaaagaggaagaggaagccmgtttgaaatatgagaaagaagaaatggaaaggcttgaaatacagcgaattgagaaagaaaaatggcatcgacttgaagcaaaagtaaataaacat

SEQ ID NO: 141 - DNA, 6483 bp, Homo sapiens
gagtcccggcagctcctacctcccagcgatggcgtcgctgtgccgcgcccagtccccagcctgccggccggtactcaccgctacccggagttcgctcagacggtgagatttggggcgggtccgaggcagcggcgggacgctacctgcgaccgggaccatgaggagctgccagacccgtggggccggtaacgagagcagtcgcggcacctgctgagaggaaagagggagcggtccggcgcggctggggcgcggcagaggcttgcccgatcctcggccatgtcactgctctgcgtgcgcgttaaaagggccaaattccagggttcaccagataaatttaacacatatgtgaccctgaaagtacagaatgtgaagagcacaactgtagcagttcgtggtgatcagccttcctgggaacaggatttcatgtttgagattagtcgcctggacctgggtctaagtgtggaggtatggaacaaaggactgatctgggacaccatggtggggactgtgtggattgcgctgaagactattcgtcagtcggatgaggaagggcctggggaatggtccacattagaggcagagacgttaatgaaagacgatgagatctgtggaactagaaacccaactcctcataaaattttgcttgatacaagatttgagttgccttttgatatcccagaggaggaagccagatattggacctacaaatgggagcaaatcaatgccttgggagctgacaatgagtattctagtcaagaagaaagccagaggaagccattgcccactgctgccgcccagtgttcttttgaagaccctgatagtgccgtcgatgaccgagatagtgactatcgcagtgagaccagcaacagcttcccacctccttaccatacagcttcccagcccaacgcttctgtgcaccagttccctgtgccggtgcgatcgccacagcagctgctacttcaaggcagttcccgggactcttgtaatgamtctatgcaaagttatgaccttgattatccagagcggcgggctatcagccccaccagcagcagtaggtatggctcctcctgtaatgtgagtcaaggaagctctcagctaagtgaactagaccagtatcacgaacaagatgacgaccatcgggagacggactcgattcattcttgccacagctctcacagcctgtccagagatggccaagcaggttttggagaacaagagaaacccttggaggtgacaggtcaagcagagaaggaggcagcatgtgaacccaaggagatgaaagaagatgccacaacccaccctcccccagatctggtgctgcaaaaagaccacttcctaggtccccaggagagttttcctgaggagaatgcatcttcaccatttacccaagccagagcacattggatccgagcagttaccaaggttcgactccagctgcaggagattccagatgatggtgacccctctctgcctcagtggctcccggaagggccagccggagggctctatggcattgacagcatgccagatttacgcagaaagaagccactgccacttgtcagtgatctgtcactggtccagtctcggaaggcaggaatcacttctgcaatggctacacgcacttctcttaaggacgaagagctgaaatcccacgtgtataagaaaaccctgcaggccttaatctaccccatttcgtgcaccactcctcataactttgaggtctggacrgccactaccccaacctactgctatgagtgtgaaggcctgctctggggcattgcccggcagggcatgcgctgcagcgaatgtggagtcaagtgccatgagaagtgccaggatctgctcaatgctgactgcctgcagcgggctgcagaaaagagctgtaaacayggagctgaggaccggacccagaacattatcatggccatgaaggaccgcatgaagatccgagagcgaaataagccagagatctttgaagttatccgggacgtcttcacagtgaacaaagctgcccatgtgcagcagatgaaaacagtgaagcagagtgtactggatggcacctccaaatggtcagccaagatcaccattactgtggtgtgtgcccagggcctacaagccaaggacaaaacaggatccagtgacccttacgtgactgtgcaagtcagcaaaactaagaagcgtaccaagaccatttttggaaacttgaatcctgtttgggaggagaagttccattttgagtgccacaactcctctgaccgcattaaggtgcgtgtatgggatgaggatgatgacatcaagkcaagagtaaagcaacgcctaaagcgagagtctgatgatttccttggccaaaccatcattgaggttcggaccctaagtggcgagatggacgtctggtacaacttggagaagaggacagacaaatcagccgtctcaggggctatccgactacaaatcagtgtggagatcaagggggaggagaaagtagccccataccacgtgcagtatacatgtctccatgagaatcttttccattacctcacagacattcagggcagtggaggagtccgcatccctgaagctcgaggagacgatgcctggaaggtgtactttgatgagacagcccaagaaattgtggatgaatttgccatgcgttatggcattgagtccatatatcaggccatgacgcactttgcatgtttatcatccaagtacatgtgtcctggtgtgccagcagtgatgagcaccttactggccaacatcaacgcctactaygcccacacaactgcctctaccaatgtctctgcatctgatcgctttgcagcctccaactttgggaaagagagatttgtaaaactgctggaccagctacacaactcactgaggatcgacctctctacatacaggaataatttccctgctgggagtcctgaacggcttcaggacttaaaatccacagtggatttgctgaccagcattactttcttcagaatgaaggtacaagaactgcaaagccctccaagagccagccaggtggtaaaggattgtgtgaaggcctgtttgaactccacatatgaatatatcttcaacaactgccacgacttatacagccgccagtaccagctgaagcaggagctacctccagaggaacaagggcccagcattcggaacctggatttctggcccaagctcatcacactcatcgtgtcaatcatagaggaagataagaattcctacacacctgttctgaaccagtttcctcaggagttgaatgtgggaaaagtcagcgcagaagtgatgtggcatttgtttgcccaagacatgaaatatgcattggaggagcatgagaaagaccacctgtgtaaaagtgctgactacatgaacctgcacttcaaggtgaagtggctccacaatgaatacgtgcgggatctgcctgtcctccaggggcaggtgcctgagtacccagcgtggtttgagcagttcgtgctacaatggctggatgagaatgaggatgtatccctggaattcctgcgtggggccctggaacgagataagaaggatggattscagcagacatcagagcatgcactcttttcctgctctgtggtggatgtcttcacacaactcaatcagagctttgagatcatccggaagctggaatgcccagaccccagcatccttgcccactacatgaggaggtttgctaagaccatcgggaaggtgctgatgcagtatgcagacatcttgtcaaaggacttcccagcctattgcacaaaggagaaactgccctgcatcctgatgaacaacgtgcagcaactgagggtccagctggagaaaatgtttgaggccatgggaggcaaggagctggaccttgaagctgcagacagtctgaaggagctgcaggtgaaactgaatacggttctggatgagctcagcatggtgtttggaaacagtttccaggtacggattgatgaktgtgttcgacaaatggccgacatcctgggccaggttcggggcacagggaatgcatctccagacgccagggcctcagcggctcaggatgcagatagcgtactccggcctctcatggacttcctggatggcaacctcaccctctttgccactgtgtgtgagaagacggttctgaagcgtgtactgaaggagctctggcgcgtggtgatgaacacaatggagaggatgattgttctgcccccactcactgaccagacgggcacccagctgatcttcactgctgccaaggagctgagccatctttccaaactcaaggatcacatggtacgagaggaaacacggaatctcactccaaagcagtgtgcagtccttgacctcgccctggacaccatcaagcaatacttccatgcaggaggcaatgggctgaagaaaaccttcctggagaagagcccagatctgcagtctctacgctatgccctgtctctgtacacacagactactgacactctcatcaagacctttgtgcgctcgcagaccacccaagggtctggtgtggacgatcctgtgggagaagtctctattcaggtggacttgtttacacaccctggtactggggagcacaaggtcacagtgaaagtggtggctgccaatgacctcaagtggcagacagcgggtatgttccggcctttcgtggaggtgactatggttggcccacaccaaagtgataagaagaggaagttcacaaccaaatccaaaagcaacaactgggcccccaagtacaatgagacattccacttcctcctgggaaatgaggaggggcccgagtcctatgagttgcagatatgcgtgaaggattactgctttgcccgggaagatcgcgtgctagggctggctgtgatgcctctgagggatgtcacagccaagggcagctgtgcctgctggtgccccttgggccggaagatccatatggatgagacaggcctgaccattctccggattttatctcagaggagcaatgacgaggtggcccgagaatttgtgaaactcaaatcagagtctcgttccacggaggaggggagctgaacaccttcgactcctgtgccaatcaggcagcagcaatttcacaaatcagggccagtgggagttagctgtgtaaccggcttagggtctttgcagtcaagaggctgaccccttcagttaaagatatttaaggaaaaatttggggtggtgataatatggcttttcacagaaagggtcatgaagccctggcccaacaggactgtggtactaggggctgggatgtggggttaccacatggagagattttccattaagagagaaggacaaacatttctgagagtgtcagccattcttggtagacacctctccactcctcatcccacctctacccatctccatgccacaccttatccagttagacacatacataccaatcattagaagaacaagtttagaaggtgtggaacttgtgcctggctggctgggtagtcagctgagcctgttgctgagcccrgtggtctggattggagtatggccagggcaggagtacacagaatagaatttagactgtcccttgagtagaatccactgattttctgtggctccagtgagaacaaggctttgaaactgaacaagataacttctagaaatgaactgtactaatccctttccccagattgtatcatgagtagaatcaggttcacgtggtgcttcaaagccctgagaagaatatttctttggaccccaggcactaggggccacctgcctgggagtctccctgcctcactcctctaggcaggggagtgatgcttcaggacgtgacaggctgttctaacatgtgtctacctgagggctagttgaaggatccaggartattttcttcttgrgtgggccctgaacaaagccaaaaattgtagaaaccagtctagaaaaagtcctgctcatctgtggccactgccttctagccgtcctccaccttgcagaaagaatctagcctttggtctctctctctctcatcggggtcatttgctattcccctctgatattcaaccmtatagaaggagcctggactctgatccctctgtacaggctggatggaaggggccctccacacttcctgggaggtcagagacaaactgtttcagagagtcagatggacttcccaagacttgttgagagatgtgacatggttcttggatttcctctgtagcagcctcctggacttcctgaggactcgacattgtccacagatgtactggccattacatgaaacaagaaaccaagcatctttgctgttgttaattattatatgtgccattgttacaggagattataggctagtctgtaataaattatcttatagcagcctttggggtttggtaattctgctaatgtgtggaaagccatggaaatgactgtcctttataatggtagattttggcctaatggtcctttgctgcttcacactcctccacccccatacctgacagccag

SEQ ID NO: 142 - DNA, 276 bp, Homo sapiens
atggagagggggcgtgttgagctggggtctccatgcctcgttggggagagggagctcacgtacccacagcagcagttgcgtsatgacgacgtgggcgagctcggccgccaggtggagtggggagcgcagctgtgggtcctctacgctggtgtcgagcggcccgtgtcgcgcatgggccaaaagcaggagaacggtagccacgtcctgggcctgcacggcggcccacagctggcggcccagcggctcctccgaggtgctcagcggcgccaggaacag

SEQ ID NO: 143 - DNA, 3821 bp, Homo sapiens
gcctggccctggagacacgtctggagagctgttctcctaatatgggtagggtcgggcgtggagctggcagcggcgctgtgtgcgcctgcgcggggcgccgagacagggcgtgttcgctgttcagtgcsggtgttgcagggagtgagggcagctggagtgcgttctgccgaagcttgtggttgcacgcccatcstcttaggggctaccttccgtgaccatgtccaagtctctgaagaagttggtggaggagagccgggagaagaaccagcccgaggtggacatgagtgaccggggcatctccaacatgctggatgtcaacggcctctttaccttatcccatatcacacaactggtcctcagccataacaagctaacaatggtgccaccgaacatcgcagaactgaagaatttggaggtgctcaacttttttaataaccaaatcgaggagctgcccacacagatcagtagccttcagaaactcaaacacctgaaccttggcatgaacaggctgaacactttgccacgaggcttcggctccctgccagctcttgaggttctggacttgacktacaacaacttgagcgaaaattctcttcctggaaacttcttctacctgaccaccctgcgtgcactctatctaagtgacaacgattttgaaatcctgccgccagatattgggaagctcacaaagttgcagatactcagccttagggataacgacctgatctcrctgcctaaggaaatcggggagcttacccagcttaaagagctccacattcaggggaaccgcctcaccgttctgcccccagaactaggaaacttggatttaactggccagaagcaggtattcaaagcagagaacaatccctgggtgacccccattgcagaccagttccagcttggcgtgtcccatgtttttgagtatatccgttctgagacatacaaatacctctacggcagacacatgcaggccaacccagaaccaccgaagaagaataatgacaaatcgaaaaagatcagccggaaacccctggcagccaagaacagataaggaagggattggcatcggctggccttccagcaccttctctctccaacacttcattctctcttgccctgtctctcaaataaacccaatgctgcgtgtgaggccttttttatttttcttttcactctctttctaatgcttcccaccttaccttttagattcttttgctaggkgggagattgttataaggtctttaaaccatttccatttgtttctttaacattaccaaaagcagggaacaaagctcttattcaactgcgaattccatagtgggctctggcttttcttgaatagayatcacaaggttgcttattatcaaaagaataattaaaatcatgtaaccatttaaatgtcactgttaacacttttcactctttctgttgattcacctaactcattattttgctttattaaaagtcttccttcaccaccgagatatgctaatttaacttacaaatgattttaataaaatcttgagtttgtatcacatgttacttattgactcagaataaaagaacagtctgatcttggggtataacacattttcatttacttttctcccccaaaatcatcttatccaattttattggttatacatgataaacttttcatgaaagaaatgcaaaattaaatcacagttcgtttcttctcacattaatttgtcaagttttttttttctttgaagactttctaaattaggaagcagaaaaacaaatctctaggagattctgccaaaggattttggaaagtagcattccttcgccgaagaaatggtgatttctgccaggggctggtagacaagaactgtgaaagagagagagaaaaaacctcaactgtgtattttgtcacggcggaaaatctgctcgcatcgaagcattcttctaagcgacttcgatgccaaggaagttgtgtaaatgtgcacgcgctacaccacacccagggtggaaaccacagttgcagagtcattaaacaatcaattgtttgtttaacatctgtgataggcagctttccttcttttcaacagtgatacctacgaaaatcaaaataaatgcaagctgaggttttgtgctcactgaaagggctgtcaaccccagaaggccgacacaaaaaaaatggtatgtgaagatgcaccgtcttttcaaatggcctgggagagtcaaatggcctgggagagggggcctgcccttctctgctgtgtcctttcggcttcccagttgagctcccaagaccaggacccactggggcatataaaatctctgctgtatcctttcggcttcccagttgagctcccaagaccaggacccactggggcatataaaaaagtcaaaaatcaaaatcaaacaacaagttctgagttacttaggaaacagacttcgcatttcaatcagagaggccacagagcaaggtctaaacttctggcttctagacaaattcctgatagaacatttaaatgtgggaagtggcttccccaggtcccatcccctgtttagggatagagttgatatcatttttataggtgccatgtatgcctctgcctgaatttttttaattgacttttgagcttttgagattgcacgagggagaacaaggcctttgctgttgtggataggaaagacttaacctaaaattaaaccagcaagaaagcattagtaaaaatctaacaatatgaagggctcttatgagtcatttttttcaaaagatgaaaactccagaaacgcacaggaacgaaatacctcccagaaacatgaagcaatcatcgaagactcactggtaatatttttaaaaagtatacagatcaaagcaaaaagaagccatgtgtaacaaagagaaatgtgcaaatattttttaaggcagtattaagtgcaagaggagtaacatgaaataaacattctttcacatggctactgggaatataaatttcgctccagaaaggccgtagcagtttgacgataggtggcaaaaccttaagattgtgtactggggcccagaatttttatttctaggaatgtatcctgaggaaattatccgagatccccacaaactgcaatgtttaggaattgtccttatagcattgcatacacaagaaaaacagagaaaagcctgatccctgtcagtggaaaaggggttcaatgaattacggtgtgtctgcatgaggcttttatgacattaaaaattgttgaacaacggccaggcacagtggctcatgcctgtaatcctaacactttgggaggccaaggtgggaagattgcctgagctcaggagtttgagaccagcctgggcaacacggtgaaaccccgtctctactaaaatacaaaaaattagccgggcgtcgcagcatgcgcctgtagtcccagctgctcaggaggctgaggcaggagaattgattgaacccgggaggcagaggttgcactgagctgagattaagccaccgcactccagcctgggcgacagagcaagattccgttcccaagaaaaaaaaattgttcaacaataagggcaaagggagagaatcataacatctgattaaacagaaaaagcaagatttttaaaactaactatataaggatggtcccagctgtgtcaaaaggaagcttgtttgtaatacgtgtgcataaaaattaaatagaggtgaacacaattattttaaggcagttaaattatctctgtattgtgaactaagactttctagaattttacttattcattctgtacttaaattttttctaatgaacacatatacttttgtaatcagaaaatattaaatgcatgtatt

SEQ ID NO: 144 - DNA, 3951 bp, Homo sapiens
agacagggcgtgttcgctgttcagtgcsggtgttgcagggagtgagggcagctggagtgcgttctgccgaagcttgtggttgcacgcccatcstcttaggggctaccttccgtggtgagtgtgtgcggtgttgcacttggggttgcttctcgctgcgtggccgcagcggggctgaacccttcccactccatcccctccccgcacccggaccagcccctgggacgccctcggacgcccacccgctccaaccctggggaagcctcagagtggcagcgaaggcctcttgcctttccgcctctgcgcttgctgtcatcgcccacgtgctttgttgttgttcggtgcagaccatgtccaagtctctgaagaagttggtggaggagagccgggagaagaaccagcccgaggtggacatgagtgaccggggcatctccaacatgctggatgtcaacggcctctttaccttatcccatatcacacaactggtcctcagccataacaagctaacaatggtgccaccgaacatcgcagaactgaagaatttggaggtgctcaacttttttaataaccaaatcgaggagctgcccacacagatcagtagccttcagaaactcaaacacctgaaccttggcatgaacaggctgaacactttgccacgaggcttcggctccctgccagctcttgaggttctggacttgacktacaacaacttgagcgaaaattctcttcctggaaacttcttctacctgaccaccctgcgtgcactctatctaagtgacaacgattttgaaatcctgccgccagatattgggaagctcacaaagttgcagatactcagccttagggataacgacctgatctcrctgcctaaggaaatcggggagcttacccagcttaaagagctccacattcaggggaaccgcctcaccgttctgcccccagaactaggaaacttggatttaactggccagaagcaggtattcaaagcagagaacaatccctgggtgacccccattgcagaccagttccagcttggcgtgtcccatgtttttgagtatatccgttctgagacatacaaatacctctacggcagacacatgcaggccaacccagaaccaccgaagaagaataatgacaaatcgaaaaagatcagccggaaacccctggcagccaagaacagataaggaagggattggcatcggctggccttccagcaccttctctctccaacacttcattctctcttgccctgtctctcaaataaacccaatgctgcgtgtgaggccttttttatttttcttttcactctctttctaatgcttcccaccttaccttttagattcttttgctaggkgggagattgttataaggtctttaaaccatttccatttgtttctttaacattaccaaaagcagggaacaaagctcttattcaactgcgaattccatagtgggctctggcttttcttgaatagayatcacaaggttgcttattatcaaaagaataattaaaatcatgtaaccatttaaatgtcactgttaacacttttcactctttctgttgattcacctaactcattattttgctttattaaaagtcttccttcaccaccgagatatgctaatttaacttacaaatgattttaataaaatcttgagtttgtatcacatgttacttattgactcagaataaaagaacagtctgatcttggggtataacacattttcatttacttttctcccccaaaatcatcttatccaattttattggttatacatgataaacttttcatgaaagaaatgcaaaattaaatcacagttcgtttcttctcacattaatttgtcaagttttttttttctttgaagactttctaaattaggaagcagaaaaacaaatctctaggagattctgccaaaggattttggaaagtagcattccttcgccgaagaaatggtgatttctgccaggggctggtagacaagaactgtgaaagagagagagaaaaaacctcaactgtgtattttgtcacggcggaaaatctgctcgcatcgaagcattcttctaagcgacttcgatgccaaggaagttgtgtaaatgtgcacgcgctacaccacacccagggtggaaaccacagttgcagagtcattaaacaatcaattgtttgtttaacatctgtgataggcagctttccttcttttcaacagtgatacctacgaaaatcaaaataaatgcaagctgaggttttgtgctcactgaaagggctgtcaaccccagaaggccgacacaaaaaaaatggtatgtgaagatgcaccgtcttttcaaatggcctgggagagtcaaatggcctgggagagggggcctgcccttctctgctgtgtcctttcggcttcccagttgagctcccaagaccaggacccactggggcatataaaatctctgctgtatcctttcggcttcccagttgagctcccaagaccaggacccactggggcatataaaaaagtcaaaaatcaaaatcaaacaacaagttctgagttacttaggaaacagacttcgcatttcaatcagagaggccacagagcaaggtctaaacttctggcttctagacaaattcctgatagaacatttaaatgtgggaagtggcttccccaggtcccatcccctgtttagggatagagttgatatcatttttataggtgccatgtatgcctctgcctgaatttttttaattgacttttgagcttttgagattgcacgagggagaacaaggcctttgctgttgtggataggaaagacttaacctaaaattaaaccagcaagaaagcattagtaaaaatctaacaatatgaagggctcttatgagtcatttttttcaaaagatgaaaactccagaaacgcacaggaacgaaatacctcccagaaacatgaagcaatcatcgaagactcactggtaatatttttaaaaagtatacagatcaaagcaaaaagaagccatgtgtaacaaagagaaatgtgcaaatattttttaaggcagtattaagtgcaagaggagtaacatgaaataaacattctttcacatggctactgggaatataaatttcgctccagaaaggccgtagcagtttgacgataggtggcaaaaccttaagattgtgtactggggcccagaatttttatttctaggaatgtatcctgaggaaattatccgagatccccacaaactgcaatgtttaggaattgtccttatagcattgcatacacaagaaaaacagagaaaagcctgatccctgtcagtggaaaaggggttcaatgaattacggtgtgtctgcatgaggcttttatgacattaaaaattgttgaacaacggccaggcacagtggctcatgcctgtaatcctaacactttgggaggccaaggtgggaagattgcctgagctcaggagtttgagaccagcctgggcaacacggtgaaaccccgtctctactaaaatacaaaaaattagccgggcgtcgcagcatgcgcctgtagtcccagctgctcaggaggctgaggcaggagaattgattgaacccgggaggcagaggttgcactgagctgagattaagccaccgcactccagcctgggcgacagagcaagattccgttcccaagaaaaaaaaattgttcaacaataagggcaaagggagagaatcataacatctgattaaacagaaaaagcaagatttttaaaactaactatataaggatggtcccagctgtgtcaaaaggaagcttgtttgtaatacgtgtgcataaaaattaaatagaggtgaacacaattattttaaggcagttaaattatctctgtattgtgaactaagactttctagaattttacttattcattctgtacttaaattttttctaatgaacacatatacttttgtaatcagaaaatattaaatgcatgtatt

SEQ ID NO: 145 - DNA, 4817 bp, Homo sapiens
cggtgaggctcgcgctcgagctgcggcgccggctcctgccgcctgggccccgggcccggcccctcccgcgccgcccgggcgatgagaagctgcttctgcgtgagacggagccgggacccgccgccgccgcagccaccgccgccgccgccccagcggggaacagaccagtccaccatgcctgaagtcaaagacctctcagaagccttgccagaaacrtcaatggatcccatcacgggagtcggggtggtggcttctcggaaccgagccccgacaggctatgacgtagttgcacagacagcagatggtgtggatgctgacctctggaaagacggcttatttaaatccaaggttaccagatacctgtgtttcacaagatcrttttccaaagaaaatagtcatctggggaacgtgttagtagatatgaagctcattgacatcaaggacacactgcctgtgggcttcatcccaattcaggagacggtggacacacaggaagtggcttttaggaagaagaggctgtgcattaaatttattccackggattcaacggaagctgcgatttgtgacattcggatcatgggccggaccaagcaggccccgcctcagtacacgtttattggggaactgaacagcatggggatctggtatcgaatgggcagagtaccaagaaatcatgactcatctcaacccacaacgccttcccagtcatcagctgcctccaccccagcccccaaccttcccaggcacatctccctaacacttcctgccaccttccgaggcaggaacagcacccggacggactacgagtaccagcactccaatttgtatgccatatcagcaatggatggtgtgccttttatgatttcagagaagttttcttgtgttccagaaagtatgcagccctttgatctcctgggaatcaccatcaaatctctagcagaaatcgaaaaagagtacgagtacagcttccgcacagagcagagcgcagccgccaggctyccgcccagccccaccaggtgtcagcagatcccgcagtcctgaggagccagcggccacctgcggggagaccaccgccgcccagactactgacggcaggggctgctgcccccgmctcctcctgccgcctccgccagccctccctcccacactgccccagcagggctggcccggagactgggcagctaagtgggcgcatcctgtcttcagctggcctsactgacaccccggcctccctggggacrttgttcataaccatgactaatctgtgtgtgctgtagtgaccagcggctcctaacstgtctgtgtgatgaccagttgtcctccaaaaacctcactcaccacggagtcaccctgagggccccgggcagttgccctggccgcccagtgacgcccacyggctccctccgctccctcctgtcacctaccagggcagaccccactaagccgttgagtctcttcctggaagaccctgagggccggcagctttgcctaggactctccagggtcgctgatcctccccggcccagggctgccaggaacaagttcctctctgcaggatctcacagcagccctgagaagacatgggaggaagaagccagtggccctggggtggaccctgccctttggacatcccatggacytgtcacccagtcgcctggaagtcggggagcagcacccctgcccccrgtggaggggttgttgctttctggggaggaggacggttgacggccctgcttggatccaccaccaggacrctgtgctcggccatggcgcgcctcccccaagggctcatctgtgcaacaaccacatgccaacaatagctccaggtgcctcagccccgtgccctgacccggggaccacagggacaccctctgagacgtgctggccccaggaggatacaggcacacgggcacccagcccctctcagagccaggcgtgtcttgacggtatctgctgacgggaacaagtcattctgaaaggtccctctgacccaggtcaccaaatttgggccagaactggcacttccgagtgcccactggtgctggcgtcctcaaagtgccgggcgccaagttcagccccaggtgcgtttgcctaggcagtggtggctgccatccctcggggcccaggccctcacccgaagggctgcctcactctgtggtgtcaggcactgggctgtgtcctgattcctcagagtatggggacctgacatctttgggtccccaagagttggctcttggatgtggaggcttgatgctgcggttgggggctgcactacctgcgtccgtggaagcctctgcctcagcggggacggcctcctgctgcaggtcctgggcagcccacagtagtgctagctgaggcccagaggaacgggaggaaagggaggcagcgccggacggcgcagctggccaagaggcgggcggggccagaaatacctcatgcccctgcaccagcccctccgtctccaggccccaggcctctttgtggacccatcttcctcctctgccaccccgatcttcactcggatacctcttgatttctgtggataagggaagcggccacttctccctccctgagacccgaggatgcccctggtgggggtggccttctcaggactcctgggtggcacagcagcaggaccttgtcatgggactgatgctgagcagggagggggctgccaggctggctgccgatgctccgttcacataagccagtgtggttctggggacctgaggagccctgtggcacccacagggggcacctatgtctgccgtggctcctcgggtggtgccctgtgtgacaaagcccaacagcaagggtgactcctggcaggtgggggcagcaggagggcagagggcagagctctggccacttctgcccacttcattagggtttgtgaactttgtccttcacctcttttcgtgccctggttgtgagattgcctctaacaggtaatgccaggggcccttcactccgcccccatgactgggaagaggcctgtggcagcgccgctggaccctaggaggctcagaggcagtggtgtgggagccctgtctgcaaggacgcagaataagcagtgagggcggctgcaggagaggaaggggctcccacagcccccactgatgccgctgcaggcccctgtcgagctggggtcccagccaggtgcccccgcatgccctcctgcagttgctggatggatagggacaccaggaagaggacaaactgcatggactcaagcgagctggagccatcttctccatagcattacggacttagcataagagtaaatgactgtgaacgttgtagtaaacggcagcttaagataagtaagcagagacagtgttaaggacgagttggtgtctgtggtagcttttaggctgctcctaacccaccatttattgccttctgagaggtgggtgaggacaagcatgtgcctgtgtgtgtgtgtgtgtgtgtgtgtatatgtgtgtgtgtgcacgcacatgcgtgtgtataagcccacctgagtggggctcgtgcaggagaactgaggcatgaaactctggctcaaacctaggaattgagagcgtttctgtcttttgggagagtacttttctccacgagccctctggccactgtgggagggaaggacaagggttcccttggaaatgtgaagggtcttggcctcatccctcaggtccccccacagcacttcccactactgcttctgtccctgctggcagcctctgtccctccagaacggctaaccagagcacactgtccccaccgcctcccctttctctctggaaagttgaagtatctccaaaggccttggaaatggcacaaaggtgataaggagcaggtgctttgctgcagtctcccttgcaaatgtataattaaggcctttcttcccaccccaagtccaagaacaaatgccagccacgtcctccgccacttggagagatgagaacccagtggggtcacgtaaaggaattgcaggtcggtgagaggacaagagggactcccatgttctaagcacctgttcctggccaggctctaggccaggctctctaagcacatttctcctttcattccccctaaaaacagagtgacctggaagtagatgttctttgctccttgtcagagttgaagaggctgacttggcccactgctaagcggcagaggcagggccagccatcctgtcgcaagcccgtgctggggctgccctttctgtttccagtccagttacggacttcccggccgccactgggccctgccggtcaccaggccactgtgcagtgggcgcagagcatggtcaggagtggcctgcccgtactcctccacccagatgagggccctccagagcctgcaggcatctgtggggaatcccagcctgcaggttcttggagaagcaggtgaacctaaggatgaaagcaaaggagggccttgaggaagcagcccccaggcctggcagccacgcagcggctgagctcatgaacttggttcgcagcctgccttgcccctggaggccacgccaggcgctcacccctgagcccacagcccctgcttgggctgcctggcaccctcagggtggcccggcctcctcctgccactctgagcacatgtccgggggttgccaccagagacggctttgttctcccagctaaggccgtggagctgctgtgtgactgtgtcaggcctggacaaggaagacccttagggatgacgtccccgctgcatatttattcaaggtgactcttgtacttggcaagggaagtccactgtgtgattgtctgtattcttaatataatttgttaaataaacgtttgttttaacctctt

SEQ ID NO: 146 - DNA, 4506 bp, Homo sapiens
cggtgaggctcgcgctcgagctgcggcgccggctcctgccgcctgggccccgggcccggcccctcccgcgccgcccgggcgatgagaagctgcttctgcgtgagacggagccgggacccgccgccgccgcagccaccgccgccgccgccccagcggggaacagaccagtccaccatgcctgaagtcaaagacctctcagaagccttgccagaaacrtcaatggatcccatcacgggagtcggggtggtggcttctcggaaccgagccccgacaggctatgacgtagttgcacagacagcagatggtgtggatgctgacctctggaaagacggcttatttaaatccaaggttaccagatacctgtgtttcacaagatcrttttccaaagaaaatagtcatctggggaacgtgttagtagatatgaagctcattgacatcaaggacacactgcctgtgggcttcatcccaattcaggagacggtggacacacaggaagtggcttttaggaagaagaggctgtgcattaaatttattccackggattcaacggaagctgcgatttgtgacattcggatcatgggccggaccaagcaggccccgcctcagtacacgtttattggggaactgaacagcatggggatctggtatcgaatgggcagagtaccaagaaatcatgactcatctcaacccacaacgccttcccagtcatcagctgcctccaccccagcccccaaccttcccaggcacatctccctaacacttcctgccaccttccgaggcaggaacagcacccggacggactacgagtaccagcactccaatttgtatgccatatcagcaatggatggtgtgccttttatgatttcagagaagttttcttgtgttccagaaagtatgcagccctttgatctcctgggaatcaccatcaaatctctagcagaaatcgaaaaagagtacgagtacagcttccgcacagagcagagcgcagccgccaggctyccgcccagccccaccaggtgtcagcagatcccgcagtcctgaggagccagcggccacctgcggggagaccaccgccgcccagactactgacggcaggggctgctgcccccgmctcctcctgccgcctccgccagccctccctcccacactgccccagcagggctggcccggagactgggcagctaagtgggcgcatcctgtcttcagctggcctsactgacaccccggcctccctggggacrttgttcataaccatgactaatctgtgtgtgctgtagtgaccagcggctcctaacstgtctgtgtgatgaccagttgtcctccaaaaacctcactcaccacggagtcaccctgagggccccgggcagttgccctggccgcccagtgacgcccacyggctccctccgctccctcctgtcacctaccagggcagaccccactaagccgttgagtctcttcctggaagaccctgagggccggcagctttgcctaggactctccagggtcgctgatcctccccggcccagggctgccaggaacaagttcctctctgcaggatctcacagcagccctgagaagacatgggaggaagaagccagtggccctggggtggaccctgccctttggacatcccatggacytgtcacccagtcgcctggaagtcggggagcagcacccctgcccccrgtggaggggttgttgctttctggggaggaggacggttgacggccctgcttggatccaccaccaggacrctgtgctcggccatggcgcgcctcccccaagggctcatctgtgcaacaaccacatgccaacaatagctccaggtgcctcagccccgtgccctgacccggggaccacagggacaccctctgagacgtgctggccccaggaggatacaggcacacgggcacccagcccctctcagagccaggcgtgtcttgacggtatctgctgacgggaacaagtcattctgaaaggtccctctgacccaggtcaccaaatttgggccagaactggcacttccgagtgcccactggtgctggcgtcctcaaagtgccgggcgccaagttcagccccaggtgcgtttgcctaggcagtggtggctgccatccctcggggcccaggccctcacccgaagggctgcctcactctgtggtgtcaggcactgggctgtgtcctgattcctcagagtatggggacctgacatctttgggtccccaagagttggctcttggatgtggaggcttgatgctgcggttgggggctgcactacctgcgtccgtggaagcctctgcctcagcggggacggcctcctgctgcaggtcctgggcagcccacagtagtgctagctgaggcccagaggaacgggaggaaagggaggcagcgccggacggcgcagctggccaagaggcgggcggggccagaaatacctcatgcccctgcaccagcccctccgtctccaggccccaggcctctttgtggacccatcttcctcctctgccaccccgatcttcactcggatacctcttgatttctgtggataagggaagcggccacttctccctccctgagacccgaggatgcccctggtgggggtggccttctcaggactcctgggtggcacagcagcaggaccttgtcatgggactgatgctgagcagggagggggctgccaggctggctgccgatgctccgttcacataagccagtgtggttctggggacctgaggagccctgtggcacccacagggggcacctatgtctgccgtggctcctcgggtggtgccctgtgtgacaaagcccaacagcaagggtgactcctggcaggtgggggcagcaggagggcagagggcagagctctggccacttctgcccacttcattagggtttgtgaactttgtccttcacctcttttcgtgccctggttgtgagattgcctctaacaggtaatgccaggggcccttcactccgcccccatgactgggaagaggcctgtggcagcgccgctggaccctaggaggctcagaggcagtggtgtgggagccctgtctgcaaggacgcagaataagcagtgagggcggctgcaggagaggaaggggctcccacagtgcccccgcatgccctcctgcagttgctggatggatagggacaccaggaagaggacaaactgcatggactcaagcgagctggagccatcttctccatagcattacggacttagcataagagtaaatgactgtgaacgttgtagtaaacggcagcttaagataagtaagcagagacagtgttaaggacgagttggtgtctgtggtagcttttaggctgctcctaacccaccatttattgccttctgagaggtgggtgaggacaagcatgtgcctgtgtgtgtgtgtgtgtgtgtgtgtatatgtgtgtgtgtgcacgcacatgcgtgtgtataagcccacctgagtggggctcgtgcaggagaactgaggcatgaaactctggctcaaacctaggaattgagagcgtttctgtcttttgggagagtacttttctccacgagccctctggccactgtgggagggaaggacaagggttcccttggaaatgtgaagggtcttggcctcatccctcaggtccccccacagcacttcccactactgcttctgtccctgctggcagcctctgtccctccagaacggctaaccagagcacactgtccccaccgcctcccctttctctctggaaagttgaagtatctccaaaggccttggaaatggcacaaaggtgataaggagcaggtgctttgctgcagtctcccttgcaaatgtataattaaggcctttcttcccaccccaagtccaagaacaaatgccagccacgtcctccgccacttggagagatgagaacccagtggggtcacgtaaaggaattgcaggtcggtgagaggacaagagggactcccatgttctaagcacctgttcctggccaggctctaggccaggctctctaagcacatttctcctttcattccccctaaaaacagagtgacctggaagtagatgttctttgctccttgtcagagttgaagaggctgacttggcccactgctaagcggcagaggcagggccagccatcctgtcgcaagcccgtgctggggctgccctttctgtttccagtccagttacggacttcccggccgccactgggccctgccggtcaccaggccactgtgcagtgggcgcagagcatggtcaggagtggcctgcccgtactcctcctgccactctgagcacatgtccgggggttgccaccagagacggctttgttctcccagctaaggccgtggagctgctgtgtgactgtgtcaggcctggacaaggaagacccttagggatgacgtccccgctgcatatttattcaaggtgactcttgtacttggcaagggaagtccactgtgtgattgtctgtattcttaatataatttgttaaataaacgtttgttttaacctctttccc

SEQ ID NO: 147 - DNA, 3111 bp, Homo sapiens
tgaggcgtagaccactgggtgcccgtgcttgtgttttcaaacgtggctgtgaacgtgattgcgtcacttggggtgcattttaggatttggatgtgatcccaaatktctayaccctgaagctcagtcttctgtcatttggcgtgttagctttctgtcaggaaaccttttgctgttctttttttaatgtgtccagggctctttgaagaaaactgcattttgtttgcayaaactgctgcattcytacagacttctggataacaaaataagaagcacgcttgagggtggggtctttcattatgatgacaaaaggggagagmgcaggggtgtcagcggagcagctggaaagtattagcaaggacttaggggaattaatagggtcctcaatttggaatggtttgtttgctacagggctcaatatggtagtcaaatgtttttcttttcatcctttttcttggaaatcaattttttaaaatatagtttgyttcttggctccctgttctgcatctcgctcaacagactgcctctgtcaccgggtccctccacccttgtctcctgtgcggccagcrtyagakccatggcgacggaggagaagaagccygagaccgaggccgccagagcacagccaaccccttcgtcatccgccactcagagcaagcctacacctgtgaagccaaactatgctctaaagttcacccttgctggccacaccaaagcagtgtcctccgtgaaattcagcccgaatggagagtggctggcaagttcatatgacgacaacccccccgtgtcttttgtgaagttctccccgaacggcaaatacatcctggccgccacgctggacaacactctgaagctctgggactacagcaaggggaagtgcctgaagacgtacactggccacaagaatgagaaatactgcatatttgccaatttctctgttactggtgggaagtggattgtgtctggctcagaggataaccttgtttacatctggaaccttcagacgaaagagattgtacagaaactacaaggccacacagatgtcgtgatctcaacagcttgtcacccaacagaaaacatcatcgcctctgctgcgctagaaaatgacaaaacaattaaactgtggaagagtgactgctaagtccctttgctcctgcccgcragagactgtcgggaagttgacccggattggcaagaaacagggtgtcttggaggtggtcccccagatctgcgcctgggggtcaggacagggcctgatttgagcctcctctctgaagatgatttggccgagcggaaggtgtggaccaccrgaaagttcttaaaagttgctggtgacatttcttgccaattctaacactgtctagggaagagttcctagtctattgtgttcaaacagagtcaacaaaagtttttaattttttattacagaagggtgaagttcaatttaacatgcgttgtgttttttcagtaaacgttctgtatctttttgatattccatgacccagtgcacgctgtggcctgtcaccgccaccgtggccccgccagctggcctcccctttggcccacgccggccgcccccattctctgctgcgtagatgccctggcccagggccctgactcctccattcccgccagtagctgttcctagtgtattttcgtctttctggaaaacagcattgagtggttgttttctgtgtaaagagccgtttgtgtcttgggagtttgtggcccacatgccgatagcacggtcatcgcacatgactctcccgtttgtctcagtgtccctgcaacaagcagcaccgcagactgtaataaaaggtggggttttgtgaatggttgtggcaagtgcgtccttgtgaagctcgtctccatgtggctttcttggagaaaggctcccctggggmaagagggyggaaggtttctttggacaggaggtgctgaggctggctgcacctgctctctgaagacgccttcctctctaggttcattgttcagtgttgctgggggcggggaacgggggtggggaggttcttagttgcgaaggagccaagctcctgatggacttgcgttgggatgtgggggacacctgtggyatggtaaggctccctgagtcccttactccaggtcagatgccagtgggactcatgcgccctatgagggctgcagggccagtgctgcccctcggactcctcgaggggttgggtgctaagcgcgagcctcgccgtccctgctggagccctcgcctgcctgcccctctgcctgtgctcctggcastgtggcttcccggtgctcacctgcacagcagttaacagcagaggccgagcgggagcctctggggagcgaggctgaaacctgaacctgcccatggagacagttgtggtgagggttgccacacacagtgagggcrgagcagggtggctgagggcacaggtgcctgggtctgtcccacggggcagggctttggggctgtgatgctctgggaagccagcttgggtcctgggtctacagagggccctggccccggagcccagccagctctgcctctctcagggcctggagtcctgggggagctcagccagctctgcctttctcagggcctggagtcctggatgaatcctgcaggtttttggttgcaccggcccagggaggaagcggggggtttgtcaggtgggctctcctggaggtcctcgagtggcaggggtgaggaggggattatctgaggcatctggagatgtatrtcctgtggtttcccctgcccctctgtttccgatgaggtgtacggatgagtgacctgcactaagaagtgagttgccacagtgaaaatgggttggtttttgtcttcgacgctcagggtctgggcgcctcgcatttgcagtctgttgtgacagacacggggagctccgcgtgccagcctgtggctgccctgctgtgggggtcctggggccggcgaggccccttcagtcttgttctggggggacggcccactccggggagggggtgtgctgtgctgagcgctgtatccctgaatatagtttattttttctacatttgaattctgttgtagatttatgtaaaaatacattctttttgaaaataaaaattttcatgtcttct

SEQ ID NO: 148 - DNA, 1360 bp, Homo sapiens
tcctgcagcctacacctgtgaagccaaactatgctctaaagttcacccttgctggccacaccaaagcagtgtcctccgtgaaattcagcccgaatggagagtggctggcaagttcatctaggttcattttaatcgtgatggatccttgatagtttcaagtagctatgatggtctctgtcgcatctgggacaccgcctcrggccagtgcctgaagacgctcatcgatgacgacaacccccccgtgtcttttgtgaagttctccccgaacggcaaatacatcctggccgccacgctggacaacactctgaagctctgggactacagcaaggggaagtgcctgaagacgtacactggccacaagaatgagaaatactgcatatttgccaatttctctgttactggtgggaagtggattgtgtctggctcagaggataaccttgtttacatctggaaccttcagacgaaagagattgtacagaaactacaaggccacacagatgtcgtgatctcaacagcttgtcacccaacagaaaacatcatcgcctctgctgcgctagaaaatgacaaaacaattaaactgtggaagagtgactgctaagtccctttgctcctgcccgcragagactgtcgggaagttgacccggattggcaagaaacagggtgtcttggaggtggtcccccagatctgcgcctgggggtcaggacagggcctgatttgagcctcctctctgaagatgatttggccgagcggaaggtgtggaccaccrgaaagttcttaaaagttgctggtgacatttcttgccaattctaacactgtctagggaagagttcctagtctattgtgttcaaacagagtcaacaaaagtttttaattttttattacagaagggtgaagttcaatttaacatgcgttgtgttttttcagtaaacgttctgtatctttttgatattccatgacccagtgcacgctgtggcctgtcaccgccaccgtggccccgccagctggcctcctggtctggttttgctgagtgcgtctccgtggggctgttcagyatcttcctgtctcctgtgttccctgtaacctggcagtggggtctatctgtgtcatttaggaaaacaagctgtgtggcacatcctggcacatcctgctcttcagcccatgaaggaagctctcaaaacactgcggtggggtaaggtgttggcagtgtggattcaccgtcccagcaaggagctaccttagggtcaaggatgagttctgagaaataggagaaaagaaagactcagtgaagaggagaatcaggtatggttacccagaggaagggcagaggatgctgaatcccagtagagtgatgcccgctcc

SEQ ID NO: 149 - DNA, 2002 bp, Homo sapiens
tgaggcgtagaccactgggtgcccgtgcttgtgttttcaaacgtggctgtgaacgtgattgcgtcacttggggtgcattttaggatttggatgtgatcccaaatktctayaccctgaagctcagtcttctgtcatttggcgtgttagctttctgtcaggaaaccttttgctgttctttttttaatgtgtccagggctctttgaagaaaactgcattttgtttgcayaaactgctgcattcytacagacttctggataacaaaataagaagcacgcttgagggtggggtctttcattatgatgacaaaaggggagagmgcaggggtgtcagcggagcagctggaaagtattagcaaggacttaggggaattaatagggtcctcaatttggaatggtttgtttgctacagggctcaatatggtagtcaaatgtttttcttttcatcctttttcttggaaatcaattttttaaaatatagtttgyttcttggctccctgttctgcatctcgctcaacagactgcctctgtcaccgggtccctccacccttgtctcctgtgcggccagcrtyagakccatggcgacggaggagaagaagccygagaccgaggccgccagagcacagccaaccccttcgtcatccgccactcagagcaagcctacacctgtgaagccaaactatgctctaaagttcacccttgctggccacaccaaagcagtgtcctccgtgaaattcagcccgaatggagagtggctggcaagttcagttcattttaatcgtgatggatccttgatagtttcaagtagctatgatggtctctgtcgcatctgggacaccgcctcrggccagtgcctgaagacgctcatcgatgacgacaacccccccgtgtcttttgtgaagttctccccgaacggcaaatacatcctggccgccacgctggacaacactctgaagctctgggactacagcaaggggaagtgcctgaagacgtacactggccacaagaatgagaaatactgcatatttgccaatttctctgttactggtgggaagtggattgtgtctggctcagaggataaccttgtttacatctggaaccttcagacgaaagagattgtacagaaactacaaggccacacagatgtcgtgatctcaacagcttgtcacccaacagaaaacatcatcgcctctgctgcgctagaaaatgacaaaacaattaaactgtggaagagtgactgctaagtccctttgctcctgcccgcragagactgtcgggaagttgacccggattggcaagaaacagggtgtcttggaggtggtcccccagatctgcgcctgggggtcaggacagggcctgatttgagcctcctctctgaagatgatttggccgagcggaaggtgtggaccaccrgaaagttcttaaaagttgctggtgacatttcttgccaattctaacactgtctagggaagagttcctagtctattgtgttcaaacagagtcaacaaaagtttttaattttttattacagaagggtgaagttcaatttaacatgcgttgtgttttttcagtaaacgttctgtatctttttgatattccatgacccagtgcacgctgtggcctgtcaccgccaccgtggccccgccagctggcctcctggtctggttttgctgagtgcgtctccgtggggctgttcagyatcttcctgtctcctgtgttccctgtaacctggcagtggggtctatctgtgtcatttaggaaaacaagctgtgtggcacatcctggcacatcctgctcttcagcccatgaaggaagctctcaaaacactgcggtggggtaaggtgttggcagtgtggattcaccgtcccagcaaggagctaccttagggtcaaggatgagttctgagaaataggagaaaagaaagactcagtgaagaggagaatcaggtatggttacccagaggaagggcagaggatgctgaatcccagtagagtgatgcccgctcc

SEQ ID NO: 150 - DNA, 2647 bp, Homo sapiens
gccgcctggcgcccgcccgagctgccgccttgtcgagctgagtccgcgccagactgcctctgtcaccgggtccctccacccttgtctcctgtgcggccagcrtyagakccatggcgacggaggagaagaagccygagaccgaggccgccagagcacagccaaccccttcgtcatccgccactcagagcaagcctacacctgtgaagccaaactatgctctaaagttcacccttgctggccacaccaaagcagtgtcctccgtgaaattcagcccgaatggagagtggctggcaagttcatatgacgacaacccccccgtgtcttttgtgaagttctccccgaacggcaaatacatcctggccgccacgctggacaacactctgaagctctgggactacagcaaggggaagtgcctgaagacgtacactggccacaagaatgagaaatactgcatatttgccaatttctctgttactggtgggaagtggattgtgtctggctcagaggataaccttgtttacatctggaaccttcagacgaaagagattgtacagaaactacaaggccacacagatgtcgtgatctcaacagcttgtcacccaacagaaaacatcatcgcctctgctgcgctagaaaatgacaaaacaattaaactgtggaagagtgactgctaagtccctttgctcctgcccgcragagactgtcgggaagttgacccggattggcaagaaacagggtgtcttggaggtggtcccccagatctgcgcctgggggtcaggacagggcctgatttgagcctcctctctgaagatgatttggccgagcggaaggtgtggaccaccrgaaagttcttaaaagttgctggtgacatttcttgccaattctaacactgtctagggaagagttcctagtctattgtgttcaaacagagtcaacaaaagtttttaattttttattacagaagggtgaagttcaatttaacatgcgttgtgttttttcagtaaacgttctgtatctttttgatattccatgacccagtgcacgctgtggcctgtcaccgccaccgtggccccgccagctggcctcccctttggcccacgccggccgcccccattctctgctgcgtagatgccctggcccagggccctgactcctccattcccgccagtagctgttcctagtgtattttcgtctttctggaaaacagcattgagtggttgttttctgtgtaaagagccgtttgtgtcttgggagtttgtggcccacatgccgatagcacggtcatcgcacatgactctcccgtttgtctcagtgtccctgcaacaagcagcaccgcagactgtaataaaaggtggggttttgtgaatggttgtggcaagtgcgtccttgtgaagctcgtctccatgtggctttcttggagaaaggctcccctggggmaagagggyggaaggtttctttggacaggaggtgctgaggctggctgcacctgctctctgaagacgccttcctctctaggttcattgttcagtgttgctgggggcggggaacgggggtggggaggttcttagttgcgaaggagccaagctcctgatggacttgcgttgggatgtgggggacacctgtggyatggtaaggctccctgagtcccttactccaggtcagatgccagtgggactcatgcgccctatgagggctgcagggccagtgctgcccctcggactcctcgaggggttgggtgctaagcgcgagcctcgccgtccctgctggagccctcgcctgcctgcccctctgcctgtgctcctggcastgtggcttcccggtgctcacctgcacagcagttaacagcagaggccgagcgggagcctctggggagcgaggctgaaacctgaacctgcccatggagacagttgtggtgagggttgccacacacagtgagggcrgagcagggtggctgagggcacaggtgcctgggtctgtcccacggggcagggctttggggctgtgatgctctgggaagccagcttgggtcctgggtctacagagggccctggccccggagcccagccagctctgcctctctcagggcctggagtcctgggggagctcagccagctctgcctttctcagggcctggagtcctggatgaatcctgcaggtttttggttgcaccggcccagggaggaagcggggggtttgtcaggtgggctctcctggaggtcctcgagtggcaggggtgaggaggggattatctgaggcatctggagatgtatrtcctgtggtttcccctgcccctctgtttccgatgaggtgtacggatgagtgacctgcactaagaagtgagttgccacagtgaaaatgggttggtttttgtcttcgacgctcagggtctgggcgcctcgcatttgcagtctgttgtgacagacacggggagctccgcgtgccagcctgtggctgccctgctgtgggggtcctggggccggcgaggccccttcagtcttgttctggggggacggcccactccggggagggggtgtgctgtgctgagcgctgtatccctgaatatagtttattttttctacatttgaattctgttgtagatttatgtaaaaatacattctttttgaaaataaaaattttcatgtcttct

SEQ ID NO: 151 - DNA, 1185 bp, Homo sapiens
atgaaggattccgtcaaactggttattttgcatcatgtagaccactatttcccaacctgcaagtgcatcatggcctttggcatttctatgatgtggctgcttttaacaacaacttgtttgatctgtggaactttaaatgctggtggattccttgatttggaaaatgaagtgaatcctgaggtgtggatgaatactagtgaaatcatcatctacaatggctaccccagtgaagagtatgaagtcaccactgaagatgggtatatactccttgtcaacagaattccttatgggcgaacacatgctaggagcacagcagatgcaggttatgatgtatggatgggaaacagtcggggaaacacttggtcaagaagacacaaaacactctyagagacagatgagaaattctgggcctttagttttgatgaaatggccaaatatgatctcccaggagtaatagacttcattgtaaataaaactggtcaggagaaattgtatttcattggacattcacttggcactacaatagggtttgtagccttttccaccatgcctgaactggcacaaagaatcaaaatgaattttgccttgggtcctacgatctcattcaaatatcccacgggcatttttaccaggttttttctacttccaaattccataatcaaggctgtttttggtaccaaaggtttctttttagaagataagaaaacgaagatagcttctaccaaaatctgcaacaataagataytctggttgatatgtagcgaatttatgtccttatgggctggatccaacaagaaaaatatgaatcagagtcgaatggatgtgtatatgtcacatgctcccactggttcatcagtacacaacattctgcatataaaacagctttaccactctgatgaattcagagcttatgactggggaaatgacgctgataatatgaaacattacaatcagagtcatccccctatatatgacctgactgccatgaaagtgcctactgctatttgggctggtggacatgatgtcctcgtaacaccccaggatgtggccaggatactccctcaaatcaagagtcttcattactttaagctattgccagattggaaccactttgattttgtctggggcctcgatgcccctcaacggatgtacagtgaaatcatagctttaatgaaggcatattcc

SEQ ID NO: 152 - DNA, 486 bp, Homo sapiens
ggccagagacctgttgtgtttttgcagcatggtttgcttgcatcagccacaaactggatttccaacctgccgaacaacagccttgccttcattctggcagatgctggttatgatgtgtggctgggcaacagcagaggaaacacctgggccagaagaaacttgtactattcaccagattcagttgaattctgggctttcagatcccaaatgtggcagcttttagcagcagcatgctggatgcttcttcttggatctatgtatggttatgacaagaaaggaaacaatgcaaaccctgaagctaatatgaatattcatgccctgtttgcagacaatgcctactggcttgagaattatgcyaatggaagccttggattccttctagcagatgcaggttatgatgtatggatgggaaacagtcggggaaacacttggtcaagaagacacaaaacactctyagagacagatgagaaattctgggcctttagg

SEQ ID NO: 153 - DNA, 1388 bp, Homo sapiens
  misc_feature (1)...(1388): n = A,T,C or G, or insertion/deletion polymorphism (see Tables 1-2)
atactaaccagccagagaaacagaatcctaactatttctgaggaaactgcaggtccaaaatgtggctgcttttaacaatggcaagtttgatatctgtactggggactacacatggtttgtttggaaaattacatcctggaagccctgaagtgactatgaacattagtcagatgattacttattggggatacccaaatgaagaatatgaagttgtgactgaagatggttatattcttgaagtcaatagaattccttatgggaagaaaaattcagggaatacaggccagagacctgttgtgtttttgcagcatggtttgcttgcatcagccacaaactggatttccaacctgccgaacaacagccttgccttcattctggcagatgctggttatgatgtgtggctgggcaacagcagaggaaacacctgggccagaagaaacttgtactattcaccagattcagttgaattctgggctttcagctttgatgaaatggctaaatatgaccttccagccacaatcgacttcattgtaaagaaanctggacagaagcagctacactatgttggccattcccagggcaccaccattggttttattgccttttccaccaatcccagcctggctaaaagaatcaaaaccttctatgctctagctcctgttgccactgtgaagtatacaaaaagccttataaacaaacttagatttgttcctcaatccctcttcaagwttatatttggtgacaaaatattctacccacacaacttctttgatcaatttcttgctactgaagtgtgctcccgtgagatgytgaatctcctttgcagcaatgccttatttataatttgtggatttgacagtaagaactttaacacgagtcgcttggatgtgtatctatcacataatccagcaggaacttctgttcaaaacatgttccattggacccaggctgttaagtctgggaaattccaagcttatgactggggaagcccagttcagaataggatgcactatgatcagtcccarcctccctactacaatgtgacagccatgaatgtaccaattgcagtgtggaacggtggcaaggacctgttggctgacccccaagatgttggccttttgcttccaaaactccccaatcttatttaccacaaggagattcctttttayaatcacttggactttatctgggcaatggatgcccctcaagaagtttacaatgacattgtttctatgatatcagaagataaaaagtagttctggatttaaagaattatccgtttgtttttccaaaatactttattctctcatacayagtattttcataatgtttgacatgcagtgcttctttctgtaattttgactttagaaatatattggcatcaacaa

SEQ ID NO: 154 - DNA, 9320 bp, Homo sapiens
atagcttaaacatgtaattagtatcaccacaaatgagaagaatgaaaggatcacattttccccctcgttttcccttgaagtcatgaacggttggttctgctgtgactttggggcttasttttcagtagaagtgttgtcctgctctgctgctgttactgcgggactgctaattcaggctaactcaggcggcgggcgctgtgtgctctgaacatcaaaccgcgggtgaggcgtcaacccaggagtttattttgtgatcagagtggaaccactacacttcactttcccctcacctccacctctgagggagcaacgaatacaaaggtagacccccaaaagctttgaatagctgtcgcctactttcccgcggccctcttcattttttcgtctcccgctgccgccgccgccgccgcctctggatctggacggacccagtggccgctgccgcctccgcagggccgggcactactttccgtctgcggtggttccgccgaccctcccgcggctgctgccccgcccgcgccggcggaaggagacgcgctgcgcgccgccgctgcccggggagggagacggagcagtactggccgcggcgcggtggcggcggctgggctgcctcggggtcttcgacggccgcgttgggttttgtttcagttttcttgtgtggcgctgcagcacaaggctgcgaatctgggagtccaaaggagtgtttgcggggagggcccgaggtcgctgtgtccggggcagagcggccggttcgtcccgagtctgcgctctttcgggtccgctgctgtgtcccggtccgctctcctcagcatgagcggccggtaggagtgaggtttcatcggttccctcgcactggaggargcagcggccgcttcggcagcgacagctatggcggtagagacgcgggcagagctggtgggtaagcggttcctgtgtgtggcggtcggcgacgaggcacgttcggagcgctgggagagcggacgcggctggcgaagctggcgagcgggggtcatccgagccgtgtcacacagggacagccgcaatccggacctggcggtgtatgtggaatttgatgatcttgaatgggataaacgagagtgggttaaagtttatgaagatttttcaactttcttggtggaataccacttaatctgggccaaaaggaatgaccctagccagactcagggatcaaagagcaaacagattcagtggcctgcattgactttcaaacctctggttgaaagaaatatacccagttcagtcactgcagtagaattccttgtagataagcaactggattttttaactgaagatagtgcctttcagccctaccaggacgacatagacagcctaaacccagttctcagggacaacccgcagcttcatgaggaagtgaaagtctgggtaaaggaacaaaaggttcaggagatttttatgcaaggtccttattccttaaatggatacagagtgagagtatatagacaagactctgccacccagtggtttactggcataattactcatcatgatctcttcacccgcaccatgatcgttatgaatgatcaggtactagaaccacagaatgtcgatccttctatggttcaaatgacctttctagatgatgttgttcactctttgttaaaaggygaaaatattggcattacatcacgacgcaggtctcgtgccaatcaaaacgtcaacrctgttcacagccattatacacgtgcccaagcaaatagtcccagaccagcaatgaactcccaagctgctgtaccaaaacagaatayacaccagcaacagcaacaaagaagtatccgtccmaataagaggaagggctcagatagcagtataccagatgaagagaagatgaaggaggaaaaatatgattatatatcacgaggagaaaatcctaaaggtaaaaacaaacacttgatgaataaaagaaggaaacctgaggaggatgaaaagaaactaaatatgaaaagacttcgaactgacaatgtttcagacttttctgagagcagtgactcagaaaattcaaataagagaataatagataattcctcagamcagaagccagagaatgaattgaaaaataaaaatacttcaaaaataaatggagaagaaggaaaaccccataataatgagaaggcaggagaagagaccctaaaaaatagccagcctccctgggatcaaatacaggaagataaaaaacatgaagaagcagagaagcggaagtctgttgacactcagcttcaagaagatatgattattcatwcgtcagaacagtccacagtttctgatcataattctaatgatttacttcctcaggaatgcaatatggataaaacacataccatggaattgctaccaaaggagaagtttgtatccagaccacccacaccaaaatgtgttattgatattacaaatgacactaatttagaaaaggtggctcaggaaaactcaagtacctttggccttcagacacttcagaaaatggatcctaatgttagtgattcaaaacactctattgcaaatgcaaaattcttggaaacagcaaaaaaagattctgaccagagctgggtcagtgatgtagttaaagtggatctaacccaatcaagtgttacaaatgcttcttcaggaaatgatcacttgaacatggaaaaagagaagtatgtctcttacatttctcctttaagtgcagtttctgtcatggaagataagctgcataagcgaagtccacctccagagactataaaatctaaacttaatacttcagtagatactcacaagataaaatccagcccatcacctgaagttgttaaacccaaaataactcattctcctgattctgtaaagtctaaggccacttatgtgaacagccaagctactggtgaaagaagattggcaaataagatagaacatgagctatcaagatgcagttttcatccaattcctactcgaagcagtacattagaaactacaaagagtcctcttatcattgataaaaatgagcattttacagtttacagagatcctgcacttattgggtcagaaacaggagctaatcatatttcacctttcctaagccagcatccttttcctcttcactcctcatctcatagaacctgtttaaatccaggtacccatcatcctgccttaactcctgcaccccatttactagccggatcatctagtcaaactccattacctaccattaacactcatcctctgactagtggtccacaccatgctgttcatcaccctcatttacttcccactgtgttacctggagtgcctactgcctccttacttggtggccacccacgactagagagtgctcatgccagcagcttgagccacttagcgctagcacaccagcaacaacaacagttgttacagcaccagtcacctcatcttcttggacaagcccatccttctgcttcatataatcagcttggactttatccaattatttggcagtatccaaatggaacacatgcatactcaggactyggtttgccttcttctaagtgggttcacccagaaaatgcagttaatgctgaagcttcattaaggaggaattctcccagtccttggctacatcagcccacccctgtgacctcagcagatggtattggattacttagtcacattcctgtcagaccttccagtgcagagcctcatcggcctcttaaaattacagcccattccagtccaccattgacaaaaactttagtagatcatcataaggaagaattagaaagaaaagcttttatggaaccattacggtctgttgcatccacatcagccaaaaatgacctggatctaaataggtcacagactggaaaagattgtcacttacataggcattttgtggatccagtattaaatcagttacagaggccaccccaggagactggagagaggttaaacaaatacaaagaggaacaccgtcgaattcttcaagaaagtattgatgttgctccctttacaactaaaatcaagggacttgagggtgagagagagaattattccagagtggcatcatcatcttccagtcctaaaagccatatcatcaaacaagatatggatgtagaacgctcagtatcagatctttataaaatgaagcactcagtgcctcagagtttaccccaaagtaactatttcactacattgtctaatagtgtggtcaatgaaccaccaagatcatacccatccaaagaagtttcaaatatttacggtgataaacagagtaatgcccttgcagcggcagcagctaatcctcaaactctgacttcatttataacatctctttcaaagcctccacctttgattaaacaccaaccagaaagtgaaggtttagtaggcaagataccagaacatcttccacatcagattgcatctcactcagtaacaaccttcagaaatgattgtaggagtcctacccatttgacagtttcttctacaaatacactccgcagtatgcctgcattacatagagcaccagtatttcacccaccaatccatcacagcctggaaagaaaggaaggcagctatagtagtctttcccctccaactttaactccggtgatgccagtaaatgctggtggtaaagttcaagaatcacagaagcctccaactctaatacccgaaccaaaagactcccaggcaaattttaagagttcttcagaacagagtttgacggagatgtggagacctaataataacctcagcaaagagaaaactgaatggcatgtggagaaaagcagcggaaagttacaggctgctatggcatctgtcattgtgcgtccatcttctagtacaaaaactgatagtatgccagcaatgcagttagcttctaaagatcgwgttagtgaaagatcttcagctggggcacataaaacagattgcctcaaactagcagaagccggagaaactggaagaatcattttgccaaatgtgaattcagacagtgttcacacaaaatctgaaaaaaactttcaggctgtctcacagggcagtgttcccagttcagtcatgtctgctgtaaatacgatgtgtaataccaaaacggatgtaatcacatctgctgccgatactaccagtgtttccagctggggtggttcagaagtaatttcctctttatcaaataccattttggcctctacatcatcagaatgtgtatcttcaaaaagtgtcagtcagccagtggctcaaaaacaagaatgcaaggtcagcaccacagcaccagttacattagccagtagtaagacaggaagtgttgttcaacccagttctgggttctcaggcacaactgattttatccatttaaaaaagcacaaggcagcattggctgcagctcagtataaaagtagtaatgccagtgagactgaacctaatgctataaaaaatcagacactttcagcctcccttcctctggatagcactgtaatctgtagtacaattaacaaagcaaactctgtaggaaatgggcaagcttcccagacaagtcaaccaaactaccatactaaactgaaaaaggcctggctcaccagacactcagaagaagataaaaatactaataaaatggaaaattcagggaattctgtatcagaaattattaagccatgttctgtcaacttaatagcctctacatctagtgatatacaaaatagtgtagatagtaagatcatagttgataaatatgtaaaagatgataaagtcaacaggagaaaagccaaaagaacttatgaatctggctctgaaagtggagactcagatgaaagtgaaagcaagtcagagcaaaggactaaaagacaacctaagccaacttacaaaaagaagcaaaatgatttgcaaaagagaaaaggtgaaatagaagaagatttgaaacccaatggagttctcagcaggagtgccaaagaaagaagtaaactgaagttgcaaagcaacagtaatactggcattcctcgttcagtattgaaagattggcgtaaagtcaagaagctgaagcaaactggggaatcctttttacaggatgactcctgctgtgagatagggcctaatttacaaaagtgtcgagaatgtagacttattcgcagtaaaaaaggagaagaaccagctcactcaccagtattttgtagattttactactttagacggttgtcatttagtaaaaacggagtagttagaatagatggtttctcttctcctgaccaatatgatgatgaagctatgagtttgtggacacatgaaaattttgaagatgatgaactagatatagagacttctaaatatatcttggatataataggtgataagttctgtcaattagtaacatctgaaaaaacagctttgtcctgggtgaaaaaggatgccaaaattgcctggaaaagagcagtgagaggagtccgggagatgtgtgatgcatgtgaagcaacattgtttaacattcactgggtctgccaaaaatgtggatttgtggtctgcttagattgttacaaggcaaaggaaaggaagagttctagagataaagaactatatgcttggatgaagtgtgtgaagggacagcctcatgatcacaaacatttaatgccaacccaaattttgacagatcttctagatgccatgcacactcttagggaaaaatatggtattaaatcccattgtcattgtactaacaaacagaatttacaagttggaaattttcctacaatgaatggtgtatctcaagttttacagaatgttcttaatcacagtaataaaatttctctgtgcatgcctgagtctcagcagcaaaatactcctccraagtctgagaaaaatggtggcagcagcccagagagtgatgtaggcacagataacaagttaactcctccagaatcccagtcaccactgcactggttagcagatcttgcagagcaaaaagccagagaggaaaaaaaagaaaacaaagaacttacccttgaaaaccaaattaaagaagaaagagaacaagacaactctgaatctccaaatggcagaacatcacctcttgtgtcccagaataatgaacaaggctcaaccttacgggatttgctgactacaacagctggaaagctacgtgtggggtctacagatgctggcattgcctttgccccagtatattcaatgggagccccaagtagcaaaagtggacggactatgcctaacattcttgatgacataattgcttcagttgttgaaaacaaaattccaccaagtaaaacctccaagataaatgtaaaaccagagcttaaagaagagcctgaagaaagcataatatctgcagtggatgaaaataataaattatacagtgatataccacattcttggatctgtgagaagcatattttatggcttaaggattataagaatagcagtaattggaagcttttcaaagaatgttggaaacaaggacagcctgcagtggtttctggtgtgcataagaaaatgaacattagcctatggaaggcggaatcaattagtcttgattttggagaccaccaagctgatctcctgaactgcaaagatagcatcatttcaaatgccaatgttaaggaattctgggatggttttgaagaagtttcaaaacggcagaaaaacaagagtggagaaacagttgttttaaaattgaaagattggccttcaggagaagacttcaagactatgatgccagcaagatacgaagatcttttaaaaagtctgccattgccagaatattgtaatccagaaggaaaattcaatttggcctctcatttgccaggattttttgtacgtcctgatctaggacccaggttgtgcagtgcctatggtgtagttgctgctaaagatcatgatataggaacaacaaatctccatattgaagtttctgatgttgtaaatatactagtttatgttggcatagcaaaaggaaatggcattctctcaaaagcaggaattctcaagaaatttgaggaagaagatttggatgacattttaaggaaaagattgaaggactcaagtgaaatacctggtgctctgtggcatatttatgctgggaaagatgttgasaagataagggaatttcttcaaaagatttcaaaagaacaaggccttgaagttctaccagaacatgatccaatacgtgaccaaagttggtatgtgaacaaaaagctccgtcaaaggctgcttgaagaatatggagtcagaacctgtactcttattcagttccttggtgatgctattgttttgccagcgggagcacttcatcaggttcagaattttcacagctgtattcaggtaactgaagattttgtgtctccagaacatcttgtagagtcatttcatttaacacaggaactgagacttttgaaggaagaaatcaattatgatgataaactacaggttaaaaatattttgtatcatgcagtcaaagaaatggtgagagccttgaagatacacgaggatgaagtagasgatatggaagaaaattaagtgtgatccagtttgatatttttaggttgttgaactgggattacttaaccttgaatgatgatatgtatgcacactgactttaagcttcataaaaccatcagtgccaagaaattctctttgtagtaattacttgttactgacaccacagcagtatagcatatgtcacagctcctgtgattcaatgttataaaacaagcagaattttaaaagcagcactatatagctgttttgtattatagtgtatatgatgtttgtgaaaatgccagatttaaaatgatgtatttatttttggtaaaaaataaaaaattctatgctatattgttgatcaagtgtaaatgtgaccttgtacagtttactaaaattactgatatttttcactacattgagacrgttactgtgagaataggacacaaacaccagctattgcctgcatctgggaaattgctgaatcgcacagcagtcatgtcataatcagaaaattactgccaaataattgtaaaatttgtaaagtataaagtatataaagtagatactaaatacagacacttcaatattttgttgaagctattgactgtacaattaaacattttcaaaaggtgtaatttatttaaaattgtctcattttggtaaaatttatgtgaacttttaaagctaaatattaaacttaatatgctatgtaaatatatacatatatacatttaatgatgtatttttttaaaacattggcttgcttttgttaaagtgcaagtgttacatatggctttgtacattaaagttgaaaggggttttacattttccattaaaaggactttatcaaaaattga

SEQ ID NO: 155 - DNA, 8382 bp, Homo sapiens
cgccgcgccgcaccgcacgcagccgagcagcgccacagccgccgccgccgtcgcagccgcagtcgccgcagctaggccctcggccgtcgcagggagctccgcagcgacgtggaccaaggtgtatgtggaatttgatgatcttgaatgggataaacgagagtgggttaaagtttatgaagatttttcaactttcttggtggaataccacttaatctgggccaaaaggaatgaccctagccagactcagggatcaaagagcaaacagattcagtggcctgcattgactttcaaacctctggttgaaagaaatatacccagttcagtcactgcagtagaattccttgtagataagcaactggattttttaactgaagatagtgcctttcagccctaccaggacgacatagacagcctaaacccagttctcagggacaacccgcagcttcatgaggaagtgaaagtctgggtaaaggaacaaaaggttcaggagatttttatgcaaggtccttattccttaaatggatacagagtgagagtatatagacaagactctgccacccagtggtttactggcataattactcatcatgatctcttcacccgcaccatgatcgttatgaatgatcaggtactagaaccacagaatgtcgatccttctatggttcaaatgacctttctagatgatgttgttcactctttgttaaaaggygaaaatattggcattacatcacgacgcaggtctcgtgccaatcaaaacgtcaacrctgttcacagccattatacacgtgcccaagcaaatagtcccagaccagcaatgaactcccaagctgctgtaccaaaacagaatayacaccagcaacagcaacaaagaagtatccgtccmaataagaggaagggctcagatagcagtataccagatgaagagaagatgaaggaggaaaaatatgattatatatcacgaggagaaaatcctaaaggtaaaaacaaacacttgatgaataaaagaaggaaacctgaggaggatgaaaagaaactaaatatgaaaagacttcgaactgacaatgtttcagacttttctgagagcagtgactcagaaaattcaaataagagaataatagataattcctcagamcagaagccagagaatgaattgaaaaataaaaatacttcaaaaataaatggagaagaaggaaaaccccataataatgagaaggcaggagaagagaccctaaaaaatagccagcctccctgggatcaaatacaggaagataaaaaacatgaagaagcagagaagcggaagtctgttgacactcagcttcaagaagatatgattattcatwcgtcagaacagtccacagtttctgatcataattctaatgatttacttcctcaggaatgcaatatggataaaacacataccatggaattgctaccaaaggagaagtttgtatccagaccacccacaccaaaatgtgttattgatattacaaatgacactaatttagaaaaggtggctcaggaaaactcaagtacctttggccttcagacacttcagaaaatggatcctaatgttagtgattcaaaacactctattgcaaatgcaaaattcttggaaacagcaaaaaaagattctgaccagagctgggtcagtgatgtagttaaagtggatctaacccaatcaagtgttacaaatgcttcttcaggaaatgatcacttgaacatggaaaaagagaagtatgtctcttacatttctcctttaagtgcagtttctgtcatggaagataagctgcataagcgaagtccacctccagagactataaaatctaaacttaatacttcagtagatactcacaagataaaatccagcccatcacctgaagttgttaaacccaaaataactcattctcctgattctgtaaagtctaaggccacttatgtgaacagccaagctactggtgaaagaagattggcaaataagatagaacatgagctatcaagatgcagttttcatccaattcctactcgaagcagtacattagaaactacaaagagtcctcttatcattgataaaaatgagcattttacagtttacagagatcctgcacttattgggtcagaaacaggagctaatcatatttcacctttcctaagccagcatccttttcctcttcactcctcatctcatagaacctgtttaaatccaggtacccatcatcctgccttaactcctgcaccccatttactagccggatcatctagtcaaactccattacctaccattaacactcatcctctgactagtggtccacaccatgctgttcatcaccctcatttacttcccactgtgttacctggagtgcctactgcctccttacttggtggccacccacgactagagagtgctcatgccagcagcttgagccacttagcgctagcacaccagcaacaacaacagttgttacagcaccagtcacctcatcttcttggacaagcccatccttctgcttcatataatcagcttggactttatccaattatttggcagtatccaaatggaacacatgcatactcaggactyggtttgccttcttctaagtgggttcacccagaaaatgcagttaatgctgaagcttcattaaggaggaattctcccagtccttggctacatcagcccacccctgtgacctcagcagatggtattggattacttagtcacattcctgtcagaccttccagtgcagagcctcatcggcctcttaaaattacagcccattccagtccaccattgacaaaaactttagtagatcatcataaggaagaattagaaagaaaagcttttatggaaccattacggtctgttgcatccacatcagccaaaaatgacctggatctaaataggtcacagactggaaaagattgtcacttacataggcattttgtggatccagtattaaatcagttacagaggccaccccaggagactggagagaggttaaacaaatacaaagaggaacaccgtcgaattcttcaagaaagtattgatgttgctccctttacaactaaaatcaagggacttgagggtgagagagagaattattccagagtggcatcatcatcttccagtcctaaaagccatatcatcaaacaagatatggatgtagaacgctcagtatcagatctttataaaatgaagcactcagtgcctcagagtttaccccaaagtaactatttcactacattgtctaatagtgtggtcaatgaaccaccaagatcatacccatccaaagaagtttcaaatatttacggtgataaacagagtaatgcccttgcagcggcagcagctaatcctcaaactctgacttcatttataacatctctttcaaagcctccacctttgattaaacaccaaccagaaagtgaaggtttagtaggcaagataccagaacatcttccacatcagattgcatctcactcagtaacaaccttcagaaatgattgtaggagtcctacccatttgacagtttcttctacaaatacactccgcagtatgcctgcattacatagagcaccagtatttcacccaccaatccatcacagcctggaaagaaaggaaggcagctatagtagtctttcccctccaactttaactccggtgatgccagtaaatgctggtggtaaagttcaagaatcacagaagcctccaactctaatacccgaaccaaaagactcccaggcaaattttaagagttcttcagaacagagtttgacggagatgtggagacctaataataacctcagcaaagagaaaactgaatggcatgtggagaaaagcagcggaaagttacaggctgctatggcatctgtcattgtgcgtccatcttctagtacaaaaactgatagtatgccagcaatgcagttagcttctaaagatcgwgttagtgaaagatcttcagctggggcacataaaacagattgcctcaaactagcagaagccggagaaactggaagaatcattttgccaaatgtgaattcagacagtgttcacacaaaatctgaaaaaaactttcaggctgtctcacagggcagtgttcccagttcagtcatgtctgctgtaaatacgatgtgtaataccaaaacggatgtaatcacatctgctgccgatactaccagtgtttccagctggggtggttcagaagtaatttcctctttatcaaataccattttggcctctacatcatcagaatgtgtatcttcaaaaagtgtcagtcagccagtggctcaaaaacaagaatgcaaggtcagcaccacagcaccagttacattagccagtagtaagacaggaagtgttgttcaacccagttctgggttctcaggcacaactgattttatccatttaaaaaagcacaaggcagcattggctgcagctcagtataaaagtagtaatgccagtgagactgaacctaatgctataaaaaatcagacactttcagcctcccttcctctggatagcactgtaatctgtagtacaattaacaaagcaaactctgtaggaaatgggcaagcttcccagacaagtcaaccaaactaccatactaaactgaaaaaggcctggctcaccagacactcagaagaagataaaaatactaataaaatggaaaattcagggaattctgtatcagaaattattaagccatgttctgtcaacttaatagcctctacatctagtgatatacaaaatagtgtagatagtaagatcatagttgataaatatgtaaaagatgataaagtcaacaggagaaaagccaaaagaacttatgaatctggctctgaaagtggagactcagatgaaagtgaaagcaagtcagagcaaaggactaaaagacaacctaagccaacttacaaaaagaagcaaaatgatttgcaaaagagaaaaggtgaaatagaagaagatttgaaacccaatggagttctcagcaggagtgccaaagaaagaagtaaactgaagttgcaaagcaacagtaatactggcattcctcgttcagtattgaaagattggcgtaaagtcaagaagctgaagcaaactggggaatcctttttacaggatgactcctgctgtgagatagggcctaatttacaaaagtgtcgagaatgtagacttattcgcagtaaaaaaggagaagaaccagctcactcaccagtattttgtagattttactactttagacggttgtcatttagtaaaaacggagtagttagaatagatggtttctcttctcctgaccaatatgatgatgaagctatgagtttgtggacacatgaaaattttgaagatgatgaactagatatagagacttctaaatatatcttggatataataggtgataagttctgtcaattagtaacatctgaaaaaacagctttgtcctgggtgaaaaaggatgccaaaattgcctggaaaagagcagtgagaggagtccgggagatgtgtgatgcatgtgaagcaacattgtttaacattcactgggtctgccaaaaatgtggatttgtggtctgcttagattgttacaaggcaaaggaaaggaagagttctagagataaagaactatatgcttggatgaagtgtgtgaagggacagcctcatgatcacaaacatttaatgccaacccaaattttgacagatcttctagatgccatgcacactcttagggaaaaatatggtattaaatcccattgtcattgtactaacaaacagaatttacaagttggaaattttcctacaatgaatggtgtatctcaagttttacagaatgttcttaatcacagtaataaaatttctctgtgcatgcctgagtctcagcagcaaaatactcctccraagtctgagaaaaatggtggcagcagcccagagagtgatgtaggcacagataacaagttaactcctccagaatcccagtcaccactgcactggttagcagatcttgcagagcaaaaagccagagaggaaaaaaaagaaaacaaagaacttacccttgaaaaccaaattaaagaagaaagagaacaagacaactctgaatctccaaatggcagaacatcacctcttgtgtcccagaataatgaacaaggctcaaccttacgggatttgctgactacaacagctggaaagctacgtgtggggtctacagatgctggcattgcctttgccccagtatattcaatgggagccccaagtagcaaaagtggacggactatgcctaacattcttgatgacataattgcttcagttgttgaaaacaaaattccaccaagtaaaacctccaagataaatgtaaaaccagagcttaaagaagagcctgaagaaagcataatatctgcagtggatgaaaataataaattatacagtgatataccacattcttggatctgtgagaagcatattttatggcttaaggattataagaatagcagtaattggaagcttttcaaagaatgttggaaacaaggacagcctgcagtggtttctggtgtgcataagaaaatgaacattagcctatggaaggcggaatcaattagtcttgattttggagaccaccaagctgatctcctgaactgcaaagatagcatcatttcaaatgccaatgttaaggaattctgggatggttttgaagaagtttcaaaacggcagaaaaacaagagtggagaaacagttgttttaaaattgaaagattggccttcaggagaagacttcaagactatgatgccagcaagatacgaagatcttttaaaaagtctgccattgccagaatattgtaatccagaaggaaaattcaatttggcctctcatttgccaggattttttgtacgtcctgatctaggacccaggttgtgcagtgcctatggtgtagttgctgctaaagatcatgatataggaacaacaaatctccatattgaagtttctgatgttgtaaatatactagtttatgttggcatagcaaaaggaaatggcattctctcaaaagcaggaattctcaagaaatttgaggaagaagatttggatgacattttaaggaaaagattgaaggactcaagtgaaatacctggtgctctgtggcatatttatgctgggaaagatgttgasaagataagggaatttcttcaaaagatttcaaaagaacaaggccttgaagttctaccagaacatgatccaatacgtgaccaaagttggtatgtgaacaaaaagctccgtcaaaggctgcttgaagaatatggagtcagaacctgtactcttattcagttccttggtgatgctattgttttgccagcgggagcacttcatcaggttcagaattttcacagctgtattcaggtaactgaagattttgtgtctccagaacatcttgtagagtcatttcatttaacacaggaactgagacttttgaaggaagaaatcaattatgatgataaactacaggttaaaaatattttgtatcatgcagtcaaagaaatggtgagagccttgaagatacacgaggatgaagtagasgatatggaagaaaattaagtgtgatccagtttgatatttttaggttgttgaactgggattacttaaccttgaatgatgatatgtatgcacactgactttaagcttcataaaaccatcagtgccaagaaattctctttgtagtaattacttgttactgacaccacagcagtatagcatatgtcacagctcctgtgattcaatgttataaaacaagcagaattttaaaagcagcactatatagctgttttgtattatagtgtatatgatgtttgtgaaaatgccagatttaaaatgatgtatttatttttggtaaaaaataaaaaattctatgctatattgttgatcaagtgtaaatgtgaccttgtacagtttactaaaattactgatatttttcactacattgagacrgttactgtgagaataggacacaaacaccagctattgcctgcatctgggaaattgctgaatcgcacagcagtcatgtcataatcagaaaattactgccaaataattgtaaaatttgtaaagtataaagtatataaagtagatactaaatacagacacttcaatattttgttgaagctattgactgtacaattaaacattttcaaaaggtgtaatttatttaaaattgtctcattttggtaaaatttatgtgaacttttaaagctaaatattaaacttaatatgctatgtaaatatatacatatatacatttaatgatgtatttttttaaaacattggcttgcttttgttaaagtgcaagtgttacatatggctttgtacattaaagttgaaaggggttttacattttccattaaaaggactttatcaaaaattga

SEQ ID NO: 156 - DNA, 8015 bp, Homo sapiens
gactgcactgtgtttccacgcagacagagtacagtgggaaaggctttctccagctgatggatggctgttctctttatttggagtatcttactggttatgtaagcgacctcgagagaaattatcctgacccagatcggaggatgcagtagtgcttcagctgcaggatttcttagtcgttaacaccacagtgctgatgacaaagagcgagttgtaatcctcatcactgccagggctgagccagagcagacagaaaatcgtcatttgctcgttggagacttgttaggttacagctcctgcttcgttctgtggtcttggcttttcttyctatacaatgacgccgctgcaagtgagctcagaaatgcttggtttgagagccatttgcctgtgatttttgaagactaaagaagtatttacactagatactcttccagaacaaaatagaaatttcagcaaatacttactgacctttaaagccttgttgtggatttctgagatttaaagatactttaaaattctcaagaacaaagtccttattccttaaatggatacagagtgagagtatatagacaagactctgccacccagtggtttactggcataattactcatcatgatctcttcacccgcaccatgatcgttatgaatgatcaggtactagaaccacagaatgtcgatccttctatggttcaaatgacctttctagatgatgttgttcactctttgttaaaaggygaaaatattggcattacatcacgacgcaggtctcgtgccaatcaaaacgtcaacrctgttcacagccattatacacgcgcccaagcaaatagtcccagaccagcaatgaactcccaagctgctgtaccaaaacagaatayacaccagcaacagcaacaaagaagtatccgtccmaataagaggaagggctcagatagcagtataccagatgaagagaagatgaaggaggaaaaatatgattatatatcacgaggagaaaatcctaaaggtaaaaacaaacacttgatgaataaaagaaggaaacctgaggaggatgaaaagaaactaaatatgaaaagacttcgaactgacaatgtttcagacttttctgagagcagtgactcagaaaattcaaataagagaataatagataattcctcagamcagaagccagagaatgaattgaaaaataaaaatacttcaaaaataaatggagaagaaggaaaaccccataataatgagaaggcaggagaagagaccctaaaaaatagccagcctccctgggatcaaatacaggaagataaaaaacatgaagaagcagagaagcggaagtctgttgacactcagcttcaagaagatatgattattcatwcgtcagaacagtccacagtttctgatcataattctaatgatttacttcctcaggaatgcaatatggataaagcacataccatggaattgctaccaaaggagaagtttgtatccagaccacccacaccaaaatgtgttattgatattacaaatgacactaatttagaaaaggtggctcaggaaaactcaagtacctttggccttcagacacttcagaaaatggatcctaatgttagtgattcaaaacactctattgcaaatgcaaaattcttggaaacagcaaaaaaagattctgaccagagctgggtcagtgatgtagttaaagtggatctaacccaatcaagtgttacaaatgcttcttcaggaaatgatcacttgaacatggaaaaagagaagtatgtctcttacatttctcctttaagtgcagtttctgtcatggaagataagctgcataagcgaagtccacctccagagactataaaatctaaacttaatacttcagtagatactcacaagataaaatccagcccatcacctgaagttgttaaacccaaaataactcattctcctgattctgtaaagtctaaggccacttatgtgaacagccaagctactggtgaaagaagattggcaaataagatagaacatgagctatcaagatgcagttttcatccaattcctactcgaagcagtacattagaaactacaaagagtcctcttatcattgataaaaatgagcattttacagtttacagagatcctgcacttattgggtcagaaacaggagctaatcatatttcacctttcctaagccagcatccttttcctcttcactcctcatctcatagaacctgtttaaatccaggtacccatcatcctgccttaactcctgcaccccatttactagccggatcatctagtcaaactccattacctaccattaacgctcatcctctgcctagtggtccacaccatgctgttcatcaccctcatttacttcccactgtgttacctggagtgcctactgcctccttacttggtggccacccacgactagagagtgctcatgccagcagcttgagccacttagcgctagcacaccagcaacaacaacagttgttacagcaccagtcacctcatcttcttggacaagcccatccttctgcttcatataatcagcttggactttatccaattatttggcagtatccaaatggaacacatgcatactcaggactyggtttgccttcttctaagtgggttcacccagaaaatgcagttaatgctgaagcttcattaaggaggaattctcccagtccttggctacatcagcccacccctgtgacctcagcagatggtattggattacttagtcacattcctgtcagaccttccagtgcagagcctcatcggcctcttaaaattacagcccattccagtccaccattgacaaaaactttagtagatcatcataaggaagaattagaaagaaaagcttttatggaaccattacggtctgttgcatccacatcagccaaaaatgacctggatctaaataggtcacagactggaaaagattgtcacttacataggcattttgtggatccagtattaaatcagttacagaggccaccccaggagactggagagaggttaaacaaatacaaagaggaacaccgtcgaattcttcaagaaagtattgatgttgctccctttacaactaaaatcaagggacttgagggtgagagagagaattattccagagtggcatcatcatcttccagtcctaaaagtcatatcatcaaacaagatatggatgtagaacgctcagtatcagatctttataaaatgaagcactcagtgcctcagagtttaccccaaagtaactatttcactacattgtctaatagtgtggtcaatgaaccaccaagatcatacccatccaaagaagtttcaaatatttacggtgataaacagagtaatgcccttgcagcggcagcagctaatcctcaaactctgacttcatttataacatctctttcaaagcctccacctttgattaaacaccaaccagaaagtgaaggtttagtaggcaagataccagaacatcttccacatcagattgcatctcactcagtaacaaccttcagaaatgattgtaggagtcctacccatttgacagtttcttctacaaatacactccgcagtatgcctgcattacatagagcaccagtatttcacccaccaatccatcacagcctggaaagaaaggaaggcagctatagtagtctttcccctccaactttaactccggtgatgccagtaaatgctggtggtaaagttcaagaatcacagaagcctccaactctaatacccgaaccaaaagactcccaggcaaattttaagagttcttcagaacagagtttgacggagatgtggagacctaataataacctcagcaaagagaaaactgaatggcatgtggagaaaagcagcggaaagttacaggctgctatggcatctgtcattgtgcgtccatcttctagtacaaaaactgatagtatgccagcaatgcagttagcttctaaagatcgwgttagtgaaagatcttcagctggggcacataaaacagattgcctcaaactagcagaagccggagaaactggaagaatcattttgccaaatgtgaattcagacagtgttcacacaaaatctgaaaaaaactttcaggctgtctcacagggcagtgttcccagttcagtcatgtctgctgtaaatacgatgtgtaataccaaaacggatgtaatcacatctgctgccgatactaccagtgtttccagctggggtggttcagaagtaatttcctctttatcaaataccattttggcctctacatcatcagaatgtgtatcttcaaaaagtgtcagtcagccagtggctcaaaaacaagaatgcaaggtcagcaccacagcaccagttacattagccagtagtaagacaggaagtgttgttcaacccagttctgggttctcaggcacaactgattttatccatttaaaaaagcacaaggcagcattggctgcagctcagtataaaagtagtaatgccagtgagactgaacctaatgctataaaaaatcagacactttcagcctcccttcctctggatagcactgtaatctgtagtacaattaacaaagcaaactctgtaggaaatgggcaagcttcccagacaagtcaaccaaactaccatactaaactgaaaaaggcctggctcaccagacactcagaagaagataaaaatactaataaaatggaaaattcagggaattctgtatcagaaattattaagccatgttctgtcaacttaatagcctctacatctagtgatatacaaaatagtgtagatagtaagatcatagttgataaatatgtaaaagatgataaagtcaacaggagaaaagccaaaagaacttatgaatctggctctgaaagtggagactcagatgaaagtgaaagcaagtcagagcaaaggactaaaagacaacctaagccaacttacaaaaagaagcaaaatgatttgcaaaagagaaaaggtgaaatagaagaagatttgaaacccaatggagttctcagcaggagtgccaaagaaagaagtaaactgaagttgcaaagcaacagtaatagttgtcatttagtaaacggagtagttagaatagatggtttctcttctcctgaccaatatgatgatgaagctatgagtttgtggacacatgaaaattttgaagatgatgaactagatatagagacttctaaatatatcttggatataataggtgataagttctgtcaattagtaacatctgaaaaaacagctttgccccgggtgaaaaaggatgccaaaattgcctggaaaagagcagtgagaggagtccgggagatgtgtgatgcatgtgaagcaacattgtttaacattcactgggtctgccaaaaatgtggatttgtggtctgcttagattgttacaaggcaaaggaaaggaagagttctagagataaagaactatatgcttggatgaagtgtgtgaagggacagcctcatgatcacaaacatttaatgccaacccaaattatacctggttctgttttgacagatcttctagatgccatgcacactcttagggaaaaatatggtattaaatcccattgtcattgtactaacaaacagaatttacaagttggaaattttcctacaatgaatggtgtatctcaatctcagcagcaaaatactcctccgaagtctgagaaaaatggtggcagcagcccagagagtgatgtaggcacagataacaagttaactcctccagaatcccagtcaccactgcactggttagcagatcttgcagagcaaaaagccagagaggaaaaaaaagaaaacaaagaacttacccttgaaaaccaaattaaagaagaaagagaacaagacaactctgaatctccaaatggcagaacatcacctcttgtgtcccagaataatgaacaaggctcaaccttacgggatttgctgactacaacagctggaaagctacgtgtggggtctacagatgctggcattgcctttgccccagtatattcaatgggagccccaagtagcaaaagtggacggactatgcctaacattcttgatgacataattgcttcagttgttgaaaacaaaattccaccaagtaaaacctccaagataaatgtaaaaccagagcttaaagaagagcctgaagaaagcataatatctgcagtggatgaaaataataaattatacagtgatataccacattcttggatctgtgagaagcatattttatggcttaaggattataagaatagcagtaattggaagcttttcaaagaatgttggaaacaaggacagcctgcagtggtttctggtgtgcataagaaaatgaacattagcctatggaaggcggaatcaattagtcttgattttggagaccaccaagctgatctcctgaactgcaaagatagcatcatttcaaatgccaatgttaaggaattctgggatggttttgaagaagtttcaaaacggcagaaaaacaagagtggagaaacagttgttttaaaattgaaagactggccttcaggagaagacttcaagactatgatgccagcaagatacgaagatcttttaaaaagtctgccattgccagaatattgtaatccagaaggaaaattcaatttggcctctcatttgccaggattttttgtacgtcctgatctaggacccaggttgtgcagtgcctatggtgtagttgctgctaaagatcatgatataggaacaacaaatctccatattgaagtttctgatgttgtaaatatactagtttatgttggcatagcaaaaggaaatggcattctctcaaaagcaggaattctcaagaaatttgaggaagaagatttggatgacattttaaggaaaagattgaaggactcaagtgaaatacctggtgctctgtggcatatttatgctgggaaagatgttgasaagataagggaatttcttcaaaagatttcaaaagaacaaggccttgaagttctaccagaacatgatccaatacgtgaccaaagttggtatgtgaacaaaaagctccgtcaaaggctgcttgaagaatatggagtcagaacctgtactcttattcagttccttggtgatgctattgttttgccagcgggagcacttcatcaggttcagaattttcacagctgtattcaggtaactgaagattttgtgtctccagaacatcttgtagagtcatttcatttaacacaggaactgagacttttgaaggaagaaatcaattatgatgataaactacagtcaaagaaatggtgagagccttggagatacacgaggatgaagtagasgatatggaagaaaattaagtgtgatccagtttgatatttttaggttgttgaactgggattacttaaccttgaatgatgatatgtatgcacactgactttaagcttcataaaaccatcagtgccaagaaattctctttgtagtaattacttgttactgacaccacagcagtatagcatatgtcacagctcctgtgattcaatgttataaaacaagcagaattttaaaagcagcactatatagctgttttgtattatagtgtatatgatgtttgtgaaaatgccagatttaaaatgatgtatttatttttggtaaaaaataaaaaattctatgctatattgttgatcaagtgtaaatgtgaccttgtacagtttactaaaattactgatatttttcactacattgagacrgttactgtgagaataggacacaaacaccagctattgcctgcatctgggaaattgctgaatcgcacagcagtcatgtcataatcagaaaattactgccaaataattgtaaaatttgtaaagtataaagtatataaagtagatactaaatacagacacttcaatattttgttgaagctattgactgtacaattaaacattttcaaaaggtgtaatttatttaaaattgtctcattttggtaaaatttatgtgaacttttaaagctaaatattaaacttaatatgctatgtaaatataaaaaaaaaaaaaaaaaa

SEQ ID NO: 157 - DNA, 5282 bp, Homo sapiens
gtatgatgatgtcaaacgtgatgctgatgctacagttacagcccctgctggcgcagcctctctgattctctctccctctccgcgtccagtgctgggctttttcagacaagtgcatctcctaaccaggtcacatttcagccgcgacccactctccgccagtcaccggaggcagaccgcgggaggagagctgaggacagccgcgtgcgcttcgccagcagcggggtgggaggaaggacattaaaatactgcagaagtcaagacccccccaggtcgaacccagaccacgatgcgcgccccrggctgcgggcggctggtgctgccgctgctgctcctggccgcggcagccctggccgaaggcgacgccaaggggctcaaggagggcgagacccccggcaatttcatggaggacgagcaatggctgtcgtccatctcgcagtacagcggcaagatcaagcactggaaccgcttccgagacgtgagatgactatatcaagagctgggaggacaatcagcaaggagatgaagccctggataccaccaaggacccctgccagaaggtgaagtgcagccgccacaaggtgtgcattgcccagggctaccagcgggccatgtgcatcagtcgcaagaagctggagcacaggatcaagcagccgaccgtgaaactccatggaaacaaagactccatctgcaagccctgccacatggcccagcttgcctctgtctgcggctcagatggccacacttacagctctgtgtgtaagctggagcaacaggcgtgcctgagcagcaagcagctggcggtgcgatgcgagggcccctgcccctgccccacggagcaggctgccacctccaccgccgatggcaaaccagagacttgcaccggtcaggacctggctgacctgggagatcggctgcgggactggttccagctccttcatgagaactccaagcagaatggctcagccagcagtgtagccggcccggccagcgggctggacaagagcctgggggccagctgcaaggactccattggctggatgttctccaagctggacaccagkgctgacctcttcctggaccagacggagctggccgccatcaacctggacaagtacgaggtctgcatccgtcccttcttcaactcctgtgacacctacaaggatggccgggtctctactgctgagtggtgcttctgcttctggagggagaagcccccctgcctggcagagctggagcgcatccagatccaggaggccgccaagaagaagccaggcatcttcatcccgagctgcgacgaggatggctactaccggaagatgcagtgtgaccagagcagcrgtgactgctggtgtgtggaccagctgggcctggagctgactggcacgcgcacgcatgggagccccgactgcgatgacatcgtgggcttctcgggggactttggaagcggtgtcggctgggaggatgaggaggagaaggagacggaggaagcaggcgaggaggccgaggaggaggagggcgaggcaggcgaggctgacgacgggggctacatctggtagacgccctcagragccggctgccgggggggactcaacagcagagctctgagcagcagcaggcaacttcgagaacggatccagaaatgcagtcagaaggaccctgctccacctggggggactgggagtgtgagtgtgcatggcatgtgtgtggcacagatggctgggacgggtgacrgtgtgagtgcatgtgtgcatgcatgtgtgtatgtgtgtgtgtgtgtggcatgcgctgacaaatgtgtccttgatccacactgctcctggcagagtgagtmacccaaaggccccttcggcctccttgtagctgttttctttccttttgttgttggttttaaaatacattcacacacaaatacaaattgacaggtcaaaatccatgaaatgagatcccccagccgtgtcctccagcccagccctgaccccttggtttctaccctggctccccttggtttctaccctggctcaaccgacccctgtctgcccttctccctcytgcttctgaggtcaagctctggcctgcgagcctgtccccattgcaaaggggagggaggggcagggagctgtctaccagctgaggtcctcccaaaactgggccgatgtggtgtgacatccccaccagcctcagatgagacgggccaggacgcccagccacagcaagccctgtccctttgccggatccccaaacactagagaagctctcctaacccaaggcggagaatgaaggtggtggcggcagaggaggagggcagcagctgagaggccagggacagggtgcctcgccaagctgtctgaggtctgtcccaggtggcccaggtggtgcaggtagaacagggtgaggagagggggtcggctcarcaggaggaggctgtggctgcagagcctggrggagcttttaggtgttgagatggggcagctctgaatcctagaccctggaatagcctgtcccttttctctgggtctcgtggtggagccatgatctgggctgctctcttggggwsactgggtggtggttacacagttgacctctgcctggctcccccttggtgcaactcctgcctccatcccccttgctggggtcccctcatccacttgagggcgcctgagggccaggagcagcaggcaaggagcctgggtctaggctaagggggtgtgtgcccacctcctccctgacccttaacactcctgtcctgcccagaccaacagagagagctgtccctgagaccccggagagaagcagctgccgaaagctgcagcctttccgcactctgagaccatgatcttcctcctgccaggggagagccacccacaggccatgtccagccccacttccctcagcccccagggcttccttctggcccctctgaggattccctagggctgccccgcagaggggcttccccaagctctgttttgaagcctgcaatgtggaaaagtgagaagtcagagggaacaggacaggtgcagccgggctctgaggccacacctcacacctcgctgttccccaacatcccctgagcagtgtgagctcatctcaccagatgagaagaggccctgtgcatttcttttgtttgtttgttgctgttttcccccacccatccagttctccycagcaaagcaaattccttaacacctttggtggagaatttcttacccagacttggggctgtgatgcccttcagtgcgtggtgagtgcagcgtgtgtgcgtgtgcctgtgtgtgaacctgggggccatcctggtggcctgggagcgtgaggagaggccccctgtgtgctgggtgagtggtgggtgtggggtcaatgcagtgaggctctctgggtgaggctcccaacctggcagtccccagcctcccagcatctgtgagcgtctgttggactttacagaagagcctcatccygtctgcccctcactctgccctggaatcaacatcttccgagtccytcttgggggaaatagcagagcccmacttarctccataaactgcttcccattccgcagcccagttctgattgttgaggtgtcgcgtcgttccaggtcccccagtcccctctttctcctgtcctctctctgtccttcacctccccactccagccccggctcagttcagggaaatgctgttccayatcagccctctgctctctgaggcagccgcgcctctgactcggagctacttgaaacttctgctcttgctaggattggagtctacctatctcttccatttgtcccagctggagttctggaactttcctcctcggggtgggggtgggggttgttaaggatgctggggggcctggggaaggaaggagttcagaggaagggtgtcccctgtcctcttgatgtcaccctccgctcctgggacacgtgctctctctgtctctgggtcttctggctgtgcacgtttgtgtgtccttgtaaatatgttttaggaagaaagcaaaagggactgaactagcctctggtaggattgcaggggtccagccttgcctgtttccgaagcccccacactgcctttcgcccyactgagactggtcccctcaaaaggtagacaaaacagcagctccctgtggagctgaagggcggcctcaaagtggctttttgttagacaaggttaaggtttcctcatgagcaaggttgcagatcggtccttcctcagctccttgatttgtgaccttgaccaaggggcctgccacccagcccctccagtgccctctcctcgatgcctcgctccttcctgcccccactcccctggcttaggcaggtaggggaattagggccatgctggaagaagcttaaccatgtgttcaaagaacggtttcttgcttgcttggtcctggaactccccttggctgccccaggcctccttggcccatgggtgctgggggaggtggatgtcagatctggtaggttgcagcagagaaaataaatgtgccttgagagaccactcagagagggtccaagggtgatggagaaggaagcatggcctgggagcttggaagggaggggtggtgggtggcggcatcttgactgccccctgttgtcccacacgtggggggtggtcaccccccttcactccagcccgcctgccttcagccttccatgagcttcacctgcttccaacttcactttggagggggtggggtccgttggcatcaacacggggaccctctgcttcaccaaagcccgagccctcagcccctggggagaacaaatggctgagctttgatacctggggtcgtcgagaggctgcgggctggcggcagtcccaggggagagacaccacagaaggagacccagacatcccgaggaagttcccagcagagcaaactgctttccagcctgaagcctgcttaaactgtgtgatgtgcaataactgagcttagagttaggaattgtgttcaagtgcttggatttccgtctgtagatttaactgctgaaattgtatctctcagtaattttagatgtcttttaaaaarttgaaaaacaaagtgttagactgtgtgcgtgtgcgttgatgggcactcaagagtcccgtgagtcatccagccctgcctttcccctgcgcccccatcctctcacgtcccgcccygcctccacttggggaccctgcctcgtgtcgtctttatctgcctattactcagcctaaggaaacaagtacactccacacatgcataaaggaaatcaaatgttatttttaagaaaatggaaaataaaaactttataaacacca

SEQ ID NO: 158 - DNA, 5227 bp, Homo sapiens
agttgttatacggcttttgtcttaacgaagccacccattacggtatgatgatgtcaaacgtgatgctgatgctacagttacagcccctgctggcgcagcctctctgattctctctccctctccgcgtccagtgctgggctttttcagacaagtgcatctcctaaccaggtcacatttcagccgcgacccactctccgccagtcaccggaggcagaccgcgggaggagagctgaggacagccgcgtgcgcttcgccagcagcggggtgggaggaaggacattaaaatactgcagaagtcaagacccccccaggtcgaacccagaccacgatgcgcgccccrggctgcgggcggctggtgctgccgctgctgctcctggccgcggcagccctggccgaaggcgacgccaaggggctcaaggagggcgagacccccggcaatttcatggaggacgagcaatggctgtcgtccatctcgcagtacagcggcaagatcaagcactggaaccgcttccgagacgatgactatatcaagagctgggaggacaatcagcaaggagatgaagccctggataccaccaaggacccctgccagaaggtgaagtgcagccgccacaaggtgtgcattgcccagggctaccagcgggccatgtgcatcagtcgcaagaagctggagcacaggatcaagcagccgaccgtgaaactccatggaaacaaagactccatctgcaagccctgccacatggcccagcttgcctctgtctgcggctcagatggccacacttacagctctgtgtgtaagctggagcaacaggcgtgcctgagcagcaagcagctggcggtgcgatgcgagggcccctgcccctgccccacggagcaggctgccacctccaccgccgatggcaaaccagagacttgcaccggtcaggacctggctgacctgggagatcggctgcgggactggttccagctccttcatgagaactccaagcagaatggctcagccagcagtgtagccggcccggccagcgggctggacaagagcctgggggccagctgcaaggactccattggctggatgttctccaagctggacaccagkgctgacctcttcctggaccagacggagctggccgccatcaacctggacaagtacgaggtctgcatccgtcccttcttcaactcctgtgacacctacaaggatggccgggtctctactgctgagtggtgcttctgcttctggagggagaagcccccctgcctggcagagctggagcgcatccagatccaggaggccgccaagaagaagccaggcatcttcatcccgagctgcgacgaggatggctactaccggaagatgcagtgtgaccagagcagcrgtgactgctggtgtgtggaccagctgggcctggagctgactggcacgcgcacgcatgggagccccgactgcgatgacatcgtgggcttctcgggggactttggaagcggtgtcggctgggaggatgaggaggagaaggagacggaggaagcaggcgaggaggccgaggaggaggagggcgaggcaggcgaggctgacgacgggggctacatctggtagacgccctcagragccggctgccgggggggactcaacagcagagctctgagcagcagcaggcaacttcgagaacggatccagaaatgcagtcagaaggaccctgctccacctggggggactgggagtgtgagtgtgcatggcatgtgtgtggcacagatggctgggacgggtgacrgtgtgagtgcatgtgtgcatgcatgtgtgtatgtgtgtgtgtgtgtggcatgcgctgacaaatgtgtccttgatccacactgctcctggcagagtgagtmacccaaaggccccttcggcctccttgtagctgttttctttccttttgttgttggttttaaaatacattcacacacaaatacaaattgacaggtcaaaatccatgaaatgagatcccccagccgtgtcctccagcccagccctgaccccttggtttctaccctggctccccttggtttctaccctggctcaaccgacccctgtctgcccttctccctcytgcttctgaggtcaagctctggcctgcgagcctgtccccattgcaaaggggagggaggggcagggagctgtctaccagctgaggtcctcccaaaactgggccgatgtggtgtgacatccccaccagcctcagatgagacgggccaggacgcccagccacagcaagccctgtccctttgccggatccccaaacactagagaagctctcctaacccaaggcggagaatgaaggtggtggcggcagaggaggagggcagcagctgagaggccagggacagggtgcctcgccaagctgtctgaggtctgtcccaggtggcccaggtggtgcaggtagaacagggtgaggagagggggtcggctcarcaggaggaggctgtggctgcagagcctggrggagcttttaggtgttgagatggggcagctctgaatcctagaccctggaatagcctgtcccttttctctgggtctcgtggtggagccatgatctgggctgctctcttggggwsactgggtggtggttacacagttgacctctgcctggctcccccttggtgcaactcctgcctccatcccccttgctggggtcccctcatccacttgagggcgcctgagggccaggagcagcaggcaaggagcctgggtctaggctaagggggtgtgtgcccacctcctccctgacccttaacactcctgtcctgcccagaccaacagagagagctgtccctgagaccccggagagaagcagctgccgaaagctgcagcctttccgcactctgagaccatgatcttcctcctgccaggggagagccacccacaggccatgtccagccccacttccctcagcccccagggcttccttctggcccctctgaggattccctagggctgccccgcagaggggcttccccaagctctgttttgaagcctgcaatgtggaaaagtgagaagtcagagggaacaggacaggtgcagccgggctctgaggccacacctcacacctcgctgttccccaacatcccctgagcagtgtgagctcatctcaccagatgagaagaggccctgtgcatttcttttgtttgtttgttgctgttttcccccacccatccagttctccycagcaaagcaaattccttaacacctttggtggagaatttcttacccagacttggggctgtgatgcccttcagtgcgtggtgagtgcagcgtgtgtgcgtgtgcctgtgtgccccctgtgtgctgggtgagtggtgggtgtggggtcaatgcagtgaggctctctgggtgaggctcccaacctggcagtccccagcctcccagcatctgtgagcgtctgttggactttacagaagagcctcatccygtctgcccctcactctgccctggaatcaacatcttccgagtccytcttgggggaaatagcagagcccmacttarctccataaactgcttcccattccgcagcccagttctgattgttgaggtgtcgcgtcgttccaggtcccccagtcccctctttctcctgtcctctctctgtccttcacctccccactccagccccggctcagttcagggaaatgctgttccayatcagccctctgctctctgaggcagccgcgcctctgactcggagctacttgaaacttctgctcttgctaggattggagtctacctatctcttccatttgtcccagctggagttctggaactttcctcctcggggtgggggtgggggttgttaaggatgctggggggcctggggaaggaaggagttcagaggaagggtgtcccctgtcctcttgatgtcaccctccgctcctgggacacgtgctctctctgtctctgggtcttctggctgtgcacgtttgtgtgtccttgtaaatatgttttaggaagaaagcaaaagggactgaactagcctctggtaggattgcaggggtccagccttgcctgtttccgaagcccccacactgcctttcgcccyactgagactggtcccctcaaaaggtagacaaaacagcagctccctgtggagctgaagggcggcctcaaagtggctttttgttagacaaggttaaggtttcctcatgagcaaggttgcagatcggtccttcctcagctccttgatttgtgaccttgaccaaggggcctgccacccagcccctccagtgccctctcctcgatgcctcgctccttcctgcccccactcccctggcttaggcaggtaggggaattagggccatgctggaagaagcttaaccatgtgttcaaagaacggtttcttgcttgcttggtcctggaactccccttggctgccccaggcctccttggcccatgggtgctgggggaggtggatgtcagatctggtaggttgcagcagagaaaataaatgtgccttgagagaccactcagagagggtccaagggtgatggagaaggaagcatggcctgggagcttggaagggaggggtggtgggtggcggcatcttgactgccccctgttgtcccacacgtggggggtggtcaccccccttcactccagcccgcctgccttcagccttccatgagcttcacctgcttccaacttcactttggagggggtggggtccgttggcatcaacacggggaccctctgcttcaccaaagcccgagccctcagcccctggggagaacaaatggctgagctttgatacctggggtcgtcgagaggctgcgggctggcggcagtcccaggggagagacaccacagaaggagacccagacatcccgaggaagttcccagcagagcaaactgctttccagcctgaagcctgcttaaactgtgtgatgtgcaataactgagcttagagttaggaattgtgttcaagtgcttggatttccgtctgtagatttaactgctgaaattgtatctctcagtaattttagatgtcttttaaaaarttgaaaaacaaagtgttagactgtgtgcgtgtgcgttgatgggcactcaagagtcccgtgagtcatccagccctgcctttcccctgcgcccccatcctctcacgtcccgcccygcctccacttggggaccctgcctcgtgtcgtctttatctgcctattactcagcctaaggaaacaagtacactccacacatgcataaaggaaa

SEQ ID NO: 159 - DNA, 5320 bp, Homo sapiens
agttgttatacggcttttgtcttaacgaagccacccattacggtatgatgatgtcaaacgtgatgctgatgctacagttacagcccctgctggcgcagcctctctgattctctctccctctccgcgtccagtgctgggctttttcagacaagtgcatctcctaaccaggtcacatttcagccgcgacccactctccgccagtcaccggaggcagaccgcgggaggagagctgaggacagccgcgtgcgcttcgccagcagcggggtgggaggaaggacattaaaatactgcagaagtcaagacccccccaggtcgaacccagaccacgatgcgcgccccrggctgcgggcggctggtgctgccgctgctgctcctggccgcggcagccctggccgaaggcgacgccaaggggctcaaggagggcgagacccccggcaatttcatggaggacgagcaatggctgtcgtccatctcgcagtacagcggcaagatcaagcactggaaccgcttccgagacgatgactatatcaagagctgggaggacaatcagcaaggagatgaagccctggataccaccaaggacccctgccagaaggtgaagtgcagccgccacaaggtgtgcattgcccagggctaccagcgggccatgtgcatcagtcgcaagaagctggagcacaggatcaagcagccgaccgtgaaactccatggaaacaaagactccatctgcaagccctgccacatggcccagcttgcctctgtctgcggctcagatggccacacttacagctctgtgtgtaagctggagcaacaggcgtgcctgagcagcaagcagctggcggtgcgatgcgagggcccctgcccctgccccacggagcaggctgccacctccaccgccgatggcaaaccagagacttgcaccggtcaggacctggctgacctgggagatcggctgcgggactggttccagctccttcatgagaactccaagcagaatggctcagccagcagtgtagccggcccggccagcgggctggacaagagcctgggggccagctgcaaggactccattggctggatgttctccaagctggacaccagkgctgacctcttcctggaccagacggagctggccgccatcaacctggacaagtacgaggtctgcatccgtcccttcttcaactcctgtgacacctacaaggatggccgggtctctactgctgagtggtgcttctgcttctggagggagaagcccccctgcctggcagagctggagcgcatccagatccaggaggccgccaagaagaagccaggcatcttcatcccgagctgcgacgaggatggctactaccggaagatgcagtgtgaccagagcagcrgtgactgctggtgtgtggaccagctgggcctggagctgactggcacgcgcacgcatgggagccccgactgcgatgacatcgtgggcttctcgggggactttggaagcggtgtcggctgggaggatgaggaggagaaggagacggaggaagcaggcgaggaggccgaggaggaggagggcgaggcaggcgaggctgacgacgggggctacatctggtagacgccctcagragccggctgccgggggggactcaacagcagagctctgagcagcagcaggcaacttcgagaacggatccagaaatgcagtcagaaggaccctgctccacctggggggactgggagtgtgagtgtgcatggcatgtgtgtggcacagatggctgggacgggtgacrgtgtgagtgcatgtgtgcatgcatgtgtgtatgtgtgtgtgtgtgtggcatgcgctgacaaatgtgtccttgatccacactgctcctggcagagtgagtmacccaaaggccccttcggcctccttgtagctgttttctttccttttgttgttggttttaaaatacattcacacacaaatacaaattgacaggtcaaaatccatgaaatgagatcccccagccgtgtcctccagcccagccctgaccccttggtttctaccctggctccccttggtttctaccctggctcaaccgacccctgtctgcccttctccctcytgcttctgaggtcaagctctggcctgcgagcctgtccccattgcaaaggggagggaggggcagggagctgtctaccagctgaggtcctcccaaaactgggccgatgtggtgtgacatccccaccagcctcagatgagacgggccaggacgcccagccacagcaagccctgtccctttgccggatccccaaacactagagaagctctcctaacccaaggcggagaatgaaggtggtggcggcagaggaggagggcagcagctgagaggccagggacagggtgcctcgccaagctgtctgaggtctgtcccaggtggcccaggtggtgcaggtagaacagggtgaggagagggggtcggctcarcaggaggaggctgtggctgcagagcctggrggagcttttaggtgttgagatggggcagctctgaatcctagaccctggaatagcctgtcccttttctctgggtctcgtggtggagccatgatctgggctgctctcttggggwsactgggtggtggttacacagttgacctctgcctggctcccccttggtgcaactcctgcctccatcccccttgctggggtcccctcatccacttgagggcgcctgagggccaggagcagcaggcaaggagcctgggtctaggctaagggggtgtgtgcccacctcctccctgacccttaacactcctgtcctgcccagaccaacagagagagctgtccctgagaccccggagagaagcagctgccgaaagctgcagcctttccgcactctgagaccatgatcttcctcctgccaggggagagccacccacaggccatgtccagccccacttccctcagcccccagggcttccttctggcccctctgaggattccctagggctgccccgcagaggggcttccccaagctctgttttgaagcctgcaatgtggaaaagtgagaagtcagagggaacaggacaggtgcagccgggctctgaggccacacctcacacctcgctgttccccaacatcccctgagcagtgtgagctcatctcaccagatgagaagaggccctgtgcatttcttttgtttgtttgttgctgttttcccccacccatccagttctccycagcaaagcaaattccttaacacctttggtggagaatttcttacccagacttggggctgtgatgcccttcagtgcgtggtgagtgcagcgtgtgtgcgtgtgcctgtgtgtgaacctgggggccatcctggtggcctgggagcgtgaggagaggccccctgtgtgctgggtgagtggtgggtgtggggtcaatgcagtgaggctctctgggtgaggctcccaacctggcagtccccagcctcccagcatctgtgagcgtctgttggactttacagaagagcctcatccygtctgcccctcactctgccctggaatcaacatcttccgagtccytcttgggggaaatagcagagcccmacttarctccataaactgcttcccattccgcagcccagttctgattgttgaggtgtcgcgtcgttccaggtcccccagtcccctctttctcctgtcctctctctgtccttcacctccccactccagccccggctcagttcagggaaatgctgttccayatcagccctctgctctctgaggcagccgcgcctctgactcggagctacttgaaacttctgctcttgctaggattggagtctacctatctcttccatttgtcccagctggagttctggaactttcctcctcggggtgggggtgggggttgttaaggatgctggggggcctggggaaggaaggagttcagaggaagggtgtcccctgtcctcttgatgtcaccctccgctcctgggacacgtgctctctctgtctctgggtcttctggctgtgcacgtttgtgtgtccttgtaaatatgttttaggaagaaagcaaaagggactgaactagcctctggtaggattgcaggggtccagccttgcctgtttccgaagcccccacactgcctttcgcccyactgagactggtcccctcaaaaggtagacaaaacagcagctccctgtggagctgaagggcggcctcaaagtggctttttgttagacaaggttaaggtttcctcatgagcaaggttgcagatcggtccttcctcagctccttgatttgtgaccttgaccaaggggcctgccacccagcccctccagtgccctctcctcgatgcctcgctccttcctgcccccactcccctggcttaggcaggtaggggaattagggccatgctggaagaagcttaaccatgtgttcaaagaacggtttcttgcttgcttggtcctggaactccccttggctgccccaggcctccttggcccatgggtgctgggggaggtggatgtcagatctggtaggttgcagcagagaaaataaatgtgccttgagagaccactcagagagggtccaagggtgatggagaaggaagcatggcctgggagcttggaagggaggggtggtgggtggcggcatcttgactgccccctgttgtcccacacgtggggggtggtcaccccccttcactccagcccgcctgccttcagccttccatgagcttcacctgcttccaacttcactttggagggggtggggtccgttggcatcaacacggggaccctctgcttcaccaaagcccgagccctcagcccctggggagaacaaatggctgagctttgatacctggggtcgtcgagaggctgcgggctggcggcagtcccaggggagagacaccacagaaggagacccagacatcccgaggaagttcccagcagagcaaactgctttccagcctgaagcctgcttaaactgtgtgatgtgcaataactgagcttagagttaggaattgtgttcaagtgcttggatttccgtctgtagatttaactgctgaaattgtatctctcagtaattttagatgtcttttaaaaarttgaaaaacaaagtgttagactgtgtgcgtgtgcgttgatgggcactcaagagtcccgtgagtcatccagccctgcctttcccctgcgcccccatcctctcacgtcccgcccygcctccacttggggaccctgcctcgtgtcgtctttatctgcctattactcagcctaaggaaacaagtacactccacacatgcataaaggaaatcaaatgttatttttaagaaaatggaaaataaaaactttataaacacca

SEQ ID NO: 160 - DNA, 5324 bp, Homo sapiens
agttgttatacggcttttgtcttaacgaagccacccattacggtatgatgatgtcaaacgtgatgctgatgctacagttacagcccctgctggcgcagcctctctgattctctctccctctccgcgtccagtgctgggctttttcagacaagtgcatctcctaaccaggtcacatttcagccgcgacccactctccgccagtcaccggaggcagaccgcgggaggagagctgaggacagccgcgtgcgcttcgccagcagcggggtgggaggaaggacattaaaatactgcagaagtcaagacccccccaggtcgaacccagaccacgatgcgcgccccrggctgcgggcggctggtgctgccgctgctgctcctggccgcggcagccctggccgaaggcgacgccaaggggctcaaggagggcgagacccccggcaatttcatggaggacgagcaatggctgtcgtccatctcgcagtacagcggcaagatcaagcactggaaccgcttccgagacgtgagatgactatatcaagagctgggaggacaatcagcaaggagatgaagccctggataccaccaaggacccctgccagaaggtgaagtgcagccgccacaaggtgtgcattgcccagggctaccagcgggccatgtgcatcagtcgcaagaagctggagcacaggatcaagcagccgaccgtgaaactccatggaaacaaagactccatctgcaagccctgccacatggcccagcttgcctctgtctgcggctcagatggccacacttacagctctgtgtgtaagctggagcaacaggcgtgcctgagcagcaagcagctggcggtgcgatgcgagggcccctgcccctgccccacggagcaggctgccacctccaccgccgatggcaaaccagagacttgcaccggtcaggacctggctgacctgggagatcggctgcgggactggttccagctccttcatgagaactccaagcagaatggctcagccagcagtgtagccggcccggccagcgggctggacaagagcctgggggccagctgcaaggactccattggctggatgttctccaagctggacaccagkgctgacctcttcctggaccagacggagctggccgccatcaacctggacaagtacgaggtctgcatccgtcccttcttcaactcctgtgacacctacaaggatggccgggtctctactgctgagtggtgcttctgcttctggagggagaagcccccctgcctggcagagctggagcgcatccagatccaggaggccgccaagaagaagccaggcatcttcatcccgagctgcgacgaggatggctactaccggaagatgcagtgtgaccagagcagcrgtgactgctggtgtgtggaccagctgggcctggagctgactggcacgcgcacgcatgggagccccgactgcgatgacatcgtgggcttctcgggggactttggaagcggtgtcggctgggaggatgaggaggagaaggagacggaggaagcaggcgaggaggccgaggaggaggagggcgaggcaggcgaggctgacgacgggggctacatctggtagacgccctcagragccggctgccgggggggactcaacagcagagctctgagcagcagcaggcaacttcgagaacggatccagaaatgcagtcagaaggaccctgctccacctggggggactgggagtgtgagtgtgcatggcatgtgtgtggcacagatggctgggacgggtgacrgtgtgagtgcatgtgtgcatgcatgtgtgtatgtgtgtgtgtgtgtggcatgcgctgacaaatgtgtccttgatccacactgctcctggcagagtgagtmacccaaaggccccttcggcctccttgtagctgttttctttccttttgttgttggttttaaaatacattcacacacaaatacaaattgacaggtcaaaatccatgaaatgagatcccccagccgtgtcctccagcccagccctgaccccttggtttctaccctggctccccttggtttctaccctggctcaaccgacccctgtctgcccttctccctcytgcttctgaggtcaagctctggcctgcgagcctgtccccattgcaaaggggagggaggggcagggagctgtctaccagctgaggtcctcccaaaactgggccgatgtggtgtgacatccccaccagcctcagatgagacgggccaggacgcccagccacagcaagccctgtccctttgccggatccccaaacactagagaagctctcctaacccaaggcggagaatgaaggtggtggcggcagaggaggagggcagcagctgagaggccagggacagggtgcctcgccaagctgtctgaggtctgtcccaggtggcccaggtggtgcaggtagaacagggtgaggagagggggtcggctcarcaggaggaggctgtggctgcagagcctggrggagcttttaggtgttgagatggggcagctctgaatcctagaccctggaatagcctgtcccttttctctgggtctcgtggtggagccatgatctgggctgctctcttggggwsactgggtggtggttacacagttgacctctgcctggctcccccttggtgcaactcctgcctccatcccccttgctggggtcccctcatccacttgagggcgcctgagggccaggagcagcaggcaaggagcctgggtctaggctaagggggtgtgtgcccacctcctccctgacccttaacactcctgtcctgcccagaccaacagagagagctgtccctgagaccccggagagaagcagctgccgaaagctgcagcctttccgcactctgagaccatgatcttcctcctgccaggggagagccacccacaggccatgtccagccccacttccctcagcccccagggcttccttctggcccctctgaggattccctagggctgccccgcagaggggcttccccaagctctgttttgaagcctgcaatgtggaaaagtgagaagtcagagggaacaggacaggtgcagccgggctctgaggccacacctcacacctcgctgttccccaacatcccctgagcagtgtgagctcatctcaccagatgagaagaggccctgtgcatttcttttgtttgtttgttgctgttttcccccacccatccagttctccycagcaaagcaaattccttaacacctttggtggagaatttcttacccagacttggggctgtgatgcccttcagtgcgtggtgagtgcagcgtgtgtgcgtgtgcctgtgtgtgaacctgggggccatcctggtggcctgggagcgtgaggagaggccccctgtgtgctgggtgagtggtgggtgtggggtcaatgcagtgaggctctctgggtgaggctcccaacctggcagtccccagcctcccagcatctgtgagcgtctgttggactttacagaagagcctcatccygtctgcccctcactctgccctggaatcaacatcttccgagtccytcttgggggaaatagcagagcccmacttarctccataaactgcttcccattccgcagcccagttctgattgttgaggtgtcgcgtcgttccaggtcccccagtcccctctttctcctgtcctctctctgtccttcacctccccactccagccccggctcagttcagggaaatgctgttccayatcagccctctgctctctgaggcagccgcgcctctgactcggagctacttgaaacttctgctcttgctaggattggagtctacctatctcttccatttgtcccagctggagttctggaactttcctcctcggggtgggggtgggggttgttaaggatgctggggggcctggggaaggaaggagttcagaggaagggtgtcccctgtcctcttgatgtcaccctccgctcctgggacacgtgctctctctgtctctgggtcttctggctgtgcacgtttgtgtgtccttgtaaatatgttttaggaagaaagcaaaagggactgaactagcctctggtaggattgcaggggtccagccttgcctgtttccgaagcccccacactgcctttcgcccyactgagactggtcccctcaaaaggtagacaaaacagcagctccctgtggagctgaagggcggcctcaaagtggctttttgttagacaaggttaaggtttcctcatgagcaaggttgcagatcggtccttcctcagctccttgatttgtgaccttgaccaaggggcctgccacccagcccctccagtgccctctcctcgatgcctcgctccttcctgcccccactcccctggcttaggcaggtaggggaattagggccatgctggaagaagcttaaccatgtgttcaaagaacggtttcttgcttgcttggtcctggaactccccttggctgccccaggcctccttggcccatgggtgctgggggaggtggatgtcagatctggtaggttgcagcagagaaaataaatgtgccttgagagaccactcagagagggtccaagggtgatggagaaggaagcatggcctgggagcttggaagggaggggtggtgggtggcggcatcttgactgccccctgttgtcccacacgtggggggtggtcaccccccttcactccagcccgcctgccttcagccttccatgagcttcacctgcttccaacttcactttggagggggtggggtccgttggcatcaacacggggaccctctgcttcaccaaagcccgagccctcagcccctggggagaacaaatggctgagctttgatacctggggtcgtcgagaggctgcgggctggcggcagtcccaggggagagacaccacagaaggagacccagacatcccgaggaagttcccagcagagcaaactgctttccagcctgaagcctgcttaaactgtgtgatgtgcaataactgagcttagagttaggaattgtgttcaagtgcttggatttccgtctgtagatttaactgctgaaattgtatctctcagtaattttagatgtcttttaaaaarttgaaaaacaaagtgttagactgtgtgcgtgtgcgttgatgggcactcaagagtcccgtgagtcatccagccctgcctttcccctgcgcccccatcctctcacgtcccgcccygcctccacttggggaccctgcctcgtgtcgtctttatctgcctattactcagcctaaggaaacaagtacactccacacatgcataaaggaaatcaaatgttatttttaagaaaatggaaaataaaaactttataaacacca

SEQ ID NO: 161 - DNA, 5316 bp, Homo sapiens
cggacgcgtgggaacgaagccacccattacggtatgatgatgtcaaacgtgatgctgatgctacagttacagcccctgctggcgcagcctctctgattctctctccctctccgcgtccagtgctgggctttttcagacaagtgcatctcctaaccaggtcacatttcagccgcgacccactctccgccagtcaccggaggcagaccgcgggaggagagctgaggacagccgcgtgcgcttcgccagcagcggggtgggaggaaggacattaaaatactgcagaagtcaagacccccccggtcgaacccagaccacgatgcgcgccccgrgctgcgggcggctggtgctgccgctgctgctcctggccgcggcagccctggccgaaggcgacgccaaggggctcaaggagggcgagacccccggcaatttcatggaggacgagcaatggctgtcgtccatctcgcagtacagcggcaagatcaagcactggaaccgcttccgagacgaagtggaggatgactatatcaagagctgggaggacaatcagcaaggagatgaagccctggataccaccaaggacccctgccagaaggtgaagtgcagccgccacaaggtgtgcattgcccagggctaccagcgggccatgtgcatcagtcgcaagaagctggagcacaggatcaagcagccgaccgtgaaactccatggaaacaaagactccatctgcaagccctgccacatggcccagcttgcctctgtctgcggctcagatggccacacttacagctctgtgtgtaagctggagcaacaggcgtgcctgagcagcaagcagctggcggtgcgatgcgagggcccctgcccctgccccacggagcaggctgccacctccaccgccgatggcaaaccagagacttgcaccggtcaggacctggctgacctgggagatcggctgcgggactggttccagctccttcatgagaactccaagcagaatggctcagccagcagtgtagccggcccggccagcgggctggacaagagcctgggggccagctgcaaggactccattggctggatgttctccaagctggacaccagkgctgacctcttcctggaccagacggagctggccgccatcaacctggacaagtacgaggtctgcatccgtcccttcttcaactcctgtgacacctacaaggatggccgggtctctactgctgagtggtgcttctgcttctggagggagaagcccccctgcctggcagagctggagcgcatccagatccaggaggccgccaagaagaagccaggcatcttcatcccgagctgcgacgaggatggctactaccggaagatgcagtgtgaccagagcagcrgtgactgctggtgtgtggaccagctgggcctggagctgactggcacgcgcacgcatgggagccccgactgcgatgacatcgtgggcttctcgggggactttggaagcggtgtcggctgggaggatgaggaggagaaggagacggaggaagcaggcgaggaggccgaggaggaggagggcgaggcaggcgaggctgacgacgggggctacatctggtagacgccctcagragccggctgccgggggggactcaacagcagagctctgagcagcagcaggcaacttcgagaacggatccagaaatgcagtcagaaggaccctgctccacctggggggactgggagtgtgagtgtgcatggcatgtgtgtggcacagatggctgggacgggtgacrgtgtgagtgcatgtgtgcatgcatgtgtgtatgtgtgtgtgtgtgtggcatgcgctgacaaatgtgtccttgatccacactgctcctggcagagtgagtmacccaaaggccccttcggcctccttgtagctgttttctttccttttgttgttggttttaaaatacattcacacacaaatacaaattgacaggtcaaaatccatgaaatgagatcccccagccgtgtcctccagcccagccctgaccccttggtttctaccctggctccccttggtttctaccctggctcaaccgacccctgtctgcccttctccctcytgcttctgaggtcaagctctggcctgcgagcctgtccccattgcaaaggggagggaggggcagggagctgtctaccagctgaggtcctcccaaaactgggccgatgtggtgtgacatccccaccagcctcagatgagacgggccaggacgcccagccacagcaagccctgtccctttgccggatccccaaacactagagaagctctcctaacccaaggcggagaatgaaggtggtggcggcagaggaggagggcagcagctgagaggccagggacagggtgcctcgccaagctgtctgaggtctgtcccaggtggcccaggtggtgcaggtagaacagggtgaggagagggggtcggctcarcaggaggaggctgtggctgcagagcctggrggagcttttaggtgttgagatggggcagctctgaatcctagaccctggaatagcctgtcccttttctctgggtctcgtggtggagccatgatctgggctgctctcttggggwsactgggtggtggttacacagttgacctctgcctggctcccccttggtgcaactcctgcctccatcccccttgctggggtcccctcatccacttgagggcgcctgagggccaggagcagcaggcaaggagcctgggtctaggctaagggggtgtgtgcccacctcctccctgacccttaacactcctgtcctgcccagaccaacagagagagctgtccctgagaccccggagagaagcagctgccgaaagctgcagcctttccgcactctgagaccatgatcttcctcctgccaggggagagccacccacaggccatgtccagccccacttccctcagcccccagggcttccttctggcccctctgaggattccctagggctgccccgcagaggggcttccccaagctctgttttgaagcctgcaatgtggaaaagtgagaagtcagagggaacaggacaggtgcagccgggctctgaggccacacctcacacctcgctgttccccaacatcccctgagcagtgtgagctcatctcaccagatgagaagaggccctgtgcatttcttttgtttgtttgttgctgttttcccccacccatccagttctccycagcaaagcaaattccttaacacctttggtggagaatttcttacccagacttggggctgtgatgcccttcagtgcgtggtgagtgcagcgtgtgtgcgtgtgcctgtgtgtgaacctgggggccatcctggtggcctgggagcgtgaggagaggccccctgtgtgctgggtgagtggtgggtgtggggtcaatgcagtgaggctctctgggtgaggctcccaacctggcagtccccagcctcccagcatctgtgagcgtctgttggactttacagaagagcctcatccygtctgcccctcactctgccctggaatcaacatcttccgagtccytcttgggggaaatagcagagcccmacttarctccataaactgcttcccattccgcagcccagttctgattgttgaggtgtcgcgtcgttccaggtcccccagtcccctctttctcctgtcctctctctgtccttcacctccccactccagccccggctcagttcagggaaatgctgttccayatcagccctctgctctctgaggcagccgcgcctctgactcggagctacttgaaacttctgctcttgctaggattggagtctacctatctcttccatttgtcccagctggagttctggaactttcctcctcggggtgggggtgggggttgttaaggatgctggggggcctggggaaggaaggagttcagaggaagggtgtcccctgtcctcttgatgtcaccctccgctcctgggacacgtgctctctctgtctctgggtcttctggctgtgcacgtttgtgtgtccttgtaaatatgttttaggaagaaagcaaaagggactgaactagcctctggtaggattgcaggggtccagccttgcctgtttccgaagcccccacactgcctttcgcccyactgagactggtcccctcaaaaggtagacaaaacagcagctccctgtggagctgaagggcggcctcaaagtggctttttgttagacaaggttaaggtttcctcatgagcaaggttgcagatcggtccttcctcagctccttgatttgtgaccttgaccaaggggcctgccacccagcccctccagtgccctctcctcgatgcctcgctccttcctgcccccactcccctggcttaggcaggtaggggaattagggccatgctggaagaagcttaaccatgtgttcaaagaacggtttcttgcttgcttggtcctggaactccccttggctgccccaggcctccttggcccatgggtgctgggggaggtggatgtcagatctggtaggttgcagcagagaaaataaatgtgccttgagagaccactcagagagggtccaagggtgatggagaaggaagcatggcctgggagcttggaagggaggggtggtgggtggcggcatcttgactgccccctgttgtcccacacgtggggggtggtcaccccccttcactccagcccgcctgccttcagccttccatgagcttcacctgcttccaacttcactttggagggggtggggtccgttggcatcaacacggggaccctctgcttcaccaaagcccgagccctcagcccctggggagaacaaatggctgagctttgatacctggggtcgtcgagaggctgcgggctggcggcagtcccaggggagagacaccacagaaggagacccagacatcccgaggaagttcccagcagagcaaactgctttccagcctgaagcctgcttaaactgtgtgatgtgcaataactgagcttagagttaggaattgtgttcaagtgcttggatttccgtctgtagatttaactgctgaaattgtatctctcagtaattttagatgtcttttaaaaarttgaaaaacaaagtgttagactgtgtgcgtgtgcgttgatgggcactcaagagtcccgtgagtcatccagccctgcctttcccctgcgcccccatcctctcacgtcccgcccygcctccacttggggaccctgcctcgtgtcgtctttatctgcctattactcagcctaaggaaacaagtacactccacacatgcataaaggaaatcaaatgttatttttaagaaaatggaaaataaaaactttataaacacc

SEQ ID NO: 162 - DNA, 3821 bp, Homo sapiens
atggctaaggcccaaacacagaatagcagcattgacccagtagtctcgaaattagtcacagaggccaagctagtgaagacccagcagccctattgttatcaagaaagagcactatccaaaagtgccgccaagctcctggacaagaacccattctcggtcagtaacccgaaccctctgcttccttcacctgccagtctccagctggctcaactgcaggcccagctcaccctccaccggctgaagctggcacagacagctgtcaccaacaacactgcagccgccacagtcctgaaccaagtcctctccaaagtggccatgtcccagcctctcttcaatcaactgaggcatccgtctgtgatcactggcccccacggccatgctggggttccccaacatgctgcagccatacccagtacccggtttccctctaatgcaattgccttttcaccccccagccagacacgaggccccggaccctccatgaaccttcccaaccagccacccagtgccatggtgatgcatcctttcactggggtaatgcctcagacccctggccagccagcagtcatcttgggcattggcaagactgggcctgctccagctacagcaggattctatgagtatgrcaaagccagctctggccagacatatggccctgaaacagatggtcagcctggcttcctgccatcctcggcctcaacctcgggcagtgtgacctatgaagggcactacagccacacagggcaggatggtcaagctgccttttccaaagatttttacggacccaactcccaaggttcacatgtggccagcggatttccagctgagcaggctgggggcctgaaaagtgaggtcgggccactgctgcagggcacaaacagccaatgggagagcccccatggattctcgggccaaagcaagcctgatctcacagcaggtcccatgtggcctccaccccacaaccagccctatgagctgtacgaccccgaggaaccaacctcagacaggacacctccttccttcgggggtcggcttaacaacagcaaacagggttttatcggtgctgggcggagggccaaggaggaccaggcgttgctatctgtgcggcccctgcaggctcatgagctgaacgactttcacggtgtggcccccctccacttgccgcatatctgtagcatctgtgacaagaaggtgtttgatttgaaggactgggagcygcatgtgaaagggaagctgcacgctcagaaatgcctggtcttctctgaaaatgctggcatccggtgtatacttggttcggcagagggaacattgtgtgcttctcccaacagcacagctgtttataaccctgctgggaatgaagcaagggccaccttgtgctttttcaaagagagcaaagaggaggagacaggagacctggtttccagggatgttgaagctgctaaacaggtgaatcgtccaagatccgtaggcaatcctatggatttaccagtaaaatttgcacagcggaaaggggctggccgtgtggtgcacatctgcaatctccctgaaggaagctgcactgagaatgacgtcattaacctggggctgccctttggaaaggtcactaattacatcctcatgaagtcgactaatcaggcctttttagagatggcttacacagaagctgcacaggccatggtccagtattatcaagaaaaatctgctgtgatcaatggtgagaagttgctcattcggatgtccaagagatacaaggaattgcagctcaagaaacccgggaaggccgtggctgccatcatccaggacatccattcccagagggagagggacatgttccgggaagcagacagccctccgggcccctcccgggctgactggggcaatggccgggactcctgggagcactctccctatgccaggagggaggaagagcgagacccggctccctggagggacaacggagatgacaagagggacaggatggacccctgggcacatgatcgcaaacaccacccccggcaactggacaaggctgagttggacgagcgaccagaaggagggaggccccaccgggagaagtacccgagatctgggtctcccaacctgccccactctgtgtccagctacaaaagccgtgaagacggctactaccggaaagagcccaaagccaagtsggacaagtatctgaagcagcagcaggatgcccccgggaggtccaggaggaaagacgaggccaggctgcgggaaagcagacacccccatccggatgactcaggcaaggaagatgggctggggccaaaggtcactagggcccctgagggcgccaaggccaagcagaatgagaaaaataaaaccaagagaactgatagagaccaagaaggagctgatgatagaaaagaaaacacaatggcagagaatgaggctggaaaagaggaacaggagggcatggaagaaagccctcaatcagtgggcagacaggagaaagaagcagagttctctgatccggaaaacacaaggacaaagaaggaacaagattgggagagtgaaagtgaggcagagggggagagctggtatcccactaacatggaggagctggtgacagtggacgaggttggggaagaagaagattttatcgtggaaccagacatcccagagctggaagaaattgtgcccattgaccagaaagacaaaatttgcccagaaacatgtctgtgtgtgacaaccaccttagacttagacctggcccaggatttccccaaggaaggagtcaaggccgtagggaatggggctgcagaaatcagcctcaagtcacccagagaactgccctctgcttccacaagctgtcccagtgacatggacgtggaaatgcctggcctaaatctggatgctgagcggaagccagctgaaagtgagacaggcctctccctggaggattcagattgctacgagaaggaggcaaagggagtggagagctcagatgttcatccagcccctacagtccagcaaatgtcttcccctaagccagcagaggagagggcccggcagccaagcccatttgtggatgattgcaagaccagggggacccccgaagatggggcttgtgaaggcagccccctggaggagaaagccagcccccccatcgaaactgacctccaaaaccaagcttgccaagaagtgttgaccccggaaaactccaggtacgtggaaatgaaatctctggaggtgaggtcaccagagtacactgaagtggaactgaaacagcccctttctttgccctcttgggaaccagaggatgtgttcagtgaacttagcattcctctagaacataattctaaaataaacaaacaaaaaygagagaattcttcgagagtcccggtcacagcagctgcagagagaggggtggagttcgtggttcccaggactggcttttattgcaagctgtgtgggctgttctacacgagcgaggagacagcaaagatgagccactgccgcagcgctgtccactacaggaacttacagaaatatttgtcccagctggccgaggagggcctcaaggagaccgagggggcagatagcccgaggccagaggacagcggaatcctccacatttccccagttatgaggcttcttcatctgggggaggccactcatcagcatgttgtccagccttttgtggctagtttttacttcaggtgtggggataggwgtcttttgagattttctttgctttcacactgatgtggttttactgcactagctccattttacggatggggacatggatgccaataagacaagatgactcagtcaaggccacatggcaa

SEQ ID NO: 163 - DNA, 693 bp, Homo sapiens
cttgattcctggactcatgaatcctggacatggaagaaacagcaccataaattggatgctgattcagagcatatacagccttctgcagaactttgccccagccctgaaatatgttgccaactagctagtgctgtaactgaagctccaaaaggccattccactgtactatcaaaccagctgcttcaggatggtgaagaacatggtcaagtaaaaattgagtgggcttcctatctatttcacttcgagaaacaccaggattaactagccaacaccataggtctgcatgagtcagattattctgattgctgcattgaatctgctgtccggacgggacacagaaggaattgaataaagtcatggaaaatgaaactcaggttggtcttctcactggcttcttaaaggaatgagcacattgtgatcctgctctgtatcgtggagaaagacccaaggwaagatgatgagaagttctgcttttggaatagcggcatcaacagctacrtggacctgcttctgggaaaaacaagtgtaactgccatcttttcatcacaatgggacagcctgtctgagaatgaggccartgcaaagaagaaagtggagcccacgtacagagagatgatacattgatgatatcatgtgtcctagattcatgcttcatatgaaggagtcccattataccgatactgaaacactgaa

SEQ ID NO: 164 - DNA, 3196 bp, Homo sapiens
gacctggactgctctatctgtcttcacatggattgtggctcataacaatagctaaatgtggaattctgtgtatccgagacgtttatactttggaaacatttgcttggtgtcggagtcattctcaccagggtcatgggattcagtcaatgagaatttcaatggatggacaaaacattctggtgaatgggagagatgatggcacccttgtctacctaaagtggaagcgattyggaggacacctagccagtgaaattctggactattaccagaaactattaatttccctgagcagcgccatggacaaggagaatcattatttaagcacaacaccaaaagtttccgtagatttgggatccgattctgaacacacaaaacagaaggcaagcactgacttatcacaagatgaattagttctaaccgatgttaagaaggaaattccttggatacaacaaaaaagccaagaggccatcaaaaaggaggttaatctgttttccaagaaaaggaaagagataaaacaaggaatcaaatcactttccaaaactattctgaatatgatggaagaaaatgacaaactagaaaatattgcaaaattagaccaacaggaatttggtctggatcttgaggaactagaaaggcttcatgatgaaagtcaggaagaagtggcaaagatgataaaggatgtagagatgcataacttagccaagagctatttggctgaacttatcaaagaagaatgttggaattcgatggctgtgaaaggtcgagctcttaagtgttttcatatcccctgtgtggttgaaaacttcccratgaaagcgcgcacggttgaagagctgaaagaattggaaagagttttacagcaaaagaagattgaagcagagtgtcttaaactacggaaggaaattgtagaggctcagtctggagttaagttgattaaacagcgtcatgaagaggatgatgaagaagaggaagaggaagacaagacagtaaaatatagcaatttgcccaattacctgcttggtagtctgagtactgattttggggtagatacctctttattgtcaagccaattggagcttcattccagagaagagaaaatcaaccaaattatattattgaaagatatcatttacaaggtaaaaactgttttcaataatgagkttgacgctgcatataaacaaaaagagtttgaaattgcacgcgtgaaggaaagaaatgttcgaattcgagaaattattttagatctggaattggaagaagcagtctggcaaccagaatttgaagactgtgagaagccagagagaacgcttgttgtgcaagatgaggagattacagcccacaaacacattaagccgtggcacaaagccaaagaattgatcgtgaatcatgaaaaggagcactggcttctgatacaggatgccagtacaagactccgagctctgatggacatgatgggaggagttctggaagtcaagaaggaagatattttgagaatggtgattcctcaacctgctttcatggcaaaacctgatgctgtgtggactgaagaagaaagaaaacaattcaaagattatgagaaaaaagtaaaggagttaaatgaagaaagagataagtatagaaagtcattagaagcagaactgaagaaacttcaaaactctattcaagaaagcacacaggcctttgatgaacatttgaaaagactttttgaaaggagagtgaaggcagagatggttaccaaccaggaggaactgaaaataagtaaccttgcattttctttattgttggatgaagaattaagctctagagaaaaattcctgaacaactaccttacaaggaaacagcacgagaaagttatggatcgcagctttaaaaaggaattttctgaaattcctggtcatcaagtggatatactctacaaactttttaaacgccgaccaaggatttccaaacagaaaacgcactcagaaacaaccagcgttgtccctttcggagaactaccaggatctggcaagttgaataaggatgcctttgcccagttaatgaaagctatggatgagttggacaatattagtaacrtgccagaaggcttggaccctttggtctggaatcatttctgcatgacaagacgagcaaaagtggaaaatgaacagaaagtaaagcagaaagcagctgacttattggaaatggcaactttcctccagaagagagttgaggaggaagagaaggtgcaacaggagattgagagagtgttccatgaactcatcctattacaggaagagaaagtgagattccagttgaatttgacaatccaaattcttcttaaacaaggacaagtagaactggaaaatttccagctagtactggagtattctgatgcaattctcatcaacaagaacataattgaagacttgaattctgtgattcggactcaaggacaaaagaaagttgctagcatgatggaaagtaaagatgtacacaaaagaatacttcagattgagtgggaacataagaaaatggagatggaaagggaagatctaaatcagaaggcttgggatattcagatgctatttttttcaagagatcgtcaaaagtacctaaatgaaccaaactatgaggctctgattagtattcagattggaataatggaacaaaccattgctgttttagataagatgcacaaaaagaatgtggaaaactgcaagaaactactcaaaaaacttggaaagttcagcaatcaaaaagatatagcaaattatgccctaagctgcaatctacgagaagagttggtagctgtctcagagagaaaagacatctgtaatgcaatggggtctaaactgacttgtgaaaagattgtcaaagaacggtatgaaaacatgatgcaacagcagaagttaacaaatatttcaaaacaacaagctgaacagatttcaatactacagactgaagttgaaagattaagaatgaaaacatttcctgctcttgttcaaatgtaaaaacgctggcaggaaaacacaaggccaaatcaatcatttaaaaaatcatttcatttgggtaaaatgatttccttttctttcttactgggaaattgaagtagcatgtcctctgagttgcatgttttagataaaaaattgtttaattttagccttaattgtatacaaatttttgtcctgcatgaataaatgtgtaaaataccatg

SEQ ID NO: 165 - DNA, 1608 bp, Homo sapiens
acagggacgcgggctgccatcttgctctaagygaaagtgaaagaaaagtcggcagcagagggaacagggaagaaacctaaaggctgcaggctgccagagccccacccagcagaggggcagtggcgggcagtggacgtggtcctagactgyttcctggygaaggacggtgcgcaccgtggagctctcgccagcagtgaggacagggcaagggcctcccttgtgctgaagcaggtgccagtgctggacgatggctccctggaggacttcaccgatttccaagggggcacactggcccaagatgacccacctattatctttgaggcctcagtggacctggtccagattccccaggccgaggccttgctccatgctgactgcagtgggaaggaggtgacctgtgagatctcccgctactttctccagatgacagagaccactgttaagacagcagcttggttcatggccaacrtgcaggtctctggagggggacctagcatctccttggtgatgaagactcccagggtcrccaagaatgaggygctctggcacccracgctgaacttgccactgagcccccaggggactgtgcgaactgcagtggagttccaggtgatgacacagacccaatccctgagcttcctgctggggtcctcagcctccttggactgtggcttctccatggcaccgggcttggacctcatcagtgtggagtggcgactgcagcacaagggcaggggtcagttggtgtacagctggaccgcagggcaggggcaggctgtgcggaagggcgctaccctggagcctgcacaactgggcatggccagggatgcctccctcaccctgcccggcctcactatacaggacgaggggacctacatttgccagatcaccacctctctgtaccgagctcagcagatcatccagctcaacatccaagcttcccctaaagtacgactgagcttggcaaacgaagctctgctgcccaccctcatctgcgacattgctggctattaccctctggatgtggtggtgaygtggacccgagaggagctgggtggatccccagcccaagtctctggtgcctccttctccagcctcaggcaaagcgtggcaggcacctacagcatctcctcctctctcaccgcagaacctggctctgcaggtgccacttacacctgccaggtcacacacatctctctggaggagccccttggggccagcacccaggttgtcccaccagagcggagaacagccttgggagtcatctttgccagcagtctcttccttcttgcactgatgttcctggggcttcagagacggcaagcacctacaggacttgggctgcttcaggctgaacgctgggagaccacttcctgtgctgacacacagagctcccatctccatgaagaccgcacrgcgcgtgtaagccagcccagctgacctaaagcgacatgagactactagaaagaaaygacacccttccccaagcccccacagctactccaacccaaacaacaaccaagccagtttaatggtaggaatttgtattttttgcctttgttcagaatacatgacattggtaaatatgcmacatgcctttggtggaag

SEQ ID NO: 166 - DNA, 1756 bp, Homo sapiens
tgccatcttgctctaagygaaagtgaaagaaaagtcggcagcagagggaacagggaagaaacctaaaggctgcaggctgccaggtgtgcttggagagcccccttcttccgccgggcctcgcaagcagcgtaggactgtggagaagggcggtgggcaaggagggaactcgagagcagcctccatgggcacacaggagggctggtgcctgctgctctgcctggctctatctggagcagcagaaaccaagccccacccagcagaggggcagtggcgggcagtggacgtggtcctagactgyttcctggygaaggacggtgcgcaccgtggagctctcgccagcagtgaggacagggcaagggcctcccttgtgctgaagcaggtgccagtgctggacgatggctccctggaggacttcaccgatttccaagggggcacactggcccaagatgacccacctattatctttgaggcctcagtggacctggtccagattccccaggccgaggccttgctccatgctgactgcagtgggaaggaggtgacctgtgagatctcccgctactttctccagatgacagagaccactgttaagacagcagcttggttcatggccaacrtgcaggtctctggagggggacctagcatctccttggtgatgaagactcccagggtcrccaagaatgaggygctctggcacccracgctgaacttgccactgagcccccaggggactgtgcgaactgcagtggagttccaggtgatgacacagacccaatccctgagcttcctgctggggtcctcagcctccttggactgtggcttctccatggcaccgggcttggacctcatcagtgtggagtggcgactgcagcacaagggcaggggtcagttggtgtacagctggaccgcagggcaggggcaggctgtgcggaagggcgctaccctggagcctgcacaactgggcatggccagggatgcctccctcaccctgcccggcctcactatacaggacgaggggacctacatttgccagatcaccacctctctgtaccgagctcagcagatcatccagctcaacatccaagcttcccctaaagtacgactgagcttggcaaacgaagctctgctgcccaccctcatctgcgacattgctggctattaccctctggatgtggtggtgaygtggacccgagaggagctgggtggatccccagcccaagtctctggtgcctccttctccagcctcaggcaaagcgtggcaggcacctacagcatctcctcctctctcaccgcagaacctggctctgcaggtgccacttacacctgccaggtcacacacatctctctggaggagccccttggggccagcacccaggttgtcccaccagagcggagaacagccttgggagtcatctttgccagcagtctcttccttcttgcactgatgttcctggggcttcagagacggcaagcacctacaggacttgggctgcttcaggctgaacgctgggagaccacttcctgtgctgacacacagagctcccatctccatgaagaccgcacrgcgcgtgtaagccagcccagctgacctaaagcgacatgagactactagaaagaaaygacacccttccccaagcccccacagctactccaacccaaacaacaaccaagccagtttaatggtaggaatttgtattttttgcctttgttcagaatacatgacattggtaaatatgcmacatgcctttggtggaag

SEQ ID NO: 167 - DNA, 1400 bp, Homo sapiens
tgccatcttgctctaagygaaagtgaaagaaaagtcggcagcagagggaacagggaagaaacctaaaggctgcaggctgccaggtgtgcttggagagcccccttcttccgccgggcctcgcaagcagcgtaggactgtggagaagggcggtgggcaaggagggaactcgagagcagcctccatgggcacacaggagggctggtgcctgctgctctgcctggctctatctggagcagcagaaaccatggacctggtccagattccccaggccgaggccttgctccatgctgactgcagtgggaaggaggtgacctgtgagatctcccgctactttctccagatgacagagaccactgttaagacagcagcttggttcatggccaacrtgcaggtctctggagggggacctagcatctccttggtgatgaagactcccagggtcrccaagaatgaggygctctggcacccracgctgaacttgccactgagcccccaggggactgtgcgaactgcagtggagttccaggtgatgacacagacccaatccctgagcttcctgctggggtcctcagcctccttggactgtggcttctccatggcaccgggcttggacctcatcagtgtggagtggcgactgcagcacaagggcaggggacgaggggacctacatttgccagatcaccacctctctgtaccgagctcagcagatcatccagctcaacatccaagcttcccctaaagtacgactgagcttggcaaacgaagctctgctgcccaccctcatctgcgacattgctggctattaccctctggatgtggtggtgaygtggacccgagaggagctgggtggatccccagcccaagtctctggtgcctccttctccagcctcaggcaaagcgtggcaggcacctacagcatctcctcctctctcaccgcagaacctggctctgcaggtgccacttacacctgccaggtcacacacatctctctggaggagccccttggggccagcacccaggttgtcccaccagagcggagaacagccttgggagtcatctttgccagcagtctcttccttcttgcactgatgttcctggggcttcagagacggcaagcacctacaggacttgggctgcttcaggctgaacgctgggagaccacttcctgtgctgacacacagagctcccatctccatgaagaccgcacrgcgcgtgtaagccagcccagctgacctaaagcgacatgagactactagaaagaaaygacacccttccccaagcccccacagctactccaacccaaacaacaaccaagccagtttaatggtaggaatttgtattttttgcctttgttcagaatacatgacattggtaaatatgcmacatgcctttggtggaag

SEQ ID NO: 168 - DNA, 1739 bp, Homo sapiens
gtgaaagtgaaagaaaagtcggcagcagagggaacagggaagaaacctaaaggctgcaggctgccaggtgtgcttggagagcccccttcttccgccgggcctcgcaagcagcgtaggactgtggagaagggcggtgggcaaggagggaactcgagagcagcctccatgggcacacaggagggctggtgcctgctgctctgcctggctctatctggagcagcagaaaccaagccccacccagcagaggggcagtggcgggcagtggacgtggtcctagactgyttcctggygaaggacggtgcgcaccgtggagctctcgccagcagtgaggacagggcaagggcctcccttgtgctgaagcaggtgccagtgctggacgatggctccctggaggacttcaccgatttccaagggggcacactggcccaagatgacccacctattatctttgaggcctcagtggacctggtccagattccccaggccgaggccttgctccatgctgactgcagtgggaaggaggtgacctgtgagatctcccgctactttctccagatgacagagaccactgttaagacagcagcttggttcatggccaacrtgcaggtctctggagggggacctagcatctccttggtgatgaagactcccagggtcrccaagaatgaggygctctggcacccracgctgaacttgccactgagcccccaggggactgtgcgaactgcagtggagttccaggtgatgacacagacccaatccctgagcttcctgctggggtcctcagcctccttggactgtggcttctccatggcaccgggcttggacctcatcagtgtggagtggcgactgcagcacaagggcaggggtcagttggtgtacagctggaccgcagggcaggggcaggctgtgcggaagggcgctaccctggagcctgcacaactgggcatggccagggatgcctccctcaccctgcccggcctcactatacaggacgaggggacctacatttgccagatcaccacctctctgtaccgagctcagcagatcatccagctcaacatccaagcttcccctaaagtacgactgagcttggcaaacgaagctctgctgcccaccctcatctgcgacattgctggctattaccctctggatgtggtggtgaygtggacccgagaggagctgggtggatccccagcccaagtctctggtgcctccttctccagcctcaggcaaagcgtggcaggcacctacagcatctcctcctctctcaccgcagaacctggctctgcaggtgccacttacacctgccaggtcacacacatctctctggaggagccccttggggccagcacccaggttgtcccaccagagcggagaacagccttgggagtcatctttgccagcagtctcttccttcttgcactgatgttcctggggcttcagagacggcaagcacctacaggacttgggctgcttcaggctgaacgctgggagaccacttcctgtgctgacacacagagctcccatctccatgaagaccgcacrgcgcgtgtaagccagcccagctgacctaaagcgacatgagactactagaaagaaaygacacccttccccaagcccccacagctactccaacccaaacaacaaccaagccagtttaatggtaggaatttgtattttttgcctttgttcagaatacatgacattggtaaataaaaaaaaaaaaaaaaaaaaaa

SEQ ID NO: 169 - DNA, 2384 bp, Homo sapiens
cccagcccagcccagagcaggcagcggaagccagcttggggcagcgcagagcaacacggagcacaggtctctgctgctgatgaagctgtgaccaaacgcacccaacccttggcagccatctgtccctgcagccatagcccacattcccatgacctccctctgcttgttttgggaccatgtctgtacagcctctaggccccagccccggaggtgaatgccatgccatgattctggtgtgctccatggcatccccagcctagctcccaatcccactttggcacgatgttagccaacagctcctcaaccaacagttctgttctcccgtgtcctgactaccgacctacccaccgcctgcacttggtggtctacagcttggtgctggctgccgggctccccctcaacgcgctagccctctgggtcttcctgcgcgcgctgcgcgtgcactcggtggtgagcgtgtacatgtgtaacctggcggccagcgacctgctcttcaccctctcgctgcccgttcgtctctcctactacgcactgcaccactggcccttccccgacctcctgtgccagacgacgggcgccatcttccagatgaacatgtacggcagctgcatcttcctgatgctcatcaacgtggaccgctacgccgccatcgtgcacccgctgcgactgcgccacctgcggcggccccgcgtggcgcggctgctctgcctgggcgtgtgggcgctcatcctggtgtttgcygtgcccgccgcccgcgtgcacaggccctcgcgttgccgctaccgggacctcgaggtgcgcctatgcttcgagagcttcagcgacgagctgtggaaaggcaggctgctgcccctcgtgctgctggccgaggcgctgggcttcctgctgcccctggcggcggtggtctactcgtcgggccgagtcttctggacgctggcgcgccccgacgccacgcagagccagcggcggcggaagaccgtgcgcctcctgctggctaacctcgtcatcttcctgctgtgcttcgtgccctacaacagcacgctggcggtctacgggctgctgcggagcaagctggtggcggccagcgtgcctgcccgcgatcgcgtgcgcggggtgctgatggtgatggtgctgctggccggcgccaactgcgtgctggacccgctggtgtactactttagcgccgagggcttccgcaacaccctgcgcggcctgggcactccgcaccgggccaggacctcggccaccaacgggacgcgggcggcgctcgcgcaatccgaaaggtccgccgtcaccaccgacgccaccaggccggatgccgccagtcaggggctgctccgaccctccgactcccactctctgtcttccttcacacagtgtccccaggattccgccctctgaacacacatgccattgcgctgtccgtgcccgactcccaacgcctctcgttctgggaggcttacagggtgtacacacaagaaggtgggctgggcacttggacctttgggtggcaattccagcttagcaacgcagaagagtacaaagtgtggaagccagggcccagggaaggcagtgctgctggaaatggcttctttaaactgtgagcacgcagagcaccccttctccagcggtgggaagtgatgcagagagcccacccgtgcagagggcagaagaggacgaaatgcctttgggtgggcagggcattaaactgctaaaagctggttagatggaacagaaaatgggcattctggatctaaaccgccacaggggcctgagagctgaagagcaccaggtttggtggacaaagctactgagatgcctgttcatctgctgacttctgtctaggctcatggatgccaccccctttcatttcggcctaggcttcccctgctcaccactgaggcctaatacaagagttcctatggacagaactacattctttctcgcatagtgacttgtgacaatttagacttggcatccagcatgggatagttggggcaaggcaaaactaacttagagtttccccctcaacaacatccaagtccaaaccctttttaggttatcctttcttccatcacatccccttttccaggcctcctccattttaggtccttaatattctttctttttctctctctctcgtttytctcttctctctcctctcctctctcttctcctcttctctctctctccctctctctcctttgtccagagtaaggataaaattctttctactaaagcactggttctcaaactttttggtctcagaccccactcttagaaattgaggatctcaaagagctttgcttatattttgttcttttgatacttaccatactagaaattaaagcgaatacatttttaaaataaatacacatgcacac

SEQ ID NO: 170 - DNA, 2365 bp, Homo sapiens
gcccagctcagagggcaaatgggacagatcccagaggccctgaggaggtctctgctgctgatgaagctgtgaccaaacgcacccaacccttggcagccatctgtccctgcagccatagcccacattcccatgacctccctctgcttgttttgggaccatgtctgtacagcctctaggccccagccccggaggtgaatgccatgccatgattctggtgtgctccatggcatccccagcctagctcccaatcccactttggcacgatgttagccaacagctcctcaaccaacagttctgttctcccgtgtcctgactaccgacctacccaccgcctgcacttggtggtctacagcttggtgctggctgccgggctccccctcaacgcgctagccctctgggtcttcctgcgcgcgctgcgcgtgcactcggtggtgagcgtgtacatgtgtaacctggcggccagcgacctgctcttcaccctctcgctgcccgttcgtctctcctactacgcactgcaccactggcccttccccgacctcctgtgccagacgacgggcgccatcttccagatgaacatgtacggcagctgcatcttcctgatgctcatcaacgtggaccgctacgccgccatcgtgcacccgctgcgactgcgccacctgcggcggccccgcgtggcgcggctgctctgcctgggcgtgtgggcgctcatcctggtgtttgcygtgcccgccgcccgcgtgcacaggccctcgcgttgccgctaccgggacctcgaggtgcgcctatgcttcgagagcttcagcgacgagctgtggaaaggcaggctgctgcccctcgtgctgctggccgaggcgctgggcttcctgctgcccctggcggcggtggtctactcgtcgggccgagtcttctggacgctggcgcgccccgacgccacgcagagccagcggcggcggaagaccgtgcgcctcctgctggctaacctcgtcatcttcctgctgtgcttcgtgccctacaacagcacgctggcggtctacgggctgctgcggagcaagctggtggcggccagcgtgcctgcccgcgatcgcgtgcgcggggtgctgatggtgatggtgctgctggccggcgccaactgcgtgctggacccgctggtgtactactttagcgccgagggcttccgcaacaccctgcgcggcctgggcactccgcaccgggccaggacctcggccaccaacgggacgcgggcggcgctcgcgcaatccgaaaggtccgccgtcaccaccgacgccaccaggccggatgccgccagtcaggggctgctccgaccctccgactcccactctctgtcttccttcacacagtgtccccaggattccgccctctgaacacacatgccattgcgctgtccgtgcccgactcccaacgcctctcgttctgggaggcttacagggtgtacacacaagaaggtgggctgggcacttggacctttgggtggcaattccagcttagcaacgcagaagagtacaaagtgtggaagccagggcccagggaaggcagtgctgctggaaatggcttctttaaactgtgagcacgcagagcaccccttctccagcggtgggaagtgatgcagagagcccacccgtgcagagggcagaagaggacgaaatgcctttgggtgggcagggcattaaactgctaaaagctggttagatggaacagaaaatgggcattctggatctaaaccgccacaggggcctgagagctgaagagcaccaggtttggtggacaaagctactgagatgcctgttcatctgctgacttctgtctaggctcatggatgccaccccctttcatttcggcctaggcttcccctgctcaccactgaggcctaatacaagagttcctatggacagaactacattctttctcgcatagtgacttgtgacaatttagacttggcatccagcatgggatagttggggcaaggcaaaactaacttagagtttccccctcaacaacatccaagtccaaaccctttttaggttatcctttcttccatcacatccccttttccaggcctcctccattttaggtccttaatattctttctttttctctctctctcgtttytctcttctctctcctctcctctctcttctcctcttctctctctctccctctctctcctttgtccagagtaaggataaaattctttctactaaagcactggttctcaaactttttggtctcagaccccactcttagaaattgaggatctcaaagagctttgcttatattttgttcttttgatacttaccatactagaaattaaagcgaatacatttttaaaataaatacacatgcacac

SEQ ID NO: 171 - DNA, 2038 bp, Homo sapiens
ctactccagcctccgccgcctcagcttcccgagcgagccctgcggccgccggagcagctcccgcggcggagcaggagccggatggtcagaggagcccggcagccccagcagccgcggagtcgcctggcccccagactgactggcacagtggagaaaccgcctcgaaaacggagaagcaggactgaatttrctcttaaagaaatcatgtcctctggaggtgctgaagatgatatcccacagggagagaggaaaacagttacagatttttgttatcttctggataaatctaagcaactgttcaatgggttaagagatttgccacaatatggacagaagcagtggcagtcctattttggaagaacttttgatgtttacaccaaactctggaagttccagcagcagcatcgacaagtcttggataatcggtatggcttgaagcgctggcaaataggagaaattgcttccaagattgggcagctatactatcattattacttacgcacatcggaaaccagctatctgaatgaggctttttccttctattctgcaatcagacagagatcatattattctcaagtcaataaagaggacagacctgaattggtagttaagaagttacgatattatgcaagatttatagtagtttgtcttcttctcaacaaaatggatgttgtaaaggatctggtaaaggaattgtcagatgaaattgaagattatactcaccgatttaatactgaagatcaagtggaatggaacttggtgcttcaagaagtagcagctttcattgaggcggatcctgtaatggtattaaatgatgataataccattgttatcacatcgaatcgccttgctgaaacaggagccccattgctggaacagggcatgattgtgggacagttgtctctggctgacgcactcattattggtaattgtaataatcaggttaagttcagtgaactaactgttgacatgttccggatgttacaagctctggaaagggagccaatgaatttagcttcccagatgaataaaccaggaatgcaggaatcagctgacaagcctactagacgagaaaacccccacaagtatctgctctacaaaccaaccttcagccagctatataccttcttagcagcgtcttttaaggagctgcctgccaatagygtgcttctgatttacctgtcggccactggcgttttccccacaggtcgttctgatagtgaaggtccttatgattttggaggtgtacttactaatagtaaccgggatattattaatggagatgccatccacaaacgaaatcagtcccacaaggaaatgcactgccttcatcccggggatctctatcctttcaccaggaagccactgttcatcattgtggattcgtctaatagtgttgcgtataagaatttcacaaacttgtttggacagccactagtctgcttgctttctcctacagcatatccaaaagctttacaagatcaatctcagcgaggtagcctcttcactctctttttgaacaatcctctaatggccttcctatttgtctctggattgtcaagcatgcgcagaggcctatgggaaaagtgtcaagaatatcttcgaaaaatcaaccgtgatattgcccagctactgactcattcacgttcaatagatcaggcatttctccagttttttggagatgaatttcttcgcttgctcctcacaagatttatcttttgttcagccaccatgaggatgcacaagatttttcgggaaacacgaaattatccagaatcatatccacaactgccaagggatgaaacagtggagaatcctcatctccagaagcacattttggaattagcatccattctggatgttcgaaacgtgttctttgagaataccattgatgactattaaaacaaaaaccctgttgtcgaaacaagttttcattttccacaaattttaaatggtgcagttttctaacgtgataagacacatagtggtgttacttagtttttattttttaatttagggccaccattttaaaaacaaa

SEQ ID NO: 172 - DNA, 2107 bp, Homo sapiens
ctactccagcctccgccgcctcagcttcccgagcgagccctgcggccgccggagcagctcccgcggcggagcaggagccggatggtcagaggagcccggcagccccagcagccgcggagtcgcctggcccccagactgactggcacagtggagaaaccgcctcgaaaacggagaagcagtatcagaggttctggtgatagcagtcattcacaatctcaaggggaaagatatcaacatttcactgaaaagactgaatttrctcttaaagaaatcatgtcctctggaggtgctgaagatgatatcccacagggagagaggaaaacagttacagatttttgttatcttctggataaatctaagcaactgttcaatgggttaagagatttgccacaatatggacagaagcagtggcagtcctattttggaagaacttttgatgtttacaccaaactctggaagttccagcagcagcatcgacaagtcttggataatcggtatggcttgaagcgctggcaaataggagaaattgcttccaagattgggcagctatactatcattattacttacgcacatcggaaaccagctatctgaatgaggctttttccttctattctgcaatcagacagagatcatattattctcaagtcaataaagaggacagacctgaattggtagttaagaagttacgatattatgcaagatttatagtagtttgtcttcttctcaacaaaatggatgttgtaaaggatctggtaaaggaattgtcagatgaaattgaagattatactcaccgatttaatactgaagatcaagtggaatggaacttggtgcttcaagaagtagcagctttcattgaggcggatcctgtaatggtattaaatgatgataataccattgttatcacatcgaatcgccttgctgaaacaggagccccattgctggaacagggcatgattgtgggacagttgtctctggctgacgcactcattattggtaattgtaataatcaggttaagttcagtgaactaactgttgacatgttccggatgttacaagctctggaaagggagccaatgaatttagcttcccagatgaataaaccaggaatgcaggaatcagctgacaagcctactagacgagaaaacccccacaagtatctgctctacaaaccaaccttcagccagctatataccttcttagcagcgtcttttaaggagctgcctgccaatagygtgcttctgatttacctgtcggccactggcgttttccccacaggtcgttctgatagtgaaggtccttatgattttggaggtgtacttactaatagtaaccgggatattattaatggagatgccatccacaaacgaaatcagtcccacaaggaaatgcactgccttcatcccggggatctctatcctttcaccaggaagccactgttcatcattgtggattcgtctaatagtgttgcgtataagaatttcacaaacttgtttggacagccactagtctgcttgctttctcctacagcatatccaaaagctttacaagatcaatctcagcgaggtagcctcttcactctctttttgaacaatcctctaatggccttcctatttgtctctggattgtcaagcatgcgcagaggcctatgggaaaagtgtcaagaatatcttcgaaaaatcaaccgtgatattgcccagctactgactcattcacgttcaatagatcaggcatttctccagttttttggagatgaatttcttcgcttgctcctcacaagatttatcttttgttcagccaccatgaggatgcacaagatttttcgggaaacacgaaattatccagaatcatatccacaactgccaagggatgaaacagtggagaatcctcatctccagaagcacattttggaattagcatccattctggatgttcgaaacgtgttctttgagaataccattgatgactattaaaacaaaaaccctgttgtcgaaacaagttttcattttccacaaattttaaatggtgcagttttctaacgtgataagacacatagtggtgttacttagtttttattttttaatttagggccaccattttaaaaacaaa

SEQ ID NO: 173 - DNA, 2187 bp, Homo sapiens
catcagcccagcctgcaaggaggcgccaccggacctgcacactcaggagcagactcagctagattggaagagaggatgggaagacaatggatgacctacctgtggagagaaactacccattccagaacctcctctctgctgaaagctgaacactcaatgggaagacctgtttgcagagaggagccagccactccagggtctcckttctgctagaagctgaacactcgttgggacacmcttgctgtggaaaggacatccttactgtggaaatgagctactaactgcaggagctgaggagctgcacagcaaggttaaaagagctgtaacacaaacagggctgcaacatgccccttgctccccacagggagagaagagctctggccctcggagaagcccagacctgggagctccttgagcccgggctgtgactccctctttggggccctggttggcgtcactgcattcgccagtgccactgttggaagctgcttgtgatgcgcctggtccagggggaagctgtttgttgtgtgcctggtccagccacctcatggagagcctgtgctggcacctggagctgcccaacctgggcagcagcttgtgtgtgtgactgcacagtggccacgcttgctcacacacccctagcacacccctctgctccacccgtctcaatctcccttggatccgggatccaggttggtagcaagtgcgagtgggcagaagcagcccagtgggcccagagcaaaactcaggcaaaggtgccactagactggccaggaaagcgacaccctaaagatcccataatgctgatatgttaattctattctataagcaccacacagaagtgatagcttttatttcttattttgtctagcctggagacagagctaaggattccttgaactgcaaagtcttttccagttcttagtttatacaatccatactcaccttctgcctaactaagcattgtcatttttgtgccaaatgaagagtaggactcctacgattgtcctcagactctcttggctcaatcctcctgctttaacctttcctacttcaaaaactcctgaagttttgcttccccttctatagaatggaaatatatgtcgcaatacttactgcaaagaaaattatatattttaaaaatagactaaagagatgttgtgagacatcagacatcaatcagatgttgtgagaactgatttctgcatcagaatatctccttgactttacagctatcctttaatcctggctcaaagttccagaagaaagatgatccaatataatactcctatttggactttgagtcatacacattccttcttctgagaaaacgtgcttctgcatgaatcctcccttcattattttcagctcatctattattgaatctgaaaccccaggttaactgactgatcactctcatcagtggcagattttgktgtaacataggacacatcactcccaattcaggtcaagtcccaattatcttgcctctcaatatgacmtgttcaatgttgtatttcattctacttcattttaatgtaaaaagtcttttctggtgaagtcagtcttttattttctcataaaaattcaccctttgggtttttcatagggtattcccataaccaaacacactttacactttcctagtacataacccaatactttcttctttccccacagtccttacatgaagcctactcagaccgacatcactgtatcatttttttgtattctgaagtccttcagcacttgattcctttaagtttaatcttggtattctattgggaatcatatggaaatgtacaatgatatttattgaatgaacaggaaacagggaaagacattgaccagaaaaagtgtttattcatcaagtctttaaagatacaaaaacacgtgtcttctgkggagctcwgaraacaggactccagcaaagcacttttcagccttgtggtcttcaagcatttccaagatctgtgacattggaaagaaaaaaaattaagacagatttgggtctccatgagcagagagtattctttsccttagttctgggtagcatagtgcccaaggaaacctaatcagtacagwgggaaaccaaatctattccaaatcattacccataagcaatcctatggactctctgaggtttgacagagtcagcggccctctccaataaatgtgtttttctat

SEQ ID NO: 174 - DNA, 564 bp, Homo sapiens
cctcagccttctgcatagctgggattacaagcaagcgctgcygcgcccagctgttcattttattcttcatctggcattmtttgaatgtaaggggatttttttgtgggtaatgcttttactggttactgttcatgaaaattttgaatgcagttggtcatatctagtataaagccctgtgttcagatgctcctgctgatggagaggagtaaaagtgtggaccttccatttttctgcaccrcatctgagatactaaagcaaaaattcagcatggccagacaatgctgagaaaccttaagacccaccagtgtgtctagatcctaccctcttaatttcattcagaggtcattttgcttattaccaatatatttcttaaatgaaagactggcaaatcgaaaatactccttgatccatgggaagcagaatggatgttgttagtagacattaaaacaacattaacttctttctgcacctccatcaaagcccatgggtgaccaggtgcgttgtcaatgagcagtaatatcttcaaatctttttttctgagcaataggtcttcacagtgggctt

SEQ ID NO: 175 - DNA, 1449 bp, Homo sapiens
cttccacactgtggaagctttgttcttttgctctttgcaataaatcttgctactgctcactctttgggtccatgctgcttttatgagctgtaacactcaccacgaaggcctgcagcttcactcctgaagccagcgagaccatgagcccgccgggaggaacgaacaactccagatgtgccgccttaagagctgtaacactcaccgcaaaggtctgcagcttcactcctgagccagcgagaccacgaacccaccagaaggaagaaactccgaacacatccraacatcagaaggaacaaactccagacgcaccaccttaagagctgtaacactcaccgcaagggtccgcagtttcattcttgaagtcagtgagaccaagaacccaccaattccggacacattttggcgacccagatgggactttcgcctatcaccaagcggtgagaccatcacctatagctgagcggcgagaccatcacctatcaccaagcaatgggaaacactcaggcatcaacaggctcacccttgaaatgcatcctaagccattgggaccaatttgatccacaaaccttgaaaaagaggcggctcatttttttctgcactatggcttgggcccaatattctctctctgatgaggaaaaatggccacctgagggaagtacaaattacaatactatcctgcagcttgaccttttctgtaagagggaaggcaaatggagtgaaataccttatgtccaagctttcttttcattgaagaatcaaggccatcaagctacagatgggcttacaaatggaaccctttacaatccctgagctagacataaatacaccaatcggcactctgtatctagctcaaggtttgtaaacacaccagtcagcaccctgtgtctagctcagggtttgtgagtgcaccaattgacactctgtatctagctgctctggtggggccgtgaagaacctttatgtctagctcagggattgtaaatacaccaatcggcactctgtatctagctcaaggtttgtaaacacaccaatcagcaccctgtgtctagctcagggtttgtgagtgcaccaatggacactctgtatctatctgctctggtggggccttggagaacctttgtgtggatactctgtatctaatctgatggggacgtggagaacctttgtatccagctcagggattgtaaacgcaccaatcagcgccctgtcaaaacagaccactgggctctaccaatcagccggacgtgggtggggccagataagagaatgaaaccagggctcgggacctgcagcccgccatgcctgagcctcccacccactccatgggctcctgtgtggcccaagcctcccggacgagcaccaccccctgctccacggcgcccagtcccatccttccacactgtggaagctttgttcttttgctctttgcaataactcttgctactgctc

SEQ ID NO: 176 - DNA, 1930 bp, Homo sapiens
tgtttgctggactstatttaagaccgggcataacaaaccttgcttgggaagacagggaaggagctgcagtgtctttgaggaaagaggggaggggaaaatctcggcccaatcgccaggcaatattaggcccagtttccatggcaacgggattggggtcagtccccagtgggwgtcctgggcacaacacagcgggactaccagagaatatcactatggcaaccatggcaacgagtcagctccaatccactagtcgctatggtgacagatgggggcgatactacgctctggtgggcaaactgagtctcgggtgaggacgaataattcagtgcgtggtgtctgagtgataatgcccgcgaaaaatagcctccattttggccatcaggccggggatcttcggcgtgaacagctaaacccagaacaaccacagccttcgcccttctctagaaggtctgcgtttcccagggaacaacttgacgcgccgttcgaccaagtaacgctgattgggtgagtgttgaagcgggggagggagctgccggaagtacatccgggggagcggaactgcaagaggaaaggctcgggtaggcttctgggagcgaccgctccgctcgtctcgttggtkccggaggtcgctgcggcggtgggaaatgctggcgcgcgcggcgcggggcactggggcccttttgctgaggggctctctactggcttctggccgcgctccgcgccgcgcctcctctggattgccccgaaacaccgtggtactgttcgtrccgcagcaggaggcctgggtggtggagcgaatgggccgattccaccggatcctggagcctggtttgaacatcctcatccctgtgttagaccggatccgatatgtgcagagtctcaaggaaattgtyatcaacgtgcctgagcagtcggctgtgactctcgacaatgtaactctgcaaatcgatggagtcctttacctgcgcatcatggacccttacaaggcaagctacggtgtggaggaccctgagtatgccgtcacccagctagctcaaacaaccatgagatcagagctcggcaaactctctctggacaaagtcttccgggaacgggagtccctgaatgccagcattgtggatgcyatcaaccaagctgctgactgctggggtatccgctgcctccgttatgagatcaaggatatccatgtgccaccccgggtgaaagagtctatgcagatgcaggtgggggccaaggaggggtgggaaaagggcctcagggctccagtggaggcagagcggcggaaacgggccacagttctagagtctgaggggacccgagagtcggccatcaatgtggcagaagggaagaaacaggcccagatcctggcctccgaagcagaaaaggctgaacagataaatcaggcagcaggagaggccagtgcagttctggcgaaggccaaggctaaagctgaagctattcgaatcctggctgcagctctgacacaacataatggagatgcagcagcttcactgactgtggccgagcagtatrtcagcgcgttctccaaactggccaaggactccaacactatcctactgccctccaaccctggcgatgtcaccagcatggtggctcaggccatgggtgtatatggagccctcaccaaagccccagtgccagggactccagactcactctccagtgggagcagcagagatgtccagggtacagatgcaagtcttgatgaggaacttgatcgagtcaagatgagttagtggagctgggcttggccagggagtctgggracaaggaagcagattttcctgattctggctytagcttccctgccaagattttggtttttatttttttatttgaactttagtcrtgtaayaaactcaccagtggcaaaccagaaactaaaaaaaaaaaaaaaacacagccagcc

SEQ ID NO: 177 - DNA, 1888 bp, Homo sapiens
tgtttgctggactstatttaagaccgggcataacaaaccttgcttgggaagacagggaaggagctgcagtgtctttgaggaaagaggggaggggaaaatctcggcccaatcgccaggcaatattaggcccagtttccatggcaacgggattggggtcagtccccagtgggwgtcctgggcacaacacagcgggactaccagagaatatcactatggcaaccatggcaacgagtcagctccaatccactagtcgctatggtgacagatgggggcgatactacgctctggtgggcaaactgagtctcgggtgaggacgaataattcagtgcgtggtgtctgagtgataatgcccgcgaaaaatagcctccattttggccatcaggccggggatcttcggcgtgaacagctaaacccagaacaaccacagccttcgcccttctctagaaggtctgcgtttcccagggaacaacttgacgcgccgttcgaccaagtaacgctgattgggtgagtgttgaagcgggggagggagctgccggaagtacatccgggggagcggaactgcaagaggaaaggctcgggtaggcttctgggagcgaccgctccgctcgtctcgttggtkccggaggtcgctgcggcggtgggaaatgctggcgcgcgcggcgcggggcactggggcccttttgctgaggggctctctactggcttctggccgcgctccgcgccgcgcctcctctggattgccccgaaacaccgtggtactgttcgtrccgcagcaggaggcctgggtggtggagcgaatgggccgattccaccggatcctggagcctggtttgaacatcctcatccctgtgttagaccggatccgatatgtgcagagtctcaaggaaattgtyatcaacgtgcctgagcagtcggctgtgactctcgacaatgtaactctgcaaatcgatggagtcctttacctgcgcatcatggacccttacaaggcaagctacggtgtggaggaccctgagtatgccgtcacccagctagctcaaacaaccatgagatcagagctcggcaaactctctctggacaaagtcttccgggaacgggagtccctgaatgccagcattgtggatgcyatcaaccaagctgctgactgctggggtatccgctgcctccgttatgagatcaaggatatccatgtgccaccccgggtgaaagagtctatgcagatgcaggtggaggcagagcggcggaaacgggccacagttctagagtctgaggggacccgagagtcggccatcaatgtggcagaagggaagaaacaggcccagatcctggcctccgaagcagaaaaggctgaacagataaatcaggcagcaggagaggccagtgcagttctggcgaaggccaaggctaaagctgaagctattcgaatcctggctgcagctctgacacaacataatggagatgcagcagcttcactgactgtggccgagcagtatrtcagcgcgttctccaaactggccaaggactccaacactatcctactgccctccaaccctggcgatgtcaccagcatggtggctcaggccatgggtgtatatggagccctcaccaaagccccagtgccagggactccagactcactctccagtgggagcagcagagatgtccagggtacagatgcaagtcttgatgaggaacttgatcgagtcaagatgagttagtggagctgggcttggccagggagtctgggracaaggaagcagattttcctgattctggctytagcttccctgccaagattttggtttttatttttttatttgaactttagtcrtgtaayaaactcaccagtggcaaaccagaaactaaaaaaaaaaaaaaaacacagccagcc

SEQ ID NO: 178 - DNA, 1975 bp, Homo sapiens
tgtttgctggactstatttaagaccgggcataacaaaccttgcttgggaagacagggaaggagctgcagtgtctttgaggaaagaggggaggggaaaatctcggcccaatcgccaggcaatattaggcccagtttccatggcaacgggattggggtcagtccccagtgggwgtcctgggcacaacacagcgggactaccagagaatatcactatggcaaccatggcaacgagtcagctccaatccactagtcgctatggtgacagatgggggcgatactacgctctggtgggcaaactgagtctcgggtgaggacgaataattcagtgcgtggtgtctgagtgataatgcccgcgaaaaatagcctccattttggccatcaggccggggatcttcggcgtgaacagctaaacccagaacaaccacagccttcgcccttctctagaaggtctgcgtttcccagggaacaacttgacgcgccgttcgaccaagtaacgctgattgggtgagtgttgaagcgggggagggagctgccggaagtacatccgggggagcggaactgcaagaggaaaggctcgggtaggcttctgggagcgaccgctccgctcgtctcgttggtkccggaggtcgctgcggcggtgggaaatgctggcgcgcgcggcgcggggcactggggcccttttgctgaggggctctctactggcttctggccgcgctccgcgccgcgcctcctctggattgccccgaaacaccgtggtactgttcgtrccgcagcaggaggcctgggtggtggagcgaatgggccgattccaccggatcctggagcctggtttgaacatcctcatccctgtgttagaccggatccgatatgtgcagagtctcaaggaaattgtyatcaacgtgcctgagcagtcggctgtgactctcgacaatgtaactctgcaaatcgatggagtcctttacctgcgcatcatggacccttacaaggcaagctacggtgtggaggaccctgagtatgccgtcacccagctagctcaaacaaccatgagatcagagctcggcaaactctctctggacaaagtcttccgggaacgggagtccctgaatgccagcattgtggatgcyatcaaccaagctgctgactgctggggtatccgctgcctccgttatgagatcaaggatatccatgtgccaccccgggtgaaagagtctatgcagatgcaggtggaggcagagcggcggaaacgggccacagttctagagtctgaggggacccgagagtcggccatcaatgtggcagaagggaagaaacaggcccagatcctggcctccgaagcagaaaaggctgaacagataaatcaggcagcaggagaggccagtgcagttctggcgaaggccaaggctaaagctgaagctattcgaatcctggctgcagctctgacacaacataatggagatgcagcagcttcactgactgtggccgagcagtatrtcagcgcgttctccaaactggccaaggactccaacactatcctactgccctccaaccctggcgatgtcaccagcatggtggctcaggccatgggtgtatatggagccctcaccaaagccccagtgccagggactccagactcactctccagtgggagcagcagagatgtccagggtacagatgcaagtcttgatgaggaacttgatcgagtcaagatgagttagtggagctgggcttggccagggagtctgggracaaggaagcagattttcctgattctggctytagcttccctgccaagattttggtttttatttttttatttgaactttagtcrtgtaayaaactcaccagtggcaaaccagaaactgtcctctttgattggggaatgaagttgggaaagtcactagcattttccttggatccagtcctgtcagcatgatgcctccatgaataagagtgaacttcttgtaaagtgaaacta

SEQ ID NO: 179 - DNA, 5940 bp, Homo sapiens
ggcgagcgcgccgcgacgccgaacaggtggccggaggctgcgggcgccgcggcggggagaggcgaggcaagccccgggcgaagcgaggcgaggcgagggcggccgggccgggcatgcgagctgagcggccccccggcgtcgccgccgcctgcccgcgcccctagccgcccgcgcgcccgagtccccagcggctcctccgcgcccagcgtcctcggtcccggcctcggctgctccggctgcgctcggcgaggggcgcgggcccgcccgcggcggcggcggcatgaaagtgaccgtgtgcttcggacggacccgggtggtcgtgccgtgcggggacggccacatgaaagttttcagcctcatccagcaggcggtgacccgctaccggaaggccatcgccaaggatccaaactactggatacaggtgcatcgcttggaacatggagatggaggaatactagaccttgatgacattctttgtgatgtagcagacgataaagacagactggtagcagtgtttgatgagcaggatccacatcacggaggtgatggcaccagtgccagttccacgggtacccagagcccagagatatttggtagtgascttggcaccaacaatgtctcagcctttcagccttaccaagcaacaagtgaaattgaggtcacaccttcagtccttcgagcaaatatgcctcttcatgttcgacgcagtagtgacccagctctaattggcctctccacttctgtcagtgatagtaatttttcctctgaagagccttcaaggaaaaatcccacacgctggtcaacaacagctggcttcctcaagcagaacactgctgggagtcctaaaacctgcgacaggaagaaagatgaaaactacagaagcctcccgcgggatactagtaactggtctaaccaatttcagagagacaatgctcgctcgtctctgagtgccagtcacccaatggtgggcaagtggctggagaaacaagaacaggatgaggatgggacagaagaggataacagtcgtgttgaacctgttggacatgctgacacgggtttggagcatatacccaacttttctctggatgatatggtaaagctcgtagaagtccccaacgatggagggcctctgggaatccaygtagtgcctttcagtgctcgaggcggcagaaccctggggttattagtaaaacgattggagaaaggtggtaaagctgaacatgaaaatcttttkcgtgagaatgattgcattgtcaggattaatgatggcgaccttcgaaatagaagatttgaacaagcacaacatatgtttcgccaagccatgcgtacacccatcatttggttccatgtggttcctgcagcaaataaagagcagtatgaacaactatcccaaagtgagaagaacaattactattcaagccgttttagccctgacagccagtatattgacaacaggagtgtgaacagtgcagggcttcacacggtgcagagagcaccccgactgaaccacccgcctgagcagatagactctcactcaagactacctcatagcgcacacccctcgggaaaaccaccatccgctccagcctcggcacctcagaatgtatttagtacgactgtaagcagtggttataacaccaaaaaaataggcaagaggcttaatatccarcttaagaaaggtacagaaggtttgggattcagcatcacttccagagatgtaacaataggtggctcagctccaatctatgtgaaaaacattctcccccggggggcggccattcaggatggccgacttaaggcaggagacagacttatagaggtaaatggagtagatttagtgggcaaatcccaagaggaagttgtttcgctgttgagaagcaccaagatggaaggaactgtgagccttctggtctttcgccaggaagacgccttccacccaagggaactgaatgcagagccaagccagatgcagattccaaaagaaacgaaagcagaagatgagratattgttcttacacctgatggcacsagggaatttctsacatttgaagtcccacttaatgattcaggatctgcaggccttggtgtcagtgtcaaaggtaaccggtcaaaagagaaccacgcagatttgggaatctttgtcaagtccattattaatggaggagcagcatctaaagatggaaggcttcgggtgaatgatcaactgatagcagtaaatggagaatccctgttgggcaagacaaaccaagatgccatggaaaccctaagaaggtctatgtctactgaaggcaataaacgaggaatgatccagcttattgttgcaaggagaataagcaagtgcaatgagctgaagtcacctgggagcccccctggacctgagctgcccattgaaacagcgttggatgatagagaacgaagaatttcccattccctctacagtgggattgaggggcttgatgaatcgcccagcagaaatgctgccctcagtaggataatgggtgagtcaggtaaataccagctgtcccctacagtgaatatgccccaagatgacacwgtcattatagaagatgacaggttgccagtgcttcctccacatctctctgaccagtcctcttccagctcccatgatgatgtggggtttgtgacggcagatgctggtacttgggccaaggctgcaatcagtgattcagccgactgctctttgagtccagatgttgatccagttcttgcttttcaacgagaaggatttggacgtcagagtatgtcagaaaaacgcacaaagcaattttcagatgccagtcaattggatttcgttaaaacacgaaaatcaaaaagcatggatttaggtatagctgacgagactaaactcaatacagtggatgaccagaaagcaggttctcccagcagagatgtgggtccttccctgggtctgaagaagtcaagctcrttggagagtctgcagaccgcagttgccgaggtgactttgaatggggatattcctttccatcgtccacggccgcggataatcagaggcaggggatgcaatgagagcttcagagctgccatcgacaaatcttatgataaacccgcggtagatsatgatgatgaaggcatggagaccttggaagaagacacagaagaaagttcaagatcagggagagagtctgtatccacagccagtgatcagccttcccactctctggagagacaaatgaatggaaaccaagagaaaggtgataagactgatagaaaaaaggataaaactggaaaagaaaagaagaaagatagagataaggagaaggataaaatgaaagccaagaagggaatgctgaagggcttgggagacatgttcaggtttggcaaacatcgaaaagatgacaagattgagaaaacgggtaaaataaaaatacaggaatcctttacatcagaagaggagaggatacgaatgaagcaggagcaggagaggattcaagccaaaactcgasaatttagggaacgacaagctcgagagcgtgactatgctgaaattcaagattttcatcggacatttggctgtgatgatgagttaatgtatgggggagtttcttcttatgaaggttccatggctctcaacgctagacctcagagcccacgagaagggcatatgatggatgctttgtatgcccaagtcaagaagccgcggaattccaaaccctcacctgtagacagtaacagatcaactcctagcaatcatgatcggatacagcgtctgaggcaagaatttcagcaagcaaagcaagatgaagatgtagaagatcgtcrgcggacctatagttttgagcaaccstggccgaacgcacggccggcgaygcagagcgggcgrcactcggtgtccgtggaggtgcagatgcagcrgcagcggcaggaggagcgcgagagctcccagcaggcccagcgccagtacagctctctgcctcggcaaagcaggaaaaatgccagctcggtctcccaggactcttgggagcagaactactcccctggggaaggcttccagagtgccaaagagaaccccaggtactccagctaccaaggctccaggaacggctacctgggaggacatggcttcaacgccagggtcatgctggaaactcaggagctccttcgccaggaacagaggcggaaggagcagcagatgaagaagcagcctccttccgaggggcccagcaactatgactcgtataagaaagtccaggaccccagttacgcccctcccaaggggcccttccggcaagatgtgcccccctccccttctcaggttgcgaggctgaacagacttcagactcctgagaaagggaggcccttctattcctgagcaygcaaataacggatgcttcatgtcrcgcaataaaagacattttcctatgaagacttgtattttgggagtttttttaaaacctcgatggtactatggagtatttctgttgttggtatcagtgcctttaagcggtgtaggcaaagaaatggaaggccttaatgtctttgccactatgtctcaagtgtctgtttcatggaaggatttcccaccctgtgacaatcatctgtttgaggtgttcatatgctctgcgcctctccacagtaccaggaatctcggccctactcatgagttgtccgcggcttggttgtaacatccctgcaccacttgcagtgacaaattcacctgaagtggaggatgacgtgcggccctgtttctccctctaagttctcttagctatgggatgacatcttagtctctggtggaggaaaagtgggcgacatacaccaaaaattggggctttctggtacttcacagcacagccatttgtcgtactttgtcatcactgtggttttctctttcctttctcagctctttgtgacrggagagtcggtcatcctattacagaagctaagccatagtccaacattgtttggtcaccatgggggtccttttgtaactgccttatgactcaacattaccaataaagtgatgatcctggtctgcgtttatacatacgcttgttcggtcctgttcctgacacgtgggttgagtcaccacagctctgtgtggggaacgtgggagacaggagtggctcctgccgggggaagctgggcctgccattggccctgtgtctatcatgaggggagagctaagaaagaaattctcctaggaagagctcatggcccagtacatcctagtaattattttaattagtttttgttctgacagcttgtcaggaagggcacagaatgggacagagataaaccagacagtcattttgatctgctctctacggtttttcaagtcagaggcaattgatgcttgtctaatgcatccacacactgcatgtctgactggcgatgccrcgctcctaagtagttctgccatgaaacataaaagacaaaggaaaagccgttacacatcacacagagaacattttcgggtcccacagcggtggtggcaggaagctcactctcgcgtcagtattagagtgtgtgtgtgggtctcggggatctcggtggctcccatcttccttcattgttctgaacatcctgtattgtaaaccatggctggggtgctaaagtgcctgtgaatcccgatgtggaaaaagctggaggtgaaagctcagcataccatgtatttactttaaaaacagaaaaaaagacatgtatggatatgtctattttttttttattggcacattgtatttttgtgttgacttgtttttagaaatgatgtgtccacacacgtacccgtgtctcttctgcatttctgtgtcatggttctgtttcttaatcacgtgcggcggtgtctaagtggtgttaccagtgtacgcgcagtgaccttggatgacagtggctctttctcacagcctcccctgagctgtgagaaacagctttctctgtacatatgcractcctaataaa

SEQ ID NO: 180 - DNA, 3373 bp, Homo sapiens
ggcgagcgcgccgcgacgccgaacaggtggccggaggctgcgggcgccgcggcggggagaggcgaggcaagccccgggcgaagcgaggcgaggcgagggcggccgggccgggcatgcgagctgagcggccccccggcgtcgccgccgcctgcccgcgcccctagccgcccgcgcgcccgagtccccagcggctcctccgcgcccagcgtcctcggtcccggcctcggctgctccggctgcgctcggcgaggggcgcgggcccgcccgcggcggcggcggcatgaaagtgaccgtgtgcttcggacggacccgggtggtcgtgccgtgcggggacggccacatgaaagttttcagcctcatccagcaggcggtgacccgctaccggaaggccatcgccaaggatccaaactactggatacaggtgcatcgcttggaacatggagatggaggaatactagaccttgatgacattctttgtgatgtagcagacgataaagacagactggtagcagtgtttgatgagcaggatccacatcacggaggtgatggcaccagtgccagttccacgggtacccagagcccagagatatttggtagtgascttggcaccaacaatgtctcagcctttcagccttaccaagcaacaagtgaaattgaggtcacaccttcagtccttcgagcaaatatgcctcttcatgttcgacgcagtagtgacccagctctaattggcctctccacttctgtcagtgatagtaatttttcctctgaagagccttcaaggaaaaatcccacacgctggtcaacaacagctggcttcctcaagcagaacactgctgggagtcctaaaacctgcgacaggaagaaagatgaaaactacagaagcctcccgcgggatactagtaactggtctaaccaatttcagagagacaatgctcgctcgtctctgagtgccagtcacccaatggtgggcaagtggctggagaaacaagaacaggatgaggatgggacagaagaggataacagtcgtgttgaacctgttggacatgctgacacgggtttggagcatatacccaacttttctctggatgatatggtaaagctcgtagaagtccccaacgatggagggcctctgggaatccaygtagtgcctttcagtgctcgaggcggcagaaccctggggttattagtaaaacgattggagaaaggtggtaaagctgaacatgaaaatcttttkcgtgagaatgattgcattgtcaggattaatgatggcgaccttcgaaatagaagatttgaacaagcacaacatatgtttcgccaagccatgcgtacacccatcatttggttccatgtggttcctgcagcaaataaagagcagtatgaacaactatcccaaagtgagaagaacaattactattcaagccgttttagccctgacagccagtatattgacaacaggagtgtgaacagtgcagggcttcacacggtgcagagagcaccccgactgaaccacccgcctgagcagatagactctcactcaagactacctcatagcgcacacccctcgggaaaaccaccatccgctccagcctcggcacctcagaatgtatttagtacgactgtaagcagtggttataacaccaaaaaaataggcaagaggcttaatatccarcttaagaaaggtacagaaggtttgggattcagcatcacttccagagatgtaacaataggtggctcagctccaatctatgtgaaaaacattctcccccggggggcggccattcaggatggccgacttaaggcaggagacagacttatagaggtaaatggagtagatttagtgggcaaatcccaagaggaagttgtttcgctgttgagaagcaccaagatggaaggaactgtgagccttctggtctttcgccaggaagacgccttccacccaagggaactgaatgcagagccaagccagatgcagattccaaaagaaacgaaagcagaagatgagratattgttcttacacctgatggcacsagggaatttctsacatttgaagtcccacttaatgattcaggatctgcaggccttggtgtcagtgtcaaaggtaaccggtcaaaagagaaccacgcagatttgggaatctttgtcaagtccattattaatggaggagcagcatctaaagatggaaggcttcgggtgaatgatcaactgatagcagtaaatggagaatccctgttgggcaagacaaaccaagatgccatggaaaccctaagaaggtctatgtctactgaaggcaataaacgaggaatgatccagcttattgttgcaaggagaataagcaagtgcaatgagctgaagtcacctgggagcccccctggacctgagctgcccattgaaacagcgttggatgatagagaacgaagaatttcccattccctctacagtgggattgaggggcttgatgaatcgcccagcagaaatgctgccctcagtaggataatgggtaaataccagctgtcccctacagtgaatatgccccaagatgacacwgtcattatagaagatgacaggttgccagtgcttcctccacatctctctgaccagtcctcttccagctcccatgatgatgtggggtttgtgacggcagatgctggtacttgggccaaggctgcaatcagtgattcagccgactgctctttgagtccagatgttgatccagttcttgcttttcaacgagaaggatttggacgtcagactgacgagactaaactcaatacagtggatgaccagaaagcaggttctcccagcagagatgtgggtccttccctgggtctgaagaagtcaagctcrttggagagtctgcagaccgcagttgccgaggtgactttgaatggggatattcctttccatcgtccacggccgcggataatcagaggcaggggatgcaatgagagcttcagagctgccatcgacaaatcttatgataaacccgcggtagatsatgatgatgaaggcatggagaccttggaagaagacacagaagaaagttcaagatcagggagagagtctgtatccacagccagtgatcagccttcccactctctggagagacaaatgaatggaaaccaagagaaaggtgataagactgatagaaaaaaggataaaactggaaaagaaaagaagaaagatagagataaggagaaggataaaatgaaagccaagaagggaatgctgaagggcttgggagacatgttcagccttgccaaactgaagcccgagaagagatgaacaacaaagcgattcaaaacatgtcttgaacagcacatattgcacagttgttgttttttttaaacaaacaataaatttacttttaatgaa

SEQ ID NO: 181 - DNA, 2967 bp, Homo sapiens
aagctccgcgcgggggcttcctcggctccttgctgttgccgccgccgcagctgctgccgcggttggtgrggttgggtgagaggaggagctgtcgcggaccctgtagagtcgrtctctgttgctctttttgcctgaggagtcttccatcctacgtcgagctctgactcccgtgctgtcgagagggagtccccggggacacctcggcacgcagcggagatgcctctttttgccaccaatcccttcgatcaggatgttgagaaagcaaccagcgagatgaatactgctgaggactggggcctcattttggatatctgtgataaagttggtcagtctcgcactggacctaaggattgtcttcggtctattatgagaagagtgaaccacaaagatcctcacgttgctatgcaggctttgactcttctaggagcatgtgtatcaaactgtggcaaaatttttcatttagaagtatgttcaagagattttgctagtgaagtaagcaacgtattaaataagggtcatcctaaagtatgtgaaaaattaaaggctcttatggttgaatggacagatgaatttaagaatgatccacagcttagtctaatatcagcaatgattaagaaccttaaggaacaaggagttacgttcccagctattggctctcaggctgcagaacaagcaaaagcaagcccagctcttgtagccaaggatcctggtactgtggctaacaaaaaagaagaagaagatttagcaaaagccattgagttgtctctcaaggaacaaaggcagcagtcaaccaccctttccactttgtatccaagcacatccagtctcttaactaaccaccaacatgaaggccgaaaagttcgtgctatatatgactttgaagctgctgaagacaatgaacttacttttaaagctggagaaattattacagttcttgatgacagtgatcctaactggtggaaaggtgaaacccatcaaggcatagggttatttccttctaattttgtgactgcagatctcactgctgaaccagaaatgattaaaacagagaagaagacggtacaatttagtgatgatgttcaggtagagacaatagaaccagagccggaaccagcctttattgatgaagataaaatggaccagttgctacagatgctgcaaagtacagaccccagtgatgatcagccagacctaccagagctgcttcatcttgaagcaatgtgtcaccagatgggacctctcattgatgaaaagctggaagatattgatagaaaacattcagaactctcagaacttaatgtgaaagtgatggaggccctttccttatataccaagttaatgaacgaagatccgatgtattccatgtatgcaaagttacagaatcagccatattatatgcagtcatctggtgtttctggttctcaggtgtatgcagggcctcctccaagtggtgcctacctggttgcagggaacgcgcagatgagccacctccagagctacagtcttcccccggagcagctgtcttctctcagccaggcagtggtcccaccatccgcaaacccagcccttcctagtcagcagactcaggccgcttacccaaatacaatggtcagttccgttcaaggaaacacatatcccagccaggcgccagtatayagtcctcctcctgccgctactgctgctgctgcaactgccgatgtcactctgtaccagaatgcaggacctaatatgccccaggtgccaaactataacttaacatcatcaactctgcctcagcccggaggcagccaacagccacctcagccacagcaaccatattctcagaaggctctgctataggacccggtgttcctcttggtggcagatacctgctaaatgccactgacaaygttatgagattcattactatcttaagatgtgtttatcctcagcttataggaatctctccaggtcaacaggttcaaatattcaagaaggtagaactctcctcaatttacactgactttttagaggttcttccccccccgcccctgcagaggaatgaaactacttacaacatttaattcctttcataatatgaaagaattgatacaaggctatttgtctcgtaaacctggtctgcagaaagtcaaacttacaaaaactgttgtgacaaatgttatgtacatatawtgatatgtaactgcattagtggccattttgaatcacagtggtgatcgtgtgaatatatttaacactgtgttaaattaatttacgttgctattttattttaatcataaacaactaccatgtttcttaatgttttgtgtaaatttaaggtaattatactatccttttaaacttcaagaaaacaaarttgttagcgtatttacatgaaggcgcattatgttgtcgtgtgtttcagtttcacattaaactgaaccttttactaattgtgagctaaagagrtatatatatatatgtgtgtgtatatatatatatctacatgtctttctgtagcctctgcatactactggctgtcatcacaccagcgtacagtagctaaatttttggtgcaattatagcaaatgataatgttcccttttgaacttttacattttggcatgacatttcagagtattgtgggaccatgagacaaaattaagtacgatcacattctttatttctcattttaaagaaatgatgttggtttaccttttcctagttgaagatagtaattaggtttctaagctgtatactgtgtttattggtggcagtgacaccaaagatagaggcaatggatagaaatttttaaactggaaagaaaacctgaattacactacattttcgaagtctcttgtaattatttgggatatcaacaaaatttgattcgtctgtctaatcccttgctagtattttaaatatgtctttaacacattgtatcctttaattcttcattaaaatggaaataagtagatgtttcaaagt

SEQ ID NO: 182 - DNA, 2490 bp, Homo sapiens
aagctccgcgcgggggcttcctcggctccttgctgttgccgccgccgcagctgctgccgcggttggtgrggttgggtgagaggaggagctgtcgcggaccctgtagagtcgrtctctgttgctctttttgcctgaggagtcttccatcctacgtcgagctctgactcccgtgctgtcgagagggagtccccggggacacctcggcacgcagcggagatgcctctttttgccaccaatcccttcgatcaggatgttgagaaagcaaccagcgagatgaatactgctgaggactggggcctcattttggatatctgtgataaagttggtcagtctcgcactggacctaaggattgtcttcggtctattatgagaagagtgaaccacaaagatcctcacgttgctatgcaggctttgactcttctaggagcatgtgtatcaaactgtggcaaaatttttcatttagaagtatgttcaagagattttgctagtgaagtaagcaacgtattaaataagggtcatcctaaagtatgtgaaaaattaaaggctcttatggttgaatggacagatgaatttaagaatgatccacagcttagtctaatatcagcaatgattaagaaccttaaggaacaaggagttacgttcccagctattggctctcaggctgcagaacaagcaaaagcaagcccagctcttgtagccaaggatcctggtactgtggctaacaaaaaagaagaagaagatttagcaaaagccattgagttgtctctcaaggaacaaaggcagcagtcaaccaccctttccactttgtatccaagcacatccagtctcttaactaaccaccaacatgaaggccgaaaagttcgtgctatatatgactttgaagctgctgaagacaatgaacttacttttaaagctggagaaattattacagttcttgatgacagtgatcctaactggtggaaaggtgaaacccatcaaggcatagggttatttccttctaattttgtgactgcagatctcactgctgaaccagaaatgattaaaacagagaagaagacggtacaatttagtgatgatgttcaggtagagacaatagaaccagagccggaaccagcctttattgatgaagataaaatggaccagttgctacagatgctgcaaagtacagaccccagtgatgatcagccagacctaccagagctgcttcatcttgaagcaatgtgtcaccagatgggacctctcattgatgaaaagctggaagatattgatagaaaacattcagaactctcagaacttaatgtgaaagtgatggaggccctttccttatataccaagttaatgaacgaagatccgatgtattccatgtatgcaaagttacagaatcagccatattatatgcagtcatctggtgtttctggttctcaggtgtatgcagggcctcctccaagtggtgcctacctggttgcagggaacgcgcagatgagccacctccagagctacagtcttcccccggagcagctgtcttctctcagccaggcagtggtcccaccatccgcaaacccagcccttcctagtcagcagactcaggccgcttacccaaatacaatggtcagttccgttcaaggaaacacatatcccagccaggcgccagtatayagtcctcctcctgccgctactgctgctgctgcaactgccgatgtcactctgtaccagaatgcaggacctaatatgccccaggtgccaaactataacttaacatcatcaactctgcctcagcccggaggcagccaacagccacctcagccacagcaaccatattctcagaaggctctgctataggacccggtgttcctcttggtggcagatacctgctaaatgccactgacaaygttatgagattcattactatcttaagatgtgtttatcctcagcttataggaatctctccaggtcaacaggttcaaatattcaagaaggtagaactctcctcaatttacactgactttttagaggttcttccccccccgcccctgcagaggaatgaaactacttacaacatttaattcctttcataatatgaaagaattgatacaaggctatttgtctcgtaaacctggtctgcagaaagtcaaacttacaaaaactgttgtgacaaatgttatgtacatatawtgatatgtaactgcattagtggccattttgaatcacagtggtgatcgtgtgaatatatttaacactgtgttaaattaatttacgttgctattttattttaatcataaacaactaccatgtttcttaatgttttgtaaatttttaaactggaaagaaaacctgaattacactacattttcgaagtctcttgtaattatttgggatatcaacaaaatttgattcgtctgtctaatcccttgctagtattttaaatatgtctttaacacattgtatcctttaattcttcattaaaatggaaataagtagatgtttcaaagt

SEQ ID NO: 183 - DNA, 2544 bp, Homo sapiens
gggcgtggccgacccggcgctagcccgcccgcccgcccgccggctctcgcgcctccttcgcgccggcccttccgcgggtgatcagctggtctgcgctcccctgacgtgggctggggcacgtcaccgccgaatggcagcctccagaaagccaccgcgagtaagggtgaatcaccaggattttcaactgagaaatttaagaataattgaacctaasgaggtgacacactcaggagacacaggtgtggaaacagaatgcctccaaaggtgacttcagagctgcttcggcagctgagacaagccatgaggaactctgagtatgtgaccgaaccgatccaggcctacatcatcccatcgggagatgctcatcagagtgagtatattgctccatgtgactgtcggcgggcttttgtctctggattcgatggctctgcgggcacagccatcatcacagaagagcatgcagccatgtggactgacgggcgctactttctccaggctgccaagcaaatggacagcaactggacacttatgaagatgggtctgaaggacacaccaactcaggaagactggctggtgagtgtgcttcctgaaggatccagggttggtgtggaccccttgatcattcctacagattattggaagaaaatggccaaagttctgagaagtgccggccatcacctcattcctgtcaaggagaacctcgttgacaaaatctggacagaccgtcctgagcgcccttgcaagcctctcctcacactgggcctggattacacaggcatctcctggaaggacaaggttgcagaccttcggttgaaaatggctgagaggaacgtcatgtggtttgtggtcactgccttggatgagattgcgtggctatttaatctccgaggatcagatgtggagcacaatccagtatttttctcctacgcaatcataggactagagacgatcatgctcttcattgatggtgaccgcatagacgcccccagtgtgaaggagcacctgcttcttgacttgggtctggaagccgaatacaggatccaggtgcatccctacaagtccatcctgagcgagctcaaggccctgtgtgctgacctctccccaagggagaaggtgtgggtcagtgacaaggccagctatgctgtgagcgagaccatccccaaggaccaccgctgctgtatgccttacacccccatctgcatcgccaaagctgtgaagaattcagctgagtcagaaggcatgaggcgggctcacattaaagatgctgttgctctctgtgaactctttaactggctggagaaagaggttcccaaaggtggtgtgacagagatctcagctgctgacaaagctgaggagtttcgcaggcaacaggcagactttgtggacctgagcttcccaacaatttccagtacgggacccaacggcgccatcattcactacgcgccagkccctgagacgaataggaccttgtccctggatgaggtgtaccttattgactcgggtgctcaatacaaggatggcaccacagatgtgacgcggacaatgcattttgggacccctacagcctacgagaaggaatgcttcacatatgtcctcaagggccacatagctgtgagtgcagccgttttcccgactggaaccaaaggtcaccttcttgactcctttgcccgttcagctttatgggattcaggcctagattacttgcacgggactggacatggtgttgggtcttttttgaatgtccatgagggtccttgcggcatcagttacaaaacattctctgatgagcccttggaggcaggcatgattgtcactgatgagcccgggtactatgaagatggggcttttggaattcgcattgagaatgttgtccttgtggttcctgtgaagaccaagtataattttaataaccggggaagcctgacctttgaacctctaacattggttccaattcagaccaaaatgatagatgtggattctcttacagacaaagagtgcgactggctcaacaattaccacctgacctgcagggatgtgattgggaaggaattgcagaaacagggccgccaggaagctctcgagtggctcatcagagagacgcaacccatctccaaacagcattaataaatacctccccggttttgtttttgtaaaatgctctggaggaaggaagaaacgtggcagatccctgacatctttcccctttcctttccttcttccctacctcccctttttactttagactttaagaagaacagaaaatcttcttatcctctttgatattttattgcaaacaytcagtcttttatgattttttaattgttgagaacaagccaagaataaaattgctgcaccagaaggagggtccctccaaagttgaacacttggtgaaaggaagatgccccgacttctttggccagtgatggggaatcagtgagtgctccatgatggtcatgttccaggtgctagtacatcattcatgatcaccttaatgctcatgagactatatttatgatcagtgaataaaaatgtcagaactgtgct

SEQ ID NO: 184 - DNA, 2394 bp, Homo sapiens
cttccgcgggtgatcagctggtctgcgctcccctgacgtgggctggggcacgtcaccgccgaatggcagcctccagaaagccaccgcgagtaagacggcagaatgcctccaaaggtgacttcagagctgcttcggcagctgagacaagccatgaggaactctgagtatgtgaccgaaccgatccaggcctacatcatcccatcgggagatgctcatcagagtgagtatattgctccatgtgactgtcggcgggcttttgtctctggattcgatggctctgcgggcacagccatcatcacagaagagcatgcagccatgtggactgacgggcgctactttctccaggctgccaagcaaatggacagcaactggacacttatgaagatgggtctgaaggacacaccaactcaggaagactggctggtgagtgtgcttcctgaaggatccagggttggtgtggaccccttgatcattcctacagattattggaagaaaatggccaaagttctgagaagtgccggccatcacctcattcctgtcaaggagaacctcgttgacaaaatctggacagaccgtcctgagcgcccttgcaagcctctcctcacactgggcctggattacacaggcatctcctggaaggacaaggttgcagaccttcggttgaaaatggctgagaggaacgtcatgtggtttgtggtcactgccttggatgagattgcgtggctatttaatctccgaggatcagatgtggagcacaatccagtatttttctcctacgcaatcataggactagagacgatcatgctcttcattgatggtgaccgcatagacgcccccagtgtgaaggagcacctgcttcttgacttgggtctggaagccgaatacaggatccaggtgcatccctacaagtccatcctgagcgagctcaaggccctgtgtgctgacctctccccaagggagaaggtgtgggtcagtgacaaggccagctatgctgtgagcgagaccatccccaaggaccaccgctgctgtatgccttacacccccatctgcatcgccaaagctgtgaagaattcagctgagtcagaaggcatgaggcgggctcacattaaagatgctgttgctctctgtgaactctttaactggctggagaaagaggttcccaaaggtggtgtgacagagatctcagctgctgacaaagctgaggagtttcgcaggcaacaggcagactttgtggacctgagcttcccaacaatttccagtacgggacccaacggcgccatcattcactacgcgccagkccctgagacgaataggaccttgtccctggatgaggtgtaccttattgactcgggtgctcaatacaaggatggcaccacagatgtgacgcggacaatgcattttgggacccctacagcctacgagaaggaatgcttcacatatgtcctcaagggccacatagctgtgagtgcagccgttttcccgactggaaccaaaggtcaccttcttgactcctttgcccgttcagctttatgggattcaggcctagattacttgcacgggactggacatggtgttgggtcttttttgaatgtccatgagggtccttgcggcatcagttacaaaacattctctgatgagcccttggaggcaggcatgattgtcactgatgagcccgggtactatgaagatggggcttttggaattcgcattgagaatgttgtccttgtggttcctgtgaagaccaagtataattttaataaccggggaagcctgacctttgaacctctaacattggttccaattcagaccaaaatgatagatgtggattctcttacagacaaagagtgcgactggctcaacaattaccacctgacctgcagggatgtgattgggaaggaattgcagaaacagggccgccaggaagctctcgagtggctcatcagagagacgcaacccatctccaaacagcattaataaatacctccccggttttgtttttgtaaaatgctctggaggaaggaagaaacgtggcagatccctgacatctttcccctttcctttccttcttccctacctcccctttttactttagactttaagaagaacagaaaatcttcttatcctctttgatattttattgcaaacaytcagtcttttatgattttttaattgttgagaacaagccaagaataaaattgctgcaccagaaggagggtccctccaaagttgaacacttggtgaaaggaagatgccccgacttctttggccagtgatggggaatcagtgagtgctccatgatggtcatgttccaggtgctagtacatcattcatgatcaccttaatgctcatgagactatatttatgatcagtgaataaaaatgtcagaactgtgct

SEQ ID NO: 185 - DNA, 2551 bp, Homo sapiens
gggcgtggccgacccggcgctagcccgcccgcccgcccgccggctctcgcgcctccttcgcgccggcccttccgcgggtgatcagctggtctgcgctcccctgacgtgggctggggcacgtcaccgccgaatggcagcctccagaaagccaccgcgagtaagggtgaatcaccaggattttcaactgagaaatttaagaataattgaacctaasgaggtgacacactcaggagacacaggtgtggaaacagacggcagaatgcctccaaaggtgacttcagagctgcttcggcagctgagacaagccatgaggaactctgagtatgtgaccgaaccgatccaggcctacatcatcccatcgggagatgctcatcagagtgagtatattgctccatgtgactgtcggcgggcttttgtctctggattcgatggctctgcgggcacagccatcatcacagaagagcatgcagccatgtggactgacgggcgctactttctccaggctgccaagcaaatggacagcaactggacacttatgaagatgggtctgaaggacacaccaactcaggaagactggctggtgagtgtgcttcctgaaggatccagggttggtgtggaccccttgatcattcctacagattattggaagaaaatggccaaagttctgagaagtgccggccatcacctcattcctgtcaaggagaacctcgttgacaaaatctggacagaccgtcctgagcgcccttgcaagcctctcctcacactgggcctggattacacaggcatctcctggaaggacaaggttgcagaccttcggttgaaaatggctgagaggaacgtcatgtggtttgtggtcactgccttggatgagattgcgtggctatttaatctccgaggatcagatgtggagcacaatccagtatttttctcctacgcaatcataggactagagacgatcatgctcttcattgatggtgaccgcatagacgcccccagtgtgaaggagcacctgcttcttgacttgggtctggaagccgaatacaggatccaggtgcatccctacaagtccatcctgagcgagctcaaggccctgtgtgctgacctctccccaagggagaaggtgtgggtcagtgacaaggccagctatgctgtgagcgagaccatccccaaggaccaccgctgctgtatgccttacacccccatctgcatcgccaaagctgtgaagaattcagctgagtcagaaggcatgaggcgggctcacattaaagatgctgttgctctctgtgaactctttaactggctggagaaagaggttcccaaaggtggtgtgacagagatctcagctgctgacaaagctgaggagtttcgcaggcaacaggcagactttgtggacctgagcttcccaacaatttccagtacgggacccaacggcgccatcattcactacgcgccagkccctgagacgaataggaccttgtccctggatgaggtgtaccttattgactcgggtgctcaatacaaggatggcaccacagatgtgacgcggacaatgcattttgggacccctacagcctacgagaaggaatgcttcacatatgtcctcaagggccacatagctgtgagtgcagccgttttcccgactggaaccaaaggtcaccttcttgactcctttgcccgttcagctttatgggattcaggcctagattacttgcacgggactggacatggtgttgggtcttttttgaatgtccatgagggtccttgcggcatcagttacaaaacattctctgatgagcccttggaggcaggcatgattgtcactgatgagcccgggtactatgaagatggggcttttggaattcgcattgagaatgttgtccttgtggttcctgtgaagaccaagtataattttaataaccggggaagcctgacctttgaacctctaacattggttccaattcagaccaaaatgatagatgtggattctcttacagacaaagagtgcgactggctcaacaattaccacctgacctgcagggatgtgattgggaaggaattgcagaaacagggccgccaggaagctctcgagtggctcatcagagagacgcaacccatctccaaacagcattaataaatacctccccggttttgtttttgtaaaatgctctggaggaaggaagaaacgtggcagatccctgacatctttcccctttcctttccttcttccctacctcccctttttactttagactttaagaagaacagaaaatcttcttatcctctttgatattttattgcaaacaytcagtcttttatgattttttaattgttgagaacaagccaagaataaaattgctgcaccagaaggagggtccctccaaagttgaacacttggtgaaaggaagatgccccgacttctttggccagtgatggggaatcagtgagtgctccatgatggtcatgttccaggtgctagtacatcattcatgatcaccttaatgctcatgagactatatttatgatcagtgaataaaaatgtcagaactgtgct

SEQ ID NO: 186 - DNA, 2300 bp, Homo sapiens
acggcagaatgcctccaaaggtgacttcagagctgcttcggcagctgagacaagccatgaggaactctgagtatgtgaccgaaccgatccaggcctacatcatcccatcgggagatgctcatcagagtgagtatattgctccatgtgactgtcggcgggcttttgtctctggattcgatggctctgcgggcacagccatcatcacagaagagcatgcagccatgtggactgacgggcgctactttctccaggctgccaagcaaatggacagcaactggacacttatgaagatgggtctgaaggacacaccaactcaggaagactggctggtgagtgtgcttcctgaaggatccagggttggtgtggaccccttgatcattcctacagattattggaagaaaatggccaaagttctgagaagtgccggccatcacctcattcctgtcaaggagaacctcgttgacaaaatctggacagaccgtcctgagcgcccttgcaagcctctcctcacactgggcctggattacacaggcatctcctggaaggacaaggttgcagaccttcggttgaaaatggctgagaggaacgtcatgtggtttgtggtcactgccttggatgagattgcgtggctatttaatctccgaggatcagatgtggagcacaatccagtatttttctcctacgcaatcataggactagagacgatcatgctcttcattgatggtgaccgcatagacgcccccagtgtgaaggagcacctgcttcttgacttgggtctggaagccgaatacaggatccaggtgcatccctacaagtccatcctgagcgagctcaaggccctgtgtgctgacctctccccaagggagaaggtgtgggtcagtgacaaggccagctatgctgtgagcgagaccatccccaaggaccaccgctgctgtatgccttacacccccatctgcatcgccaaagctgtgaagaattcagctgagtcagaaggcatgaggcgggctcacattaaagatgctgttgctctctgtgaactctttaactggctggagaaagaggttcccaaaggtggtgtgacagagatctcagctgctgacaaagctgaggagtttcgcaggcaacaggcagactttgtggacctgagcttcccaacaatttccagtacgggacccaacggcgccatcattcactacgcgccagkccctgagacgaataggaccttgtccctggatgaggtgtaccttattgactcgggtgctcaatacaaggatggcaccacagatgtgacgcggacaatgcattttgggacccctacagcctacgagaaggaatgcttcacatatgtcctcaagggccacatagctgtgagtgcagccgttttcccgactggaaccaaaggtcaccttcttgactcctttgcccgttcagctttatgggattcaggcctagattacttgcacgggactggacatggtgttgggtcttttttgaatgtccatgagggtccttgcggcatcagttacaaaacattctctgatgagcccttggaggcaggcatgattgtcactgatgagcccgggtactatgaagatggggcttttggaattcgcattgagaatgttgtccttgtggttcctgtgaagaccaagtataattttaataaccggggaagcctgacctttgaacctctaacattggttccaattcagaccaaaatgatagatgtggattctcttacagacaaagagtgcgactggctcaacaattaccacctgacctgcagggatgtgattgggaaggaattgcagaaacagggccgccaggaagctctcgagtggctcatcagagagacgcaacccatctccaaacagcattaataaatacctccccggttttgtttttgtaaaatgctctggaggaaggaagaaacgtggcagatccctgacatctttcccctttcctttccttcttccctacctcccctttttactttagactttaagaagaacagaaaatcttcttatcctctttgatattttattgcaaacaytcagtcttttatgattttttaattgttgagaacaagccaagaataaaattgctgcaccagaaggagggtccctccaaagttgaacacttggtgaaaggaagatgccccgacttctttggccagtgatggggaatcagtgagtgctccatgatggtcatgttccaggtgctagtacatcattcatgatcaccttaatgctcatgagactatatttatgatcagtgaataaaaatgtcagaactgtgct

SEQ ID NO: 187 - DNA, 6271 bp, Homo sapiens
gagacaggcggcggcggcggcgccccagacccgaggggacgcgcgggccttgcgccgcgggagcggacggcggcggaggagaccctaggctcgcggcccgaggcgggagggctcggcttctcgactgcccgcctccgaggccgccggccgcttctctctcccagagtggccgccgcccctggagactcgccgtgacacgggcctaagccgccgccgcgggagtcctgaccgctcggacccgtcggatcaggccgggtgggagcgagcttgcgggcaggtgccgctcccggagggtgggccgcgcgcgggagagcagggaagagaaactttgccttttattgtttttagtccttaagtgcaaggaactctgtgttgggaggaaaaatgtccttcttcaatttccgtaagatcttcaagttggggagcgagaagaagaagaagcagtacgaacacgtgaagagggacctgaaccccgaagacttttgggagattataggagaactgggcgacggagcctttgggaaagtgtacaaggcccagaataaagagaccagtgttttagctgctgcaaaagtgattgacactaaatctgaagaagaacttgaagattacatggtagagattgacatattagcatcttgtgatcacccaaatatagtcaagcttctagatgccttctattatgagaacaatctttggatcctcattgaattttgtgcaggtggagcagtagatgctgtgatgcttgaacttgagagaccattaactgagtcccaaatacaagtagtttgcaagcagactttagatgcattgaactacttacatgataataagatcatccacagagatctgaaggctggcaacattctctttaccttagatggagatatcaaattggcggattttggagtrtcagctaaaaacacgaggacaattcaaagaagagattcctttattggtacaccatattggatggctcctgaagtagtcatgtgtgaaacatctaaggacagaccctatgactacaaagctgatgtttggtccctgggtatcactttaatagaaatggctgagatagaaccacctcatcatgaattaaatccaatgcgagtrctgctaaaaatagcaaaatctgagccacctacattagcacagccatccagatggtcttcaaattttaaggactttctaaagaaatgcttagaaaagaatgtggatgccaggtggactacatctcagctgctgcagcatccctttgttactgttgattccaacaaacccatccgagaattgattgcagaggcgaaggctgaagtaacagaagaagttgaagatggcaaagaggaagatgaagaggaggaaacagaaaattctctgccaatacctgcaagtaagcgtgcatcttctgaccttagtatcgccagctctgaagaagataaactttcacaaaatgcttgtattttggagtctgtctcagaaaaaacagaacgtagtaactctgaagataaactcaacagcaaaattcttaatgaaaaacccaccactgatgaacctgaaaaggctgtggaggatattaatgaacatattaccgatgctcagttagaagcaatgactgaactccatgacagaacagcagtaatcaaggagaatgaaagagagaagaggcccaagcttgaaaatctgcctgacacagaagaccaagaaactgtggacattaattcagtcagtgaaggaaaagagaataatataatgataaccttagaaacaaatattgaacataatctaaaatctgaggaagaaaaggatcaggaaaagcaacagatgtttgaaaataagcttataaaatctgaagaaattaaagatactattttgcaaacagtagatttagtttctcaagagactggagaaaaagaggcaaatattcaggcagttgatagtgaagttgggcttacaaaggaagacacccaagagaaattgggggaagacgacaaaactcaaaaagatgtgatcagcartacaagtgatgtgataggaacatrtgaggcagcagatgtggctcagaaagtggatgaagacagtgctgaggatacgcagagtaatgatgggaaagaagtggtcgaagtaggccagaaattaattaataagcccatggtgggtcctgaggctggtggtactaaggaagttcctattaaagaaatagttgaaatgaatgaaatagaagaaggtaaaaataaggaacaagcaataaacagttcagagaacataatggacatcaatgaggaaccaggaacaactgaaggtgaagaaatcactgagtcaagtagcactgaagaaatggaggtcagaagtgtggtggctgatactgaccaaaaggctttaggaagtgaagttcaggatgcttctaaagtcactactcagatagataaagagaaaaaagaaattccagtgtcaattaaaaaagagcctgaagttaytgtagtttcacagcccactgaacctcagcctgttctaatacccagtattaatatcaactctgacagtggagaaaataaagaagaaataggttctttatcaaaaactgaaactattctgccaccagaatctgagaatccaaaggaaaatgataatgattcaggcactggttccactgctgatactagcagtattgacttgaatttatccatctctagctttctaagtaaaactaaagacagtggatcgatatctttacaagaaacaagaagacaaaagaaaacattgaagaaaacacgcaaatttattgttgatggtgtagaagtgagtgtaacaacatcaaagatagttacagatagtgattccaaaactgaagaattgcggtttcttagacgtcaggaacttcgggaattaagatttcttcagaaagaagagcaaagagcccaacaacagctcaatagcaaactrcagcaacaacgagaacaaattttccggcgctttgagcaggaaatgatgagtaaaaagcgacaatatgaccaggaaattgagaatctagaaaaacagcagaaacagactatcgaacgcctggaacaagagcacacaaatcgcttgcgagatgaagccaaacgcatcaaaggagaacaagagaaagagttgtccaaatttcagaatatgctgaagaaccgaaagaaggaggttataaatgaagtggagaaagcacccaaagagctgagaaaagagctcatgaaacgcaggaaagaggagcttgcacaaagccagcatgctcaggaacaagagtttgttcagaaacaacagcaagaattagatggctctctgaaaaagatcatccagcagcagaaggcagagttagctaatattgagagagagtgcctgaataacaagcaacagctcatgagagctcgagaagctgcaatttgggagctcgaagaacgacacttacaagaaaaacaccagctgctcaaacagcagcttaaagatcagtatttcatgcaaagacatcagctacttaagcgccacgagaaggaaacagagcaaatgcagcgttacaatcaaagacttattgaggaattgaaaaacagacagactcaagaaagagcaagactgcccaagattcagcgcagtgaagccaagactcgaatggccatgtttaagaagagtttgagaattaactcaacagccacaccagatcaggaccgtgataaaattaaacagtttgctgcacaagaagaaaagaggcagaaaaatgagagaatggctcagcatcagaaacatgagaatcaaatgcgagatcttcagttgcagtgtgaagccaatgtccgcgaactgcatcagctgcagaatgaaaaatgccacttgttggttgagcatgagactcagaaactgaaggagttagatgaggaacatagccaagaattaaaggagtggagagagaaattgagacctaggaaaaagacactggaagaagagtttgccaggaaactacaggaacaggaagtattctttaaaatgactggggagtctgaatgccttaacccatcaacacagagccggatttccaaattttatcctattcccagcttgcattccaccggatcataacaaagggaagcattctgtgcgtgggtttggctctttcagtatgtcattctgttctcatcttctgccacagtctctcagatagctcatgaagacaatcacctgcctcaccttctaggtgttttccttttttgttttttttgttttgttttgtttttaagcaaagatgaagggaaaacgaactaagacagacgctaggccatgttggcaaagtagcatcttggtgactaaggtgactttgtatattcatcttaaaaattatgttctttagacactgctacctgaaaactgttggagaaataatgtttaaagttatttaagaaaaactgttacatcactaagtattaataaattcttcttacctgacgtaacttctcaatgcctaaattctgtagttgaagctctgctgcagagagttgggataattttcttttggtggatcagctctcataaaaaagctatgatttgctcaaatatgctgttgactcagtaaatgaatatatttttttctttaaataggaacaacctcttttaaaagagaaaaattatttcagtgatttgtcaaaacgaattacctcttttggcatgagctaataattgagggtgctaattttcttaagatagtgcctaaaacactaaatttcagtcaagtcgtaagtaggattttctttttgatcaacagggacaaaaacatctttagaattaaaaacatggttgttttggaatttttgcttctcttaccgtttgatagaaattttcatcctaaaatacatgtacaaagtttggaaagatgaaaaaaagaggtagcttttagattgcaaaytggaaatgtaaaactcatgaaatttaagcaatataggtttagctatctgtgtttattttctaaaataatacctgagctggttaaatgatttctctccatcttagctaattctgtttaaaactctgtcagaggcctgcaggctgtgagttatatttataaatatatcttcagaaattaatcttaaaagaggcattagttcagmatacttttttaaaagtttaaattaaatatttaggcacgtcagraattacttttccttattttgaaatgaggctacttatgtcttggttttattttgttccatgtttaaatcattcactttgatttgagtgggaaaagcctgaagcctttatcatgtggttgctggtgtgtgtaattattaatgaaatgttcactcctagtcccttatgaggcttagaatttcaaccacgtgtcaggtcagacagtattataaactgtactttgctgtctgagacagcacatttgtgaatgatgcttgctgcctgccattttcaacctattctctcttaagagtgctaggtaccaaattgtgaaagtttgttttcagttatattacttttgaggctggtgaaaaatttaaatgtaactttgtgggaacactgattcatatttagaaaatgttgaatgcttttactttgctgaaaatattagaactctcttgtgacaggatacagcaaattataattaaatataaattaccagaaccagagctacctctaagtcatacttcctcaagcacaaagctctcaggcatatgagacccaccttaatgaagggtctctgatttcttgagcatcagcgagtttcagaagtgactatttttttgtactcttctagtttccttgtaactatacactttttcccattccacactgtgcttaaatgacaaagactcttctgagaagccaaattctgtccaagtattaactagagatattgttgattaaagaaaatctagaactgaagtgaaagaagagagttccagttctaatagtcttttgattaacaattcttttctgagaaatgatttttataagaaatggggtgattctttaaatgcttttcttaagttgaaggcacaacagttaatggctgtattgttgctattcygttgctgacatgtttttgataaagctttaacattcctgctactaattttggcggagagtgtttgccaggtttcaatgtgggctgcagctttttgtgctccttctctggtttgcagtgtaatgagttcataagctaaattttcagaaagaattttgtttmagattatgcctcttatctacttgagagcaacatgtcttttcaatcatgggattgacacatgaaaaataa

SEQ ID NO: 188 - DNA, 7495 bp, Homo sapiens
gagacaggcggcggcggcggcgccccagacccgaggggacgcgcgggccttgcgccgcgggagcggacggcggcggaggagaccctaggctcgcggcccgaggcgggagggctcggcttctcgactgcccgcctccgaggccgccggccgcttctctctcccagagtggccgccgcccctggagactcgccgtgacacgggcctaagccgccgccgcgggagtcctgaccgctcggacccgtcggatcaggccgggtgggagcgagcttgcgggcaggtgccgctcccggagggtgggccgcgcgcgggagagcagggaagagaaactttgccttttattgtttttagtccttaagtgcaaggaactctgtgttgggaggaaaaatgtccttcttcaatttccgtaagatcttcaagttggggagcgagaagaagaagaagcagtacgaacacgtgaagagggacctgaaccccgaagacttttgggagattataggagaactgggcgacggagcctttgggaaagtgtacaaggcccagaataaagagaccagtgttttagctgctgcaaaagtgattgacactaaatctgaagaagaacttgaagattacatggtagagattgacatattagcatcttgtgatcacccaaatatagtcaagcttctagatgccttctattatgagaacaatctttggatcctcattgaattttgtgcaggtggagcagtagatgctgtgatgcttgaacttgagagaccattaactgagtcccaaatacaagtagtttgcaagcagactttagatgcattgaactacttacatgataataagatcatccacagagatctgaaggctggcaacattctctttaccttagatggagatatcaaattggcggattttggagtrtcagctaaaaacacgaggacaattcaaagaagagattcctttattggtacaccatattggatggctcctgaagtagtcatgtgtgaaacatctaaggacagaccctatgactacaaagctgatgtttggtccctgggtatcactttaatagaaatggctgagatagaaccacctcatcatgaattaaatccaatgcgagtrctgctaaaaatagcaaaatctgagccacctacattagcacagccatccagatggtcttcaaattttaaggactttctaaagaaatgcttagaaaagaatgtggatgccaggtggactacatctcagctgctgcagcatccctttgttactgttgattccaacaaacccatccgagaattgattgcagaggcgaaggctgaagtaacagaagaagttgaagatggcaaagaggaagatgaagaggaggaaacagaaaattctctgccaatacctgcaagtaagcgtgcatcttctgaccttagtatcgccagctctgaagaagataaactttcacaaaatgcttgtattttggagtctgtctcagaaaaaacagaacgtagtaactctgaagataaactcaacagcaaaattcttaatgaaaaacccaccactgatgaacctgaaaaggctgtggaggatattaatgaacatattaccgatgctcagttagaagcaatgactgaactccatgacagaacagcagtaatcaaggagaatgaaagagagaagaggcccaagcttgaaaatctgcctgacacagaagaccaagaaactgtggacattaattcagtcagtgaaggaaaagagaataatataatgataaccttagaaacaaatattgaacataatctaaaatctgaggaagaaaaggatcaggaaaagcaacagatgtttgaaaataagcttataaaatctgaagaaattaaagatactattttgcaaacagtagatttagtttctcaagagactggagaaaaagaggcaaatattcaggcagttgatagtgaagttgggcttacaaaggaagacacccaagagaaattgggggaagacgacaaaactcaaaaagatgtgatcagcartacaagtgatgtgataggaacatrtgaggcagcagatgtggctcagaaagtggatgaagacagtgctgaggatacgcagagtaatgatgggaaagaagtggtcgaagtaggccagaaattaattaataagcccatggtgggtcctgaggctggtggtactaaggaagttcctattaaagaaatagttgaaatgaatgaaatagaagaaggtaaaaataaggaacaagcaataaacagttcagagaacataatggacatcaatgaggaaccaggaacaactgaaggtgaagaaatcactgagtcaagtagcactgaagaaatggaggtcagaagtgtggtggctgatactgaccaaaaggctttaggaagtgaagttcaggatgcttctaaagtcactactcagatagataaagagaaaaaagaaattccagtgtcaattaaaaaagagcctgaagttaytgtagtttcacagcccactgaacctcagcctgttctaatacccagtattaatatcaactctgacagtggagaaaataaagaagaaataggttctttatcaaaaactgaaactattctgccaccagaatctgagaatccaaaggaaaatgataatgattcaggcactggttccactgctgatactagcagtattgacttgaatttatccatctctagctttctaagtaaaactaaagacagtggatcgatatctttacaagaaacaagaagacaaaagaaaacattgaagaaaacacgcaaatttattgttgatggtgtagaagtgagtgtaacaacatcaaagatagttacagatagtgattccaaaactgaagaattgcggtttcttagacgtcaggaacttcgggaattaagatttcttcagaaagaagagcaaagagcccaacaacagctcaatagcaaactrcagcaacaacgagaacaaattttccggcgctttgagcaggaaatgatgagtaaaaagcgacaatatgaccaggaaattgagaatctagaaaaacagcagaaacagactatcgaacgcctggaacaagagcacacaaatcgcttgcgagatgaagccaaacgcatcaaaggagaacaagagaaagagttgtccaaatttcagaatatgctgaagaaccgaaagaaggaggaacaagagtttgttcagaaacaacagcaagaattagatggctctctgaaaaagatcatccagcagcagaaggcagagttagctaatattgagagagagtgcctgaataacaagcaacagctcatgagagctcgagaagctgcaatttgggagctcgaagaacgacacttacaagaaaaacaccagctgctcaaacagcagcttaaagatcagtatttcatgcaaagacatcagctacttaagcgccacgagaaggaaacagagcaaatgcagcgttacaatcaaagacttattgaggaattgaaaaacagacagactcaagaaagagcaagactgcccaagattcagcgcagtgaagccaagactcgaatggccatgtttaagaagagtttgagaattaactcaacagccacaccagatcaggaccgtgataaaattaaacagtttgctgcacaagaagaaaagaggcagaaaaatgagagaatggctcagcatcagaaacatgagaatcaaatgcgagatcttcagttgcagtgtgaagccaatgtccgcgaactgcatcagctgcagaatgaaaaatgccacttgttggttgagcatgagactcagaaactgaaggagttagatgaggaacatagccaagaattaaaggagtggagagagaaattgagacctaggaaaaagacactggaagaagagtttgccaggaaactacaggaacaggaagtattctttaaaatgactggggagtctgaatgccttaacccatcaacacagagccggatttccaaattttatcctattcccagcttgcattccaccggatcataacaaagggaagcattctgtgcgtgggtttggctctttcagtatgtcattctgttctcatcttctgccacagtctctcagatagctcatgaagacaatcacctgcctcaccttctaggtgttttccttttttgttttttttgttttgttttgtttttaagcaaagatgaagggaaaacgaactaagacagacgctaggccatgttggcaaagtagcatcttggtgactaaggtgactttgtatattcatcttaaaaattatgttctttagacactgctacctgaaaactgttggagaaataatgtttaaagttatttaagaaaaactgttacatcactaagtattaataaattcttcttacctgacgtaacttctcaatgcctaaattctgtagttgaagctctgctgcagagagttgggataattttcttttggtggatcagctctcataaaaaagctatgatttgctcaaatatgctgttgactcagtaaatgaatatatttttttctttaaataggaacaacctcttttaaaagagaaaaattatttcagtgatttgtcaaaacgaattacctcttttggcatgagctaataattgagggtgctaattttcttaagatagtgcctaaaacactaaatttcagtcaagtcgtaagtaggattttctttttgatcaacagggacaaaaacatctttagaattaaaaacatggttgttttggaatttttgcttctcttaccgtttgatagaaattttcatcctaaaatacatgtacaaagtttggaaagatgaaaaaaagaggtagcttttagattgcaaaytggaaatgtaaaactcatgaaatttaagcaatataggtttagctatctgtgtttattttctaaaataatacctgagctggttaaatgatttctctccatcttagctaattctgtttaaaactctgtcagaggcctgcaggctgtgagttatatttataaatatatcttcagaaattaatcttaaaagaggcattagttcagmatacttttttaaaagtttaaattaaatatttaggcacgtcagraattacttttccttattttgaaatgaggctacttatgtcttggttttattttgttccatgtttaaatcattcactttgatttgagtgggaaaagcctgaagcctttatcatgtggttgctggtgtgtgtaattattaatgaaatgttcactcctagtcccttatgaggcttagaatttcaaccacgtgtcaggtcagacagtattataaactgtactttgctgtctgagacagcacatttgtgaatgatgcttgctgcctgccattttcaacctattctctcttaagagtgctaggtaccaaattgtgaaagtttgttttcagttatattacttttgaggctggtgaaaaatttaaatgtaactttgtgggaacactgattcatatttagaaaatgtaaatgtctgtagcactttcttgmagttaatttgaaaactttggatgctgaaccttgtttgtcagtgatttagatgatttaaaaatgcatgtgtgatttgaattttataattgttttgacaagcataatttacttggacaacttcgtaggtagccttaacttctggccaagtttgttttttatataaatatatatacatatatacatattatgtatggttgtaaattcatacacttatcacatgaatgtgttactgtatacaaaactcttaatgctttattctcaaatgctgggttgaaaaatgttttgaaagccttttaaaatatatatctttataaagtaatattcaggatgatgataaaaattgtttatattgttatgataaaaatgacagtataatgttgcccagtgtatttaatgatttatttgaagagggattgggaaggaacgtcttcataccactttctcctttgaaattttcagtttattgacttttaaaaaatgaatacctcaggcagtagacattttttttctagtatcatttaattgataccctgtgcgctaaatagtgtgtggtgcctgattaatttggtctgaatatttgattctttctgttcctttcaacttgacattcagattattgactcaaggagagaggctcagagtggaatggttggcgctgtgggtaaggttggatctcccttaaaactgccttttggattcagtgtttgtgcttgagttcgctttcaaatatgaccataatcgtgtgggtgcaagactgtacagtgatacatatgtagaggtaaagcattcattttaatacttaaagttatataaatcttttcaaaaagtgttttgttataaaatacgctgtttgtacccataccagcccacctcttctgaggccctgtattcaaatagatgatagtgatctrtctttcctgcatgaagtgtaggtggcgagtgggcgaggggcgcagacttctttgaaatcgaagggtacagtcaaatctactgctgatttggttgttttgttgctgtggcagaatatgccatgaaacacatacagacttctccgaacgtgcaccctcatcagccacctcctcccctctttccctgagtgctgtgaacacagcagacctgcacacttytgcagatccagctcctacagcttggggcactaggctgcctttcctagtcctgtcaacaaccatacagtgcraattgctgaattagctgctattctatgtggagtcacattaagctttttcttatctttttctatggggaagctatagggtgggtaaggaaaaaatgttgaatgcttttactttgctgaaaatattagaactctcttgtgacaggatacagcaaattataattaaatataaattaccagaaccagagctacctctaagtcatacttcctcaagcacaaagctctcaggcatatgagacccaccttaatgaagggtctctgatttcttgagcatcagcgagtttcagaagtgactatttttttgtactcttctagtttccttgtaactatacactttttcccattccacactgtgcttaaatgacaaagactcttctgagaagccaaattctgtccaagtattaactagagatattgttgattaaagaaaatctagaactgaagtgaaagaagagagttccagttctaatagtcttttgattaacaattcttttctgagaaatgatttttataagaaatggggtgattctttaaatgcttttcttaagttgaaggcacaacagttaatggctgtattgttgctattcygttgctgacatgtttttgataaagctttaacattcctgctactaattttggcggagagtgtttgccaggtttcaatgtgggctgcagctttttgtgctccttctctggtttgcagtgtaatgagttcataagctaaattttcagaaagaattttgtttmagattatgcctcttatctacttgagagcaacatgtcttttcaatcatgggattgacacatgaaaaataa

SEQ ID NO: 189 - DNA, 6178 bp, Homo sapiens
gagacaggcggcggcggcggcgccccagacccgaggggacgcgcgggccttgcgccgcgggagcggacggcggcggaggagaccctaggctcgcggcccgaggcgggagggctcggcttctcgactgcccgcctccgaggccgccggccgcttctctctcccagagtggccgccgcccctggagactcgccgtgacacgggcctaagccgccgccgcgggagtcctgaccgctcggacccgtcggatcaggccgggtgggagcgagcttgcgggcaggtgccgctcccggagggtgggccgcgcgcgggagagcagggaagagaaactttgccttttattgtttttagtccttaagtgcaaggaactctgtgttgggaggaaaaatgtccttcttcaatttccgtaagatcttcaagttggggagcgagaagaagaagaagcagtacgaacacgtgaagagggacctgaaccccgaagacttttgggagattataggagaactgggcgacggagcctttgggaaagtgtacaaggcccagaataaagagaccagtgttttagctgctgcaaaagtgattgacactaaatctgaagaagaacttgaagattacatggtagagattgacatattagcatcttgtgatcacccaaatatagtcaagcttctagatgccttctattatgagaacaatctttggatcctcattgaattttgtgcaggtggagcagtagatgctgtgatgcttgaacttgagagaccattaactgagtcccaaatacaagtagtttgcaagcagactttagatgcattgaactacttacatgataataagatcatccacagagatctgaaggctggcaacattctctttaccttagatggagatatcaaattggcggattttggagtrtcagctaaaaacacgaggacaattcaaagaagagattcctttattggtacaccatattggatggctcctgaagtagtcatgtgtgaaacatctaaggacagaccctatgactacaaagctgatgtttggtccctgggtatcactttaatagaaatggctgagatagaaccacctcatcatgaattaaatccaatgcgagtrctgctaaaaatagcaaaatctgagccacctacattagcacagccatccagatggtcttcaaattttaaggactttctaaagaaatgcttagaaaagaatgtggatgccaggtggactacatctcagctgctgcagcatccctttgttactgttgattccaacaaacccatccgagaattgattgcagaggcgaaggctgaagtaacagaagaagttgaagatggcaaagaggaagatgaagaggaggaaacagaaaattctctgccaatacctgcaagtaagcgtgcatcttctgaccttagtatcgccagctctgaagaagataaactttcacaaaatgcttgtattttggagtctgtctcagaaaaaacagaacgtagtaactctgaagataaactcaacagcaaaattcttaatgaaaaacccaccactgatgaacctgaaaaggctgtggaggatattaatgaacatattaccgatgctcagttagaagcaatgactgaactccatgacagaacagcagtaatcaaggagaatgaaagagagaagaggcccaagcttgaaaatctgcctgacacagaagaccaagaaactgtggacattaattcagtcagtgaaggaaaagagaataatataatgataaccttagaaacaaatattgaacataatctaaaatctgaggaagaaaaggatcaggaaaagcaacagatgtttgaaaataagcttataaaatctgaagaaattaaagatactattttgcaaacagtagatttagtttctcaagagactggagaaaaagaggcaaatattcaggcagttgatagtgaagttgggcttacaaaggaagacacccaagagaaattgggggaagacgacaaaactcaaaaagatgtgatcagcartacaagtgatgtgataggaacatrtgaggcagcagatgtggctcagaaagtggatgaagacagtgctgaggatacgcagagtaatgatgggaaagaagtggtcgaagtaggccagaaattaattaataagcccatggtgggtcctgaggctggtggtactaaggaagttcctattaaagaaatagttgaaatgaatgaaatagaagaaggtaaaaataaggaacaagcaataaacagttcagagaacataatggacatcaatgaggaaccaggaacaactgaaggtgaagaaatcactgagtcaagtagcactgaagaaatggaggtcagaagtgtggtggctgatactgaccaaaaggctttaggaagtgaagttcaggatgcttctaaagtcactactcagatagataaagagaaaaaagaaattccagtgtcaattaaaaaagagcctgaagttaytgtagtttcacagcccactgaacctcagcctgttctaatacccagtattaatatcaactctgacagtggagaaaataaagaagaaataggttctttatcaaaaactgaaactattctgccaccagaatctgagaatccaaaggaaaatgataatgattcaggcactggttccactgctgatactagcagtattgacttgaatttatccatctctagctttctaagtaaaactaaagacagtggatcgatatctttacaagaaacaagaagacaaaagaaaacattgaagaaaacacgcaaatttattgttgatggtgtagaagtgagtgtaacaacatcaaagatagttacagatagtgattccaaaactgaagaattgcggtttcttagacgtcaggaacttcgggaattaagatttcttcagaaagaagagcaaagagcccaacaacagctcaatagcaaactrcagcaacaacgagaacaaattttccggcgctttgagcaggaaatgatgagtaaaaagcgacaatatgaccaggaaattgagaatctagaaaaacagcagaaacagactatcgaacgcctggaacaagagcacacaaatcgcttgcgagatgaagccaaacgcatcaaaggagaacaagagaaagagttgtccaaatttcagaatatgctgaagaaccgaaagaaggaggaacaagagtttgttcagaaacaacagcaagaattagatggctctctgaaaaagatcatccagcagcagaaggcagagttagctaatattgagagagagtgcctgaataacaagcaacagctcatgagagctcgagaagctgcaatttgggagctcgaagaacgacacttacaagaaaaacaccagctgctcaaacagcagcttaaagatcagtatttcatgcaaagacatcagctacttaagcgccacgagaaggaaacagagcaaatgcagcgttacaatcaaagacttattgaggaattgaaaaacagacagactcaagaaagagcaagactgcccaagattcagcgcagtgaagccaagactcgaatggccatgtttaagaagagtttgagaattaactcaacagccacaccagatcaggaccgtgataaaattaaacagtttgctgcacaagaagaaaagaggcagaaaaatgagagaatggctcagcatcagaaacatgagaatcaaatgcgagatcttcagttgcagtgtgaagccaatgtccgcgaactgcatcagctgcagaatgaaaaatgccacttgttggttgagcatgagactcagaaactgaaggagttagatgaggaacatagccaagaattaaaggagtggagagagaaattgagacctaggaaaaagacactggaagaagagtttgccaggaaactacaggaacaggaagtattctttaaaatgactggggagtctgaatgccttaacccatcaacacagagccggatttccaaattttatcctattcccagcttgcattccaccggatcataacaaagggaagcattctgtgcgtgggtttggctctttcagtatgtcattctgttctcatcttctgccacagtctctcagatagctcatgaagacaatcacctgcctcaccttctaggtgttttccttttttgttttttttgttttgttttgtttttaagcaaagatgaagggaaaacgaactaagacagacgctaggccatgttggcaaagtagcatcttggtgactaaggtgactttgtatattcatcttaaaaattatgttctttagacactgctacctgaaaactgttggagaaataatgtttaaagttatttaagaaaaactgttacatcactaagtattaataaattcttcttacctgacgtaacttctcaatgcctaaattctgtagttgaagctctgctgcagagagttgggataattttcttttggtggatcagctctcataaaaaagctatgatttgctcaaatatgctgttgactcagtaaatgaatatatttttttctttaaataggaacaacctcttttaaaagagaaaaattatttcagtgatttgtcaaaacgaattacctcttttggcatgagctaataattgagggtgctaattttcttaagatagtgcctaaaacactaaatttcagtcaagtcgtaagtaggattttctttttgatcaacagggacaaaaacatctttagaattaaaaacatggttgttttggaatttttgcttctcttaccgtttgatagaaattttcatcctaaaatacatgtacaaagtttggaaagatgaaaaaaagaggtagcttttagattgcaaaytggaaatgtaaaactcatgaaatttaagcaatataggtttagctatctgtgtttattttctaaaataatacctgagctggttaaatgatttctctccatcttagctaattctgtttaaaactctgtcagaggcctgcaggctgtgagttatatttataaatatatcttcagaaattaatcttaaaagaggcattagttcagmatacttttttaaaagtttaaattaaatatttaggcacgtcagraattacttttccttattttgaaatgaggctacttatgtcttggttttattttgttccatgtttaaatcattcactttgatttgagtgggaaaagcctgaagcctttatcatgtggttgctggtgtgtgtaattattaatgaaatgttcactcctagtcccttatgaggcttagaatttcaaccacgtgtcaggtcagacagtattataaactgtactttgctgtctgagacagcacatttgtgaatgatgcttgctgcctgccattttcaacctattctctcttaagagtgctaggtaccaaattgtgaaagtttgttttcagttatattacttttgaggctggtgaaaaatttaaatgtaactttgtgggaacactgattcatatttagaaaatgttgaatgcttttactttgctgaaaatattagaactctcttgtgacaggatacagcaaattataattaaatataaattaccagaaccagagctacctctaagtcatacttcctcaagcacaaagctctcaggcatatgagacccaccttaatgaagggtctctgatttcttgagcatcagcgagtttcagaagtgactatttttttgtactcttctagtttccttgtaactatacactttttcccattccacactgtgcttaaatgacaaagactcttctgagaagccaaattctgtccaagtattaactagagatattgttgattaaagaaaatctagaactgaagtgaaagaagagagttccagttctaatagtcttttgattaacaattcttttctgagaaatgatttttataagaaatggggtgattctttaaatgcttttcttaagttgaaggcacaacagttaatggctgtattgttgctattcygttgctgacatgtttttgataaagctttaacattcctgctactaattttggcggagagtgtttgccaggtttcaatgtgggctgcagctttttgtgctccttctctggtttgcagtgtaatgagttcataagctaaattttcagaaagaattttgtttmagattatgcctcttatctacttgagagcaacatgtcttttcaatcatgggattgacacatgaaaaataa

SEQ ID NO: 190 - DNA, 5988 bp, Homo sapiens
gggccttgcgccgcgggagcggacggcggcggaggagaccctaggctcgcggcccgaggcgggagggctcggcttctcgactgcccgcctccgaggccgccggccgcttctctctcccagagtggccgccgcccctggagactcgccgtgacacgggcctaagccgccgccgcgggagtcctgaccgctcggacccgtcggatcaggccgggtgggagcgagcttgcgggcaggtgccgctcccggagggtgggccggaggcgaggcgcccaccgcgcggctcgcgggccgggctcggcggaggggccgctcgcgcagcacccccaccgcgggccggagcccgggtcgccgccccgccttctcccgggaccgcccggccggagctgcgggggccgagggacgccgcgcccgccgccgccagccgggctcgcgcgggagagcagggaagagaaactttgccttttattgtttttagtccttaagtgcaaggaactctgtgttgggaggaaaaatgtccttcttcagtttccgtaagatcttcaagttggggagcgagaagaagaagaagcagtacgaacacgtgaagagggacctgaaccccgaagacttttgggagattataggagaactgggcgacggagcctttgggaaagtgtacaaggcccagaataaagagaccagtgttttagctgctgcaaaagtgattgacactaaatctgaagaagaacttgaagattacatggtagagattgacatattagcatcttgtgatcacccaaatatagtcaagcttctagatgccttctattatgagaacaatctttggatcctcattgaattttgtgcaggtggagcagtagatgctgtgatgcttgaacttgagagaccattaactgagtcccaaatacaagtagtttgcaagcagactttagatgcattgaactacttacatgataataagatcatccacagagatctgaaggctggcaacattctctttaccttagatggagatatcaaattggcggattttggagtrtcagctaaaaacacgaggacaattcaaagaagagattcctttattggtacaccatattggatggctcctgaagtagtcatgtgtgaaacatctaaggacagaccctatgactacaaagctgatgtttggtccctgggtatcactttaatagaaatggctgagatagaaccacctcatcatgaattaaatccaatgcgagtrctgctaaaaatagcaaaatctgagccacctacattagcacagccatccagatggtcttcaaattttaaggactttctaaagaaatgcttagaaaagaatgtggatgccaggtggactacatctcagctgctgcagcatccctttgttactgttgattccaacaaacccatccgagaattgattgcagaggcgaaggctgaagtaacagaagaagttgaagatggcaaagaggaagatgaagaggaggaaacagaaaattctctgccaatacctgcaagtaagcgtgcatcttctgaccttagtatcgccagctctgaagaagataaactttcacaaaatgcttgtattttggagtctgtctcagaaaaaacagaacgtagtaactctgaagataaactcaacagcaaaattcttaatgaaaaacccaccactgatgaacctgaaaaggctgtggaggatattaatgaacatattaccgatgctcagttagaagcaatgactgaactccatgacagaacagcagtaatcaaggagaatgaaagagagaagaggcccaagcttgaaaatctgcctgacacagaagaccaagaaactgtggacattaattcagtcagtgaaggaaaagagaataatataatgataaccttagaaacaaatattgaacataatctaaaatctgaggaagaaaaggatcaggaaaagcaacagatgtttgaaaataagcttataaaatctgaagaaattaaagatactattttgcaaacagtagatttagtttctcaagagactggagaaaaagaggcaaatattcaggcagttgatagtgaagttgggcttacaaaggaagacacccaagagaaattgggggaagacgacaaaactcaaaaagatgtgatcagcartacaagtgatgtgataggaacatrtgaggcagcagatgtggctcagaaagtggatgaagacagtgctgaggatacgcagagtaatgatgggaaagaagtggtcgaagtaggccagaaattaattaataagcccatggtgggtcctgaggctggtggtactaaggaagttcctattaaagaaatagttgaaatgaatgaaatagaagaaggtaaaaataaggaacaagcaataaacagttcagagaacataatggacatcaatgaggaaccaggaacaactgaaggtgaagaaatcactgagtcaagtagcactgaagaaatggaggtcagaagtgtggtggctgatactgaccaaaaggctttaggaagtgaagttcaggatgcttctaaagtcactactcagatagataaagagaaaaaagaaattccagtgtcaattaaaaaagagcctgaagttaytgtagtttcacagcccactgaacctcagcctgttctaatacccagtattaatatcaactctgacagtggagaaaataaagaagaaataggttctttatcaaaaactgaaactattctgccaccagaatctgagaatccaaaggaaaatgataatgattcaggcactggttccactgctgatactagcagtattgacttgaatttatccatctctagctttctaagtaaaactaaagacagtggatcgatatctttacaagaaacaagaagacaaaagaaaacattgaagaaaacacgcaaatttattgttgatggtgtagaagtgagtgtaacaacatcaaagatagttacagatagtgattccaaaactgaagaattgcggtttcttagacgtcaggaacttcgggaattaagatttcttcagaaagaagagcaaagagcccaacaacagctcaatagcaaactrcagcaacaacgagaacaaattttccggcgctttgagcaggaaatgatgagtaaaaagcgacaatatgaccaggaaattgagaatctagaaaaacagcagaaacagactatcgaacgcctggaacaagagcacacaaatcgcttgcgagatgaagccaaacgcatcaaaggagaacaagagaaagagttgtccaaatttcagaatatgctgaagaaccgaaagaaggaggaacaagagtttgttcagaaacaacagcaagaattagatggctctctgaaaaagatcatccagcagcagaaggcagagttagctaatattgagagagagtgcctgaataacaagcaacagctcatgagagctcgagaagctgcaatttgggagctcgaagaacgacacttacaagaaaaacaccagctgctcaaacagcagcttaaagatcagtatttcatgcaaagacatcagctacttaagcgccacgagaaggaaacagagcaaatgcagcgttacaatcaaagacttattgaggaattgaaaaacagacagactcaagaaagagcaagactgcccaagattcagcgcagtgaagccaagactcgaatggccatgtttaagaagagtttgagaattaactcaacagccacaccagatcaggaccgtgataaaattaaacagtttgctgcacaagaagaaaagaggcagaaaaatgagagaatggctcagcatcagaaacatgagaatcaaatgcgagatcttcagttgcagtgtgaagccaatgtccgcgaactgcatcagctgcagaatgaaaaatgccacttgttggttgagcatgagactcagaaactgaaggagttagatgaggaacatacaagaattaaaggagtggagagagaaattgagacctaggaaaaagacactggaagaagagtttgccaggaaactacaggaacaggaagtattctttaaaatgactggggagtctgaatgccttaacccatcaacacagagccggatttccaaattttatcctattcccagcttgcattccaccggatcataacaaagggaagcattctgtgcgtgggtttggctctttcagtatgtcattctgttctcatcttctgccacagtctctcagatagctcatgaagacaatcacctgcctcaccttctaggtgttttccttttttgttttttttgttttgttttgtttttaagcaaagatgaagggaaaacgaactaagacagacgctaggccatgttggcaaagtagcatcttggtgactaaggtgactttgtatattcatcttaaaaattatgttctttagacactgctacctgaaaactgttggagaaataatgtttaaagttatttaagaaaaactgttacatcactaagtattaataaattcttcttacctgacgtaacttctcaatgcctaaattctgtagttgaagctctgctgcagagagttgggataattttcttttggtggatcagctctcataaaaaagctatgatttgctcaaatatgctgttgactcagtaaatgaatatatttttttttttaaataggaacaacctcttttaaaagagaaaaattatttcagtgatttgtcaaaacgaattacctcttttggcatgagctaataattgagggtgctaattttcttaagatagtgcctaaaacactaaatttcagtcaagtcgtaagtaggattttctttttgatcaacagggacaaaaacatctttagaattaaaaacatggttgttttggaatttttgcttctcttaccgtttgatagaaattttcatcctaaaatacatgtacaaagtttggaaagatgaaaaaaagaggtagcttttagattgcaaaytggaaatgtaaaactcatgaaatttaagcaatataggtttagctatctgtgtttattttctaaaataatacctgagctggttaaatgatttctctccatcttagctaattctgtttaaaactctgtcagaggcctgcaggctgtgagttatatttataaatatatcttcagaaattaatcttaaaagaggcattagttcagmatacttttttaaaagtttaaattaaatatttaggcacgtcagraattacttttccttattttgaaatgaggctacttatgtcttggttttattttgttccatgtttaaatcattcagtttgatttgagtgggaaaagcctgaagcctttatcatgtggttgctggtgtgtgtaattattaatgaaatgttcactcctagtcccttatgaggcttagaatttcaaccacgtgtcaggtcagacagtattataaactgtactttgctgtctgagacagcacatttgtgaatgatgcttgctgcctgccattttcaacctattctctcttaagagtgctaggtaccaaattgtgaaagtttgttttcagttatattacttttgaggctggtgaaaaatttaaatgtaactttgtgggaacactgattcatatttagaaaatgtaaatgtctgtagcactttcttgmagttaatttgaaaactttggatgctgaaccttgtttgtcagtgatttagatgatttaaaaatgcatgtgtgatttgaattttataattgttttgacaagcataatttacttggacaacttcgtaggtagccttaacttctggccaagtttgttttttatataaatatatatacatatatacatattatgtatggttgtaaattcatacacttatcacatgaatgtgttactgtatacaaaactcttaatgctttattctcaaatgctgggttgaaaaatgttttgaaagccttttaaaatatatatctttataaagtaatattcaggatgatgataaaaattgtttatattgttatgataaaaatgacagtataatgtt

SEQ ID NO: 191 - DNA, 3197 bp, Homo sapiens
cacacaggtgtgtgtctggggaagagacttacagaagtggagttgctgagtcaaagttgtggtggtggctgccctttcaagaagctgggtcccacrggccagcaggggctctcaggcagagcctgaatgtgctttcgtcttctcttccagatctaaccatgagctaccctggctatcccccgcccccaggtggctacccaccagctgcaccaggtggtggtccctggggaggtgctgcctaccctcctccgcccagcatgccccccatcgggctggataaygtggccacctatgcggggcagttcaaccaggactatctctcgggaatggcggccaacatgtctgggacatttggaggagccaacatgcccaacctgtaccctggggcccctggggctggctacccaccagtgccccctggcggctttgggcagcccccctctgcccagcagcctgttcctccctatgggatgtatccacccccaggaggaaacccaccctccaggatgccctcatatccgccatacccaggggcccctgtgccgggycagcccatgccaccccccggacagcagcccccaggggcctaccctgggcagccaccagtgacctaycctggtcagcctccagtgccactccctgggcagcagcagccagtgccgagctacccaggatacccggggtctggractgtcacccccgctgtgcccccaacccagtttggaagccraggcaccatcactgatgctcccggctttgaccccctgcgagatgccgaggtcctgcggaaggccatgaaaggcttcgggacggatgagcaggccatcatygactgcctggggagtygctccaacaagcagcggcagcagatcctactttccttcaagacggcttacggcaaggatttgatcaaagatctgaaatctgaactgtcaggaaactttgagaagacaatcttggctctgatgaagaccccagtcctctttgacatttatgagataaaggaagccatcaagggggttggcactgatgaagcctgcctgattgagatcctcgcttcccgcagcaatgagcacatccgagaattaaacagagcctacaaagcagaattcaaaaagaccctggaagaggccattcgaagcgacacatcagggcacttccagcggctcctcatctctctctctcagggaaaccgtgatgaaagcacaaacgtggacatgtcactcgcccagagagatgcccaggagctgtatgcggccgggragaaccgcctgggaacagacgagtccaagttcaatgcggttctgtgctcccggagccgggcccacctggtagcagttttcaatgagtaccagagaatgacaggccgggacattgagaagagcatctgccgggagatgtccggggacctggaggagggcatgctggccgtggtgaaatgtctcaagaataccccagccttctttgcggagaggctcaacaaggccatgaggggggcaggaacaaaggaccggaccctgattcgcrtcatggtgtctcgcagcgagaccgacctcctggacatcagatcagagtataagcggatgtacggcaagtcgctgtaccacgacatctcgggagatacttcaggggattaccggaagattctgctgaagatctgtggtggcaatgactgaacagtgactggtggctcacttctgcccacctgccggcaacaccagtgccaggaaaaggccaaaagaatgtctgtttctaamaaatccacaaatagccccgagattcaccgtcctagagcttaggyctgtcttccacccctcctgacccgtatagtgtgccacaggacctgggtcggtctagaactctctcaggatgccttttctaccccatccctcacagcctcttgctgctaaaatagatgtttcatttttctgactcatgcaatcattcccctttgcctgtggctaagacttggcttcatttcgtcatgtaattgtatatttttatttggaggcatattttcttttcttacagtcattgccagacagaggcatacaagtctgtttgctgcatacacatttctggtgagggcgactgggtggktgaagcaccgtgtcctcgctgaggagagaaagggaggcgtgcctgagarggtagcctgtgcatctggtgagtgtgtcacgagctttgttactgccaaactcactcctttttagaaaaaacaaaaaaaaagggccagaaagtcattccttccatcttccttgcagaaaccacgagaacaaagccagttccctgtcagtgacagggcttcttgtaatttgtggtatgtgccttaaacctgaatgtctgtagccaaaacttgtttccacattaagagtcagccagctctggaatggtctggaaatgtcttcctggtaccaacttgttttcttctgcttgattctgccctgtggctcagaggtctggccttatcagccagtgaaagttcatgtaaccttacrtagagatttgtgtgcaggaaaccctgagcatacactagtttgcagggactcrtaaggacatgggaagggaggttcccgaaatccaggcaggaggcccagacacctgaaaggcaaagggatcttggttggttgcaggtgcagtgaagtccactgaaggtgtggtgcgaagaatgcagtccttcacccaggtcccaggagggaagaagggtgtgtgctaattcctggtgcccctcggcgggggccagagagaaggatggggacaacccagagagtcacaagaccagtgcctcccctcagggtgcctccaggctgaaaggggctcctggctctggtctctggggaccctgtgcccgttggttggtggtgtgagggaagagaatccataagagagtttctgagaattatggtgtcatgtccagaagctagagcttaccttgcatcaggggtctccacccactccttttccaacctcctgcgttgaggtttagaaaagagagaatcgactaggcactatggctcacgcctgtaatccaaggactttgggaagctgaggtgagaggatcacttgagctcaggagttcaagactagcctagccaacagcgagacccctgtctctactaaaaaatttggccaggcgtggtggctcacggctgtaatcccagcactttgggaggtgaggcgggcagatcacctgaggt

SEQ ID NO: 192 - DNA, 3114 bp, Homo sapiens
ctgacggctgctgcgcccgcggctccccagtgccccgagtgccccgcgggccccgcgagcgggagtgggacccagcccctaggcagaacccaggcgccgcgcccgggacgcccgcggagagagccactcccgcccacgtcccatttcgcccctcgcgtccagatctaaccatgagctaccctggctatcccccgcccccaggtggctacccaccagctgcaccaggtggtggtccctggggaggtgctgcctaccctcctccgcccagcatgccccccatcgggctggataaygtggccacctatgcggggcagttcaaccaggactatctctcgggaatggcggccaacatgtctgggacatttggaggagccaacatgcccaacctgtaccctggggcccctggggctggctacccaccagtgccccctggcggctttgggcagcccccctctgcccagcagcctgttcctccctatgggatgtatccacccccaggaggaaacccaccctccaggatgccctcatatccgccatacccaggggcccctgtgccgggycagcccatgccaccccccggacagcagcccccaggggcctaccctgggcagccaccagtgacctaycctggtcagcctccagtgccactccctgggcagcagcagccagtgccgagctacccaggatacccggggtctggractgtcacccccgctgtgcccccaacccagtttggaagccraggcaccatcactgatgctcccggctttgaccccctgcgagatgccgaggtcctgcggaaggccatgaaaggcttcggatttgatcaaagatctgaaatctgaactgtcaggaaactttgagaagacaatcttggctctgatgaagaccccagtcctctttgacatttatgagataaaggaagccatcaagggggttggcactgatgaagcctgcctgattgagatcctcgcttcccgcagcaatgagcacatccgagaattaaacagagcctacaaagcagaattcaaaaagaccctggaagaggccattcgaagcgacacatcagggcacttccagcggctcctcatctctctctctcagggaaaccgtgatgaaagcacaaacgtggacatgtcactcgcccagagagatgcccaggagctgtatgcggccgggragaaccgcctgggaacagacgagtccaagttcaatgcggttctgtgctcccggagccgggcccacctggtagcagttttcaatgagtaccagagaatgacaggccgggacattgagaagagcatctgccgggagatgtccggggacctggaggagggcatgctggccgtggtgaaatgtctcaagaataccccagccttctttgcggagaggctcaacaaggccatgaggggggcaggaacaaaggaccggaccctgattcgcrtcatggtgtctcgcagcgagaccgacctcctggacatcagatcagagtataagcggatgtacggcaagtcgctgtaccacgacatctcgggagatacttcaggggattaccggaagattctgctgaagatctgtggtggcaatgactgaacagtgactggtggctcacttctgcccacctgccggcaacaccagtgccaggaaaaggccaaaagaatgtctgtttctaamaaatccacaaatagccccgagattcaccgtcctagagcttaggyctgtcttccacccctcctgacccgtatagtgtgccacaggacctgggtcggtctagaactctctcaggatgccttttctaccccatccctcacagcctcttgctgctaaaatagatgtttcatttttctgactcatgcaatcattcccctttgcctgtggctaagacttggcttcatttcgtcatgtaattgtatatttttatttggaggcatattttcttttcttacagtcattgccagacagaggcatacaagtctgtttgctgcatacacatttctggtgagggcgactgggtggktgaagcaccgtgtcctcgctgaggagagaaagggaggcgtgcctgagarggtagcctgtgcatctggtgagtgtgtcacgagctttgttactgccaaactcactcctttttagaaaaaacaaaaaaaaagggccagaaagtcattccttccatcttccttgcagaaaccacgagaacaaagccagttccctgtcagtgacagggcttcttgtaatttgtggtatgtgccttaaacctgaatgtctgtagccaaaacttgtttccacattaagagtcagccagctctggaatggtctggaaatgtcttcctggtaccaacttgttttcttctgcttgattctgccctgtggctcagaggtctggccttatcagccagtgaaagttcatgtaaccttacrtagagatttgtgtgcaggaaaccctgagcatacactagtttgcagggactcrtaaggacatgggaagggaggttcccgaaatccaggcaggaggcccagacacctgaaaggcaaagggatcttggttggttgcaggtgcagtgaagtccactgaaggtgtggtgcgaagaatgcagtccttcacccaggtcccaggagggaagaagggtgtgtgctaattcctggtgcccctcggcgggggccagagagaaggatggggacaacccagagagtcacaagaccagtgcctcccctcagggtgcctccaggctgaaaggggctcctggctctggtctctggggaccctgtgcccgttggttggtggtgtgagggaagagaatccataagagagtttctgagaattatggtgtcatgtccagaagctagagcttaccttgcatcaggggtctccacccactccttttccaacctcctgcgttgaggtttagaaaagagagaatcgactaggcactatggctcacgcctgtaatccaaggactttgggaagctgaggtgagaggatcacttgagctcaggagttcaagactagcctagccaacagcgagacccctgtctctactaaaaaatttggccaggcgtggtggctcacggctgtaatcccagcactttgggaggtgaggcgggcagatcacctgaggt

SEQ ID NO: 193 - DNA, 3273 bp, Homo sapiens
tgcctctggcacctggggcagccgcgcccgcggagttttccgcccggcgctgacggctgctgcgcccgcggctccccagtgccccgagtgccccgcgggccccgcgagcgggagtgggacccagcccctaggcagaacccaggcgccgcgcccgggacgcccgcggagagagccactcccgcccacgtcccatttcgcccctcgcgtccggagtccccgtggccagatctaaccatgagctaccctggctatcccccgcccccaggtggctacccaccagctgcaccaggtggtggtccctggggaggtgctgcctaccctcctccgcccagcatgccccccatcgggctggataaygtggccacctatgcggggcagttcaaccaggactatctctcgggaatggcggccaacatgtctgggacatttggaggagccaacatgcccaacctgtaccctggggcccctggggctggctacccaccagtgccccctggcggctttgggcagcccccctctgcccagcagcctgttcctccctatgggatgtatccacccccaggaggaaacccaccctccaggatgccctcatatccgccatacccaggggcccctgtgccgggycagcccatgccaccccccggacagcagcccccaggggcctaccctgggcagccaccagtgacctaycctggtcagcctccagtgccactccctgggcagcagcagccagtgccgagctacccaggatacccggggtctggractgtcacccccgctgtgcccccaacccagtttggaagccraggcaccatcactgatgctcccggctttgaccccctgcgagatgccgaggtcctgcggaaggccatgaaaggcttcgggacggatgagcaggccatcatygactgcctggggagtygctccaacaagcagcggcagcagatcctactttccttcaagacggcttacggcaaggatttgatcaaagatctgaaatctgaactgtcaggaaactttgagaagacaatcttggctctgatgaagaccccagtcctctttgacatttatgagataaaggaagccatcaagggggttggcactgatgaagcctgcctgattgagatcctcgcttcccgcagcaatgagcacatccgagaattaaacagagcctacaaagcagaattcaaaaagaccctggaagaggccattcgaagcgacacatcagggcacttccagcggctcctcatctctctctctcagggaaaccgtgatgaaagcacaaacgtggacatgtcactcgcccagagagatgcccaggagctgtatgcggccgggragaaccgcctgggaacagacgagtccaagttcaatgcggttctgtgctcccggagccgggcccacctggtagcagttttcaatgagtaccagagaatgacaggccgggacattgagaagagcatctgccgggagatgtccggggacctggaggagggcatgctggccgtggtgaaatgtctcaagaataccccagccttctttgcggagaggctcaacaaggccatgaggggggcaggaacaaaggaccggaccctgattcgcrtcatggtgtctcgcagcgagaccgacctcctggacatcagatcagagtataagcggatgtacggcaagtcgctgtaccacgacatctcgggagatacttcaggggattaccggaagattctgctgaagatctgtggtggcaatgactgaacagtgactggtggctcacttctgcccacctgccggcaacaccagtgccaggaaaaggccaaaagaatgtctgtttctaamaaatccacaaatagccccgagattcaccgtcctagagcttaggyctgtcttccacccctcctgacccgtatagtgtgccacaggacctgggtcggtctagaactctctcaggatgccttttctaccccatccctcacagcctcttgctgctaaaatagatgtttcatttttctgactcatgcaatcattcccctttgcctgtggctaagacttggcttcatttcgtcatgtaattgtatatttttatttggaggcatattttcttttcttacagtcattgccagacagaggcatacaagtctgtttgctgcatacacatttctggtgagggcgactgggtggktgaagcaccgtgtcctcgctgaggagagaaagggaggcgtgcctgagarggtagcctgtgcatctggtgagtgtgtcacgagctttgttactgccaaactcactcctttttagaaaaaacaaaaaaaaagggccagaaagtcattccttccatcttccttgcagaaaccacgagaacaaagccagttccctgtcagtgacagggcttcttgtaatttgtggtatgtgccttaaacctgaatgtctgtagccaaaacttgtttccacattaagagtcagccagctctggaatggtctggaaatgtcttcctggtaccaacttgttttcttctgcttgattctgccctgtggctcagaggtctggccttatcagccagtgaaagttcatgtaaccttacrtagagatttgtgtgcaggaaaccctgagcatacactagtttgcagggactcrtaaggacatgggaagggaggttcccgaaatccaggcaggaggcccagacacctgaaaggcaaagggatcttggttggttgcaggtgcagtgaagtccactgaaggtgtggtgcgaagaatgcagtccttcacccaggtcccaggagggaagaagggtgtgtgctaattcctggtgcccctcggcgggggccagagagaaggatggggacaacccagagagtcacaagaccagtgcctcccctcagggtgcctccaggctgaaaggggctcctggctctggtctctggggaccctgtgcccgttggttggtggtgtgagggaagagaatccataagagagtttctgagaattatggtgtcatgtccagaagctagagcttaccttgcatcaggggtctccacccactccttttccaacctcctgcgttgaggtttagaaaagagagaatcgactaggcactatggctcacgcctgtaatccaaggactttgggaagctgaggtgagaggatcacttgagctcaggagttcaagactagcctagccaacagcgagacccctgtctctactaaaaaatttggccaggcgtggtggctcacggctgtaatcccagcactttgggaggtgaggcgggcagatcacctgaggt

SEQ ID NO: 194 - DNA, 1080 bp, Homo sapiens
gttgaagaaagaggatctggctgaaagacccgcaactttyacttgttgagaacctttagccagcgccggcgtgcatgtgttttagttttattctttttcccttgcccccaaagccgtggagtacctgctgttgctctcatgcctcttgccaacagtggcatctgctcagtgtagccatcaagaatttgaatgtcaatatctttgccttgaaatgaatggaaaagtatttgtcactcagcggcaatcattcttcaaataaaaggtcactggaaggactgagcgcattcaggagcctggaggaactcatcttggacaacaatcagctgggggacgaccttgtgttgccagggttacccagactgcataccttaaccctcaacaagaaccgaatcactgatttggagaacctgctggatcacttggcagaagtgacaccagctctggagtacctcagtctgctgggcaacgtggcctgtcccaacgagctggtcagcytggaaaaggatgaggaagactacaagagatacagatgctttgttctgtacaagctgcccaacttgaaatttctggatgcccagaaagtaaccagacaagaacgagaggaggcgttggtcagaggagtcttcatgaaggtggtgaagcccaaggcttctagtgaggacgttgccagctycccggagcgccactacacgcccttgccttctgcttccagggaactcaccagtcaccaagatgaagtttcattcttgtcgcccaggctggagtgcagtggtgcgttctcggctcactgcaacctccgcctccccggctcaagcgattctcctgtctcagcctcccaagtagctggaaatacaggcatgtgccaccatgcccagctaattttgtatttttagtaaagatggagtttcttcatgttggccaggtgtcctggggaagtgtcgctacgtttactatgggaaaaactcagagggcaacaggtttatccgagatgaccagctctgaagccaacttctgtataccttcacccatttcatgaaaataaawtcaaaagggaaatcaaaaataaagaaaacgctaaag

SEQ ID NO: 195 - DNA, 890 bp, Homo sapiens
gttgaagaaagaggatctggctgaaagacccgcaactttyacttgttgagaacctttagccagcgccggcgtgcatgtgttttagttttattctttttcccttgcccccaaagccgtggagtacctgctgttgctctcatgcctcttgccaacagtggcatctgctcagtgtagccatcaagaatttgaatgtcaatatctttgccttgaaatgaatggaaaagtatttgtcactcagcggcaatcattcttcaaataaaaggtcactggaaggactgagcgcattcaggagcctggaggaactcatcttggacaacaatcagctgggggacgaccttgtgttgccagggttacccagactgcataccttaaccctcaacaagaaccgaatcactgatttggagaacctgctggatcacttggcagaagtgacaccagctctggagtacctcagtctgctgggcaacgtggcctgtcccaacgagctggtcagcytggaaaaggatgaggaagactacaagagatacagatgctttgttctgtacaagctgcccaacttgaaatttctggatgcccagaaagtaaccagacaagaacgagaggaggcgttggtcagaggagtcttcatgaaggtggtgaagcccaaggcttctagtgaggacgttgccagctycccggagcgccactacacgcccttgccttctgcttccagggaactcaccagtcaccaaggtgtcctggggaagtgtcgctacgtttactatgggaaaaactcagagggcaacaggtttatccgagatgaccagctctgaagccaacttctgtataccttcacccatttcatgaaaataaawtcaaaagggaaatcaaaaataaagaaaacgctaaag

SEQ ID NO: 196 - DNA, 1014 bp, Homo sapiens
gttgaagaaagaggatctggctgaaagacccgcaactttyacttgttgagaacctttagccagcgccggcgtgcatgtgttttagttttattctttttcccttgcccccaaagccgtggagtacctgctgttgctctcatgcctcttgccaacagtggcatctgctcagtgtagccatcaagaatttgaatgtcaatatctttgccttgaaatgaatggaaaagtatttgtcactcagcggcaatcattcttcaaataaaaggtcactggaaggactgagcgcattcaggagcctggaggaactcatcttggacaacaatcagctgggggacgaccttgtgttgccagggttacccagactgcataccttaaccctcaacaagaaccgaatcactgatttggagaacctgctggatcacttggcagaagtgacaccagctctggagtacctcagtctgctgggcaacgtggcctgtcccaacgagctggtcagcytggaaaaggatgaggaagactacaagagatacagatgctttgttctgtacaagctgcccaacttgaaatttctggatgcccagaaagtaaccagacaagaacgagaggaggcgttggtcagaggagtcttcatgaaggtggtgaagcccaaggcttctagtgaggacgttgccagctycccggagcgccactacacgcccttgccttctgcttccagggaactcaccagtcaccaagatttaaatattccagtgttgagaatccacagtaaacttgctgtactctgtcactgttgaggaatgggacattcacatgaatcaaatatgctggtaaataaagaaatatggagaaaaatatagaggtgtcctggggaagtgtcgctacgtttactatgggaaaaactcagagggcaacaggtttatccgagatgaccagctctgaagccaacttctgtataccttcacccatttcatgaaaataaawtcaaaagggaaatcaaaaataaagaaaacgctaaag

SEQ ID NO: 197 - DNA, 7083 bp, Homo sapiens
atgccctcagactcagaaagcagcagctccctcagcagtgtgggcactaccgggaaggcgccgtccccaccacccctcctcactgaccrgcaagtgaatgagaaggtggagaacctctccattcagctgcggctgatgacccgggagagaaacgagctccgcaagcgcctggcstttgctacgcatggcacggcctttgacaagaggccctaccacaggctgaatcctgactatgagaggctgaagatccagtgcgtgcgagccatgtcggacctgcagagcctgcagaaccagcacaccaacgccttgaagaggtgtgaggaggtggccaaggagactgacttctaccacacactccacagccggctcctgagtgaccagactcggctgaaggatgacgtggacatgctgaggcgggagaatgggcagctgctgcgggagcgaaacctgctgcagcagtcatgggaggacatgaagcggctccacgaggaggaccagaaggagatcggtgacctccgtgcccagcagcagcaggtgttgaagcacaacgggtcatccgagattctcaacaaactrtatgacacggccatggacaagttggaggtggtcaagaaggactatgaygcccttcggaagaggtacagtgagaaagtcgccatccacaatgcagacctgagccgcctggagcagctgggggaggagaaccagcggttgctgaagcagacagagatgctgacccagcagagggacacggccatccagctgcagcaccagtgcgccctytccctgaggaggtttgaggcgatccaccatgagctgaacaaggccacggcgcagaacaaggacctgcagtgggagatggagctgctgcagtcagagctgaccgagctgagaaccacgcaggtgaagacagcaaaggagtcggagaaatacagggaggagcgggacgctgtgtacagcgagtacaagctcatcatgagtgagcgtgaccaggtcatctctgagctggacaagctgcagaccgaagtggagctggccgagtccaagctcaagagcagcacatctgagaagaaggcggccaatgaggagatggaggcgctgcggcagatcaaagacacggtgacaatggatgctgggagagccaacaaggaggttgaaatccttcgaaagcagtgcaaggctctgtgccaggagctgaaggaagccctccaggaggcggatgtggccaagtgccggcgggactgggccttccaggagcgagacaagattgtagcagagcgtgacagcatccggacactgtgtgacaacctgaggcgggagcgggaccgtgcggtgagcgagctggctgaggccctgcgcagcctggatgacacccgcaagcagaagaatgatgtcagccgcgagctgaaggagctcaaggaacagatggaatcccagttggaaaaggaggcccggttccgacagctgatggcccacagctcccacgactcggccattgacacggattccatggagtgggaaacggaagttgtagagttcgagagggagacggaggatattgacttgaaggcactggggtttgatatggcagaaggtgtgaatgagccttgtttcccgggggactgtggcatatttgtcactaaagtggacaaaggaagcattgctgatggccgcttaagggtcaatgactggctgctgagaatcaacgatgtggacctcatcaacaaggacaagaagcaggccatcaaggcgctcctcaatggggagggggccatcaacatggtcgtgcggcggaggaagtccctgggtgggaaggtggtcacgccgctgcacatcaacctcagtggacagaaagacagtggcatcagtctggagaatggagtgtatgctgcygctgtgctgcctggaagccctgccgctaaagaagggtcccttgctgtgggagacaggatcgttgcgatcaatggcattgcactggacaacaagtctctgaatgaatgtgaatctctgctgcgsagctgccaggactccctgaccctgtccctcctgaaggtattccctcagagctcctcgtggagtggccagaacatttttgaaaatatcaaagactctgataagatgctgagttttcgagcccatggcccggaggtccaggctcataacaaacggaacttgatacagcacaataactccacgcagacagacatcttctacacggacaggctggaagacaggaaggagccaggccccccaggaggcagcagctcctttctgcataagccattccctgggggacccttgcaggtctgcccccaggcctgtcccagtgcctctgagcgtagcctgagctccttccgctcagatgcctctggggaccgtggctttgggctggtggacgtgcgtggccggcggccactgctgccctttgagaccgaggtgggcccctgtggggttggggaggcctccctggacaaggcagactctgaaggctccaacagcggcgggacctggcccaaggccatgctcagctccacggcagtgcctgagaagctctctgtttataaaaagccaaagcaaagaaagtccatctttgaccctaacactttcaaacgcccccagacaccccccaaaatagactacctgcttccaggtcctgggcctgctcactctccccagccctccaagagggcggggcctctgacacccccaaaacctcccagaaggagcgactccattaagttccagcacaggctggagactagctccgagtcagaagccactctggtgggcagctccccatccactagtcccccgagcgccctgccccctgacgtggaccccggggagcccatgcacgcatcaccccctcgcaaggccagggtccgcattgcttccagctactaccctgaaggagatggggactcctcccacctgccggccaagaaatcctgtgatgaggacctcacctcccagaaggtggatgagctggggcagaagcgtcgccggccaaaatctgctcccagttttcggccgaagcttgctccagtagtgattcctgctcagttcctggaggaacagaagtgtgtcccggccagtggagaactctccccggagctccaggagtgggcaccttactcgcctgggcattccagccggcacagcaaccccccgctataccctagcaggccgtctgtgggyactgttccccggagtttgacccccagcaccactgtgagctccatcctgcggaaccccatctacactgtgcgcagtcacagggtcggcccctgcagctctccacctgcggcccgagatgctggcccccagggtttgcatcccagtgtccagcaccagggacgcctgagcctggacctgagccacaggacctgcagcgactactccgagatgagagccacccatgggtccaactcactgccctccagcgcccgcctgggttcttcgagtaacttgcagttcaaggcggaacgcattaaaatcccatcaacaccaagatatccgcggagtgtcgtgggctcygagagaggttcagtgtcacattctgaatgcagcactcctccacagtcacccctgaacatcgacaccctgtcctcttgtagccagtcccagacctcagcctccacattgcccagaatcgctgtcaaccccgcgtccctcggggagcggagaaaggacaggccttatgtggaggagccacgccacgtgaaggtgcagaagggctcagagccgctgggcatctccatcgtgagtggagagaagggcggcatctacgtctccaaggtgaccgtggggagcatcgctcaccaggctggcctcgagtatggggatcagttactggagttcaacggcataaacctgcggagcgccacggagcagcaggcgcggctcatcatcgggcagcagtgtgataccatcaccatcctggcccagtacaacccccacgtgcaccagctcagcagccactcccggtccagctcacacctggaccctgccggtacccactccactctccagggcagtggcaccaccaccccggagcatccatctgtcatcgacccactgatggagcaggacgaggggcctagcaccccccmagccaagcagagcagctccaggattgcgggagatgccaacaagaagaccctggagccacgcgttgtcttcatcaaaaagtcccagctggagcttggggtgcacttgtgtggtgggaacctgcatggggtgtttgtggccgaggtggaggatgacagtcctgccaagggtcctgacggcctcgtgccaggggacctcatcctggagtatggcagcctggacgtgcggaacaagacagtggaggaagtctatgtggagatgctgaagcccagggatggcgtccgcctgaaggtgcagtaccgccctgaggagttcacgaaggccaagggcctgcctggtgacagcttctacatcagggycctgtacgaccggctggcagatgtggagcaagagttgagctttaagaaggaygacatcctctacgtggatgacaccttaccccagggcacgttcgggtcctggatggcttggcagctggacgagaatgcccagaagatccagcgcgggcagattcccagcaaatatgtgatggaccaagaattctccaggaggctcagcatgtctgaagtcaaagatgacaatagcgccacaaagacgctgtcagcggctgcacgccgrtccttttttcggaggaaacacaagcacaaacgcagcgggtccaaggacgggaaagacctgctcgccttggatgccttttccagtgactccattccactctttgaaggcaaattcggtgagcctggcctatcagcgggtccagaaggtggactgcaccgctctgaggcctgtcctgattctggggcctttgctggacgtggtgaaggagatgctggtgaatgaggctcctggcaagttctgcagatgtccccttgaggtgatgaaggcctcccagcaggccattgagcggggtgtcaaagattgcctgtttgtcgactataagcggagaagcggccatttcgatgtgaccactgtggcgtcaataaaggagatcacagaaaagaaccgacactgcctcctggacattgctccgcacgctattgagcggctccaccacatgcacatctaccccattgtcatcttcatccactacaagagcgccaagcacatcaaggagcagagagaccccatctacctgagggacaaggtgactcagaggcattccaaagagcartttgaggcggcgcagaagcttgagcaggagtacagcaggtacttcacaggggtcatccagggaggagccctgtcaagcatttgcactcagatcttggcaatggtcaatcaagaacaaaataaagtcctgtggattccagcctgcccgctctaggagaatgctgtgctgtggatgactgcagctggccgcctgaggggacrccagactcagctcttttctagcgactgaaagtagaagtctgtcygtctatgaacatgcrggggaaggatccggaaccaggacccagaagcacctcctttgtagacagagggccacggctgcgtgcgatccaggcccaggmccacacactctgcccgtgtcacacgtgtgctttaacacaaaacagataacactaaagacgggttcagcacccacctttctttagccagctgatcagagatgctgcaaagagaacctttcggatcactcgtttacaagccttttctaagtatttggtggtttatgtttacttgaacggctccatgttgccggtgcccagcccctgtcccctctgtcaaccccctgtcgctttggtgttggtttcgttcccgtcttcagcaaaacgaccttggaacctcaatgggggctgctttgctttgggaggttcttgttggtgggaccagagctttgacaaacctcctgctccttggtggcacctctcctggaaggacrtcacaactccaggtgctcagactgcctgtggcagcagaaccagtgcctttggcattttcctcccacaatggggaaggtgactttggcattcttacaaactcgtctctcggcctttctctcctgccttccacagcctctcgtttctcctccatctgtgcttattacttgaggactgtgtctgctccgtgagagctgcgtgggcagggctgcagtggggtccaggtggtgttcagctgtgctgatgcctgccattgggtcctccttaggctctgtaagtcgtgacagccttcatcagtgcaatgtttgcagggtaattcttaaactttttagagggtggcaggtacatcagttctttttgatatgaaaacattcatgtttcagacattgaattgagagcttttaggggaagcataatggttattgtcactatcaacagtctaaaaagaaaaactgaggtctttttaatcttgattacagcactcacggcatgcaccctactcagtgtgggtgtcttcgtttgggggctttttttttttttgcacttctgaggctagatatgtctggctgaagatttgatgtggttcctccttaagctatgcgtcctgttaataataggtactgtactgggctctgtgtaagtgtcgttggggtaggacctatattttaatactgttcctaacatttcattttactagcgagaaatctttgatttcattttattctttgtaattctagacactagattgtagtttagccataactgatgttttttaaaaagggatatattttcttgcacagttgttcaaaaaagagacaagtttcagtcctcaatgctgtcctttgttttacaggtacaagttttctagctcagacaaactatgaaaaactgtagactattctcaaggtattaactcgcagaccctctgggggtaggggctgttttytaagttacaggcagagtgggactgagatggtacagtgtgcacaracaggtactgagctgacagactggrattttctgtactaaaatgttactttgtatcaaaagttaaacaggctttagtacaacaaataaaggtcaatttctgtaa

SEQ ID NO: 198 - DNA, 4037 bp, Homo sapiens
tagcagacactcttgcccttgcatctgcaggaacagaagtgtgtcccggccagtggagaactctccccggagctccaggagtgggcaccttactcgcctgggcattccagccggcacagcaaccccccgctataccctagcaggccgtctgtgggyactgttccccggagtttgacccccagcaccactgtgagctccatcctgcggaaccccatctacactgtgcgcagtcacagggtcggcccctgcagctctccacctgcggcccgagatgctggcccccagggtttgcatcccagtgtccagcaccagggacgcctgagcctggacctgagccacaggacctgcagcgactactccgagatgagagccacccatgggtccaactcactgccctccagcgcccgcctgggttcttcgagtaacttgcagttcaaggcggaacgcattaaaatcccatcaacaccaagatatccgcggagtgtcgtgggctcygagagaggttcagtgtcacattctgaatgcagcactcctccacagtcacccctgaacatcgacaccctgtcctcttgtagccagtcccagacctcagcctccacattgcccagaatcgctgtcaaccccgcgtccctcggggagcggagaaaggacaggccttatgtggaggagccacgccacgtgaaggtgcagaagggctcagagccgctgggcatctccatcgtgagtggagagaagggcggcatctacgtctccaaggtgaccgtggggagcatcgctcaccaggctggcctcgagtatggggatcagttactggagttcaacggcataaacctgcggagcgccacggagcagcaggcgcggctcatcatcgggcagcagtgtgataccatcaccatcctggcccagtacaacccccacgtgcaccagctcagcagccactcccggtccagctcacacctggaccctgccggtacccactccactctccagggcagtggcaccaccaccccggagcatccatctgtcatcgacccactgatggagcaggacgaggggcctagcaccccccmagccaagcagagcagctccaggattgcgggagatgccaacaagaagaccctggagccacgcgttgtcttcatcaaaaagtcccagctggagcttggggtgcacttgtgtggtgggaacctgcatggggtgtttgtggccgaggtggaggatgacagtcctgccaagggtcctgacggcctcgtgccaggggacctcatcctggagtatggcagcctggacgtgcggaacaagacagtggaggaagtctatgtggagatgctgaagcccagggatggcgtccgcctgaaggtgcagtaccgccctgaggagttcacgaaggccaagggcctgcctggtgacagcttctacatcagggycctgtacgaccggctggcagatgtggagcaagagttgagctttaagaaggaygacatcctctacgtggatgacaccttaccccagggcacgttcgggtcctggatggcttggcagctggacgagaatgcccagaagatccagcgcgggcagattcccagcaaatatgtgatggaccaagaattctccaggaggctcagcatgtctgaagtcaaagatgacaatagcgccacaaagacgctgtcagcggctgcacgccgrtccttttttcggaggaaacacaagcacaaacgcagcgggtccaaggacgggaaagacctgctcgccttggatgccttttccagtgactccattccactctttgaagattcggtgagcctggcctatcagcgggtccagaaggtggactgcaccgctctgaggcctgtcctgattctggggcctttgctggacgtggtgaaggagatgctggtgaatgaggctcctggcaagttctgcagatgtccccttgaggtgatgaaggcctcccagcaggccattgagcggggtgtcaaagattgcctgtttgtcgactataagcggagaagcggccatttcgatgtgaccactgtggcgtcaataaaggagatcacagaaaagaaccgacactgcctcctggacattgctccgcacgctattgagcggctccaccacatgcacatctaccccattgtcatcttcatccactacaagagcgccaagcacatcaaggagcagagagaccccatctacctgagggacaaggtgactcagaggcattccaaagagcartttgaggcggcgcagaagcttgagcaggagtacagcaggtacttcacaggggtcatccagggaggagccctgtcaagcatttgcactcagatcttggcaatggtcaatcaagaacaaaataaagtcctgtggattccagcctgcccgctctaggagaatgctgtgctgtggatgactgcagctggccgcctgaggggacrccagactcagctcttttctagcgactgaaagtagaagtctgtcygtctatgaacatgcrggggaaggatccggaaccaggacccagaagcacctcctttgtagacagagggccacggctgcgtgcgatccaggcccaggmccacacactctgcccgtgtcacacgtgtgctttaacacaaaacagataacactaaagacgggttcagcacccacctttctttagccagctgatcagagatgctgcaaagagaacctttcggatcactcgtttacaagccttttctaagtatttggtggtttatgtttacttgaacggctccatgttgccggtgcccagcccctgtcccctctgtcaaccccctgtcgctttggtgttggtttcgttcccgtcttcagcaaaacgaccttggaacctcaatgggggctgctttgctttgggaggttcttgttggtgggaccagagctttgacaaacctcctgctccttggtggcacctctcctggaaggacrtcacaactccaggtgctcagactgcctgtggcagcagaaccagtgcctttggcattttcctcccacaatggggaaggtgactttggcattcttacaaactcgtctctcggcctttctctcctgccttccacagcctctcgtttctcctccatctgtgcttattacttgaggactgtgtctgctccgtgagagctgcgtgggcagggctgcagtggggtccaggtggtgttcagctgtgctgatgcctgccattgggtcctccttaggctctgtaagtcgtgacagccttcatcagtgcaatgtttgcagggtaattcttaaactttttagagggtggcaggtacatcagttctttttgatatgaaaacattcatgtttcagacattgaattgagagcttttaggggaagcataatggttattgtcactatcaacagtctaaaaagaaaaactgaggtctttttaatcttgattacagcactcacggcatgcaccctactcagtgtgggtgtcttcgtttgggggctttttttttttttgcacttctgaggctagatatgtctggctgaagatttgatgtggttcctccttaagctatgcgtcctgttaataataggtactgtactgggctctgtgtaagtgtcgttggggtaggacctatattttaatactgttcctaacatttcattttactagcgagaaatctttgatttcattttattctttgtaattctagacactagattgtagtttagccataactgatgttttttaaaaagggatatattttcttgcacagttgttcaaaaaagagacaagtttcagtcctcaatgctgtcctttgttttacaggtacaagttttctagctcagacaaactatgaaaaactgtagactattctcaaggtattaactcgcagaccctctgggggtaggggctgttttytaagttacaggcagagtgggactgagatggtacagtgtgcacaracaggtactgagctgacagactggrattttctgtactaaaatgttactttgtatcaaaagttaaacaggctttagtacaacaaataaaggtcaatttctgtaa

SEQ ID NO: 199 - DNA, 7101 bp, Homo sapiens
tctacctacagcgtcctgtccaccatgccctcagactcagaaagcagcagctccctcagcagtgtgggcactaccgggaaggcgccgtccccaccacccctcctcactgaccggcaagtgaatgrgaaggtggagaacctctccattcagctgcggctgatgacccgggagagaaacgagctccgcaagcgcctggcstttgctacgcatggcacggcctttgacaagaggccctaccacaggctgaatcctgactatgagaggctgaagatccagtgcgtgcgagccatgtcggacctgcagagcctgcagaaccagcacaccaacgccttgaagaggtgtgaggaggtggccaaggagactgacttctaccacacactccacagccggctcctgagtgaccagactcggctgaaggatgacgtggacatgctgaggcgggagaatgggcagctgctgcgggagcgaaacctgctgcagcagtcatgggaggacatgaagcggctccacgaggaggaccagaaggagatcggtgacctccgtgcccagcagcagcaggtgttgaagcacaacgggtcatccgagattctcaacaaactrtatgacacggccatggacaagttggaggtggtcaagaaggactatgaygcccttcggaagaggtacagtgagaaagtcgccatccacaatgcagacctgagccgcctggagcagctgggggaggagaaccagcggttgctgaagcagacagagatgctgacccagcagagggacacggccatccagctgcagcaccagtgcgccctytccctgaggaggtttgaggcgatccaccatgagctgaacaaggccacggcgcagaacaaggacctgcagtgggagatggagctgctgcagtcagagctgaccgagctgagaaccacgcaggtgaagacagcaaaggagtcggagaaatacagggaggagcgggacgctgtgtacagcgagtacaagctcatcatgagtgagcgtgaccaggtcatctctgagctggacaagctgcagaccgaagtggagctggccgagtccaagctcaagagcagcacatctgagaagaaggcggccaatgaggagatggaggcgctgcggcagatcaaagacacggtgacaatggatgctgggagagccaacaaggaggttgaaatccttcgaaagcagtgcaaggctctgtgccaggagctgaaggaagccctccaggaggcggatgtggccaagtgccggcgggactgggccttccaggagcgagacaagattgtagcagagcgtgacagcatccggacactgtgtgacaacctgaggcgggagcgggaccgtgcggtgagcgagctggctgaggccctgcgcagcctggatgacacccgcaagcagaagaatgatgtcagccgcgagctgaaggagctcaaggaacagatggaatcccagttggaaaaggaggcccggttccgacagctgatggcccacagctcccacgactcggccattgacacggattccatggagtgggaaacggaagttgtagagttcgagagggagacggrggatattgacttgaaggcactggggtttgatatggcagaaggtgtgaatgagccttgtttcccgggggactgtggcatatttgtcactaaagtggacaaaggaagcattgctgatggccgcttaagggtcaatgactggctgctgagaatcaacgatgtggacctcatcaacaaggacaagaagcaggccatcaaggcgctcctcaatggggagggggccatcaacatggtcgtgcggcggaggaagtccctgggtgggaaggtggtcacgccgctgcacatcaacctcagtggacagaaagacagtggcatcagtctggagaatggagtgtatgctgcygctgtgctgcctggaagccctgccgctaaagaagggtcccttgctgtgggagacaggatcgttgcgatcaatggcattgcactggacaacaagtctctgaatgaatgtgaatctctgctgcgsagctgccaggactccctgaccctgtccctcctgaaggtattccctcagagctcctcgtggagtggccagaacatttttgaaaatatcaaagactctgataagatgctgagttttcgagcccatggcccggaggtccaggctcataacaaacggaacttgatacagcacaataactccacgcagacagacatcttctacacggacaggctggaagacaggaaggagccaggccccccaggaggcagcagctcctttctgcataagccattccctgggggacccttgcaggtctgcccccaggcctgtcccagtgcctctgagcgtagcctgagctccttccgctcagatgcctctggggaccgtggctttgggctggtggacgtgcgtggccggcggccactgctgccctttgagaccgaggtgggcccctgtggggttggggaggcctccctggacaaggcagactctgaaggctccaacagcggcgggacctggcccaaggccatgctcagctccacggcagtgcctgagaagctctctgtttataaaaagccaaagcaaagaaagtccatctttgaccctaacactttcaaacgcccccagacaccccccaaaatagactacctgcttccaggtcctgggcctgctcactctccccagccctccaagagggcggggcctctgacacccccaaaacctcccagaaggagcgactccattaagttccagcacaggctggagactagctccgagtcagaagccactctggtgggcagctccccatccactagtcccccgagcgccctgccccctgacgtggaccccggggagcccatgcacgcatcaccccctcgcaaggccagggtccgcattgcttccagctactaccctgaaggagatggggactcctcccacctgccggccaagaaatcctgtgatgaggacctcacctcccagaaggtggatgagctggggcagaagcgtcgccggccaaaatctgctcccagttttcggccgaagcttgctccagtagtgattcctgctcagttcctggaggaacagaagtgtgtcccggccagtggagaactctccccggagctccaggagtgggcaccttactcgcctgggcattccagccggcacagcaaccccccgctataccctagcaggccgtctgtgggyactgttccccggagtttgacccccagcaccactgtgagctccatcctgcggaaccccatctacactgtgcgcagtcacagggtcggcccctgcagctctccacctgcggcccgagatgctggcccccagggtttgcatcccagtgtccagcaccagggacgcctgagcctggacctgagccacaggacctgcagcgactactccgagatgagagccacccatgggtccaactcactgccctccagcgcccgcctgggttcttcgagtaacttgcagttcaaggcggaacgcattaaaatcccatcaacaccaagatatccgcggagtgtcgtgggctcygagagaggttcagtgtcacattctgaatgcagcactcctccacagtcacccctgaacatcgacaccctgtcctcttgtagccagtcccagacctcagcctccacattgcccagaatcgctgtcaaccccgcgtccctcggggagcggagaaaggacaggccttatgtggaggagccacgccacgtgaaggtgcagaagggctcagagccgctgggcatctccatcgtgagtggagagaagggcggcatctacgtctccaaggtgaccgtggggagcatcgctcaccaggctggcctcgagtatggggatcagttactggagttcaacggcataaacctgcggagcgccacggagcagcaggcgcggctcatcatcgggcagcagtgtgataccatcaccatcctggcccagtacaacccccacgtgcaccagctcagcagccactcccggtccagctcacacctggaccctgccggtacccactccactctccagggcagtggcaccaccaccccggagcatccatctgtcatcgacccactgatggagcaggacgaggggcctagcaccccccmagccaagcagagcagctccaggattgcgggagatgccaacaagaagaccctggagccacgcgttgtcttcatcaaaaagtcccagctggagcttggggtgcacttgtgtggtgggaacctgcatggggtgtttgtggccgaggtggaggatgacagtcctgccaagggtcctgacggcctcgtgccaggggacctcatcctggagtatggcagcctggacgtgcggaacaagacagtggaggaagtctatgtggagatgctgaagcccagggatggcgtccgcctgaaggtgcagtaccgccctgaggagttcacgaaggccaagggcctgcctggtgacagcttctacatcagggycctgtacgaccggctggcagatgtggagcaagagttgagctttaagaaggaygacatcctctacgtggatgacaccttaccccagggcacgttcgggtcctggatggcttggcagctggacgagaatgcccagaagatccagcgcgggcagattcccagcaaatatgtgatggaccaagaattctccaggaggctcagcatgtctgaagtcaaagatgacaatagcgccacaaagacgctgtcagcggctgcacgccgrtccttttttcggaggaaacacaagcacaaacgcagcgggtccaaggacgggaaagacctgctcgccttggatgccttttccagtgactccattccactctttgaagattcggtgagcctggcctatcagcgggtccagaaggtggactgcaccgctctgaggcctgtcctgattctggggcctttgctggacgtggtgaaggagatgctggtgaatgaggctcctggcaagttctgcagatgtccccttgaggtgatgaaggcctcccagcaggccattgagcggggtgtcaaagattgcctgtttgtcgactataagcggagaagcggccatttcgatgtgaccactgtggcgtcaataaaggagatcacagaaaagaaccgacactgcctcctggacattgctccgcacgctattgagcggctccaccacatgcacatctaccccattgtcatcttcatccactacaagagcgccaagcacatcaaggagcagagagaccccatctacctgagggacaaggtgactcagaggcattccaaagagcartttgaggcggcgcagaagcttgagcaggagtacagcaggtacttcacaggggtcatccagggaggagccctgtcaagcatttgcactcagatcttggcaatggtcaatcaagaacaaaataaagtcctgtggattccagcctgcccgctctaggagaatgctgtgctgtggatgactgcagctggccgcctgaggggacrccagactcagctcttttctagcgactgaaagtagaagtctgtcygtctatgaacatgcrggggaaggatccggaaccaggacccagaagcacctcctttgtagacagagggccacggctgcgtgcgatccaggcccaggmccacacactctgcccgtgtcacacgtgtgctttaacacaaaacagataacactaaagacgggttcagcacccacctttctttagccagctgatcagagatgctgcaaagagaacctttcggatcactcgtttacaagccttttctaagtatttggtggtttatgtttacttgaacggctccatgttgccggtgcccagcccctgtcccctctgtcaaccccctgtcgctttggtgttggtttcgttcccgtcttcagcaaaacgaccttggaacctcaatgggggctgctttgctttgggaggttcttgttggtgggaccagagctttgacaaacctcctgctccttggtggcacctctcctggaaggacrtcacaactccaggtgctcagactgcctgtggcagcagaaccagtgcctttggcattttcctcccacaatggggaaggtgactttggcattcttacaaactcgtctctcggcctttctctcctgccttccacagcctctcgtttctcctccatctgtgcttattacttgaggactgtgtctgctccgtgagagctgcgtgggcagggctgcagtggggtccaggtggtgttcagctgtgctgatgcctgccattgggtcctccttaggctctgtaagtcgtgacagccttcatcagtgcaatgtttgcagggtaattcttaaactttttagagggtggcaggtacatcagttctttttgatatgaaaacattcatgtttcagacattgaattgagagcttttaggggaagcataatggttattgtcactatcaacagtctaaaaagaaaaactgaggtctttttaatcttgattacagcactcacggcatgcaccctactcagtgtgggtgtcttcgtttgggggctttttttttttttgcacttctgaggctagatatgtctggctgaagatttgatgtggttcctccttaagctatgcgtcctgttaataataggtactgtactgggctctgtgtaagtgtcgttggggtaggacctatattttaatactgttcctaacatttcattttactagcgagaaatctttgatttcattttattctttgtaattctagacactagattgtagtttagccataactgatgttttttaaaaagggatatattttcttgcacagttgttcaaaaaagagacaagtttcagtcctcaatgctgtcctttgttttacaggtacaagttttctagctcagacaaactatgaaaaactgtagactattctcaaggtattaactcgcagaccctctgggggtaggggctgttttytaagttacaggcagagtgggactgagatggtacagtgtgcacaracaggtactgagctgacagactggrattttctgtactaaaatgttactttgtatcaaaagttaaacaggctttagtacaacaaataaaggtcaatttctgt

SEQ ID NO: 200 - DNA, 5593 bp, Homo sapiens
agtgaagagggcaccctataccatggcagtgcccggcgacgctgcacgagtcaggracaagcccgtccacagtggggtgagtcaagcccccacggcgggccgggactgccaccatcgtgcggaccccgcatcgccgcgggactcgggctgccgtggctgctggggagacctggtgctgcagccgctccggagctctcggaaactttcctcygcgctgtgcgcgggctccctgtcctttctgctggcgctgctggtgaggctggtccgcggggaggtcggctgtgacctggagcagtgtaaggaggcggcggcggcggaggaggaggaagcagccccgggagcagaagggggcgtcttcccggggcctcggggaggtgctcccgggggcggtgcgcggctcagcccctggctgcagccctcggcgctgctcttcagtctcctgtgtgccttcttctggatgggcttgtacctcctgcgcgccggggtgcgcctgcctctggctgtcgcgctgctggccgcctgctgcgggggggaagcgctcgtccagattgggctgggcgtcggggaggatcacttactctcactccccgccgcgggggtggtgctcagctgcttggccgccgcgacatggctggtgctgaggctgaggctgggcgtcctcatgatcgccttgactagcgckgtcaggaccgtgtccctcatttccttagagaggttcaaggtcgcctggagaccttacctggcgtacctggccggcgtgctggggatcctcttggccaggtacgtggaacaaatcttgccgcagtccgcggaggcggctccaagggagcatttggggtcccagctgattgctgggaccaaggaagatatcccggtgtttaagaggaggaggcggtccagctccgtcgtgtccgccgagatgtccggctgcagcagcaagtcccatcggaggacctccctgccctgtataccgagggaacagctcatggggcattcagaatgggaccacaaacgagggccaagaggatcacagtcttcaggaaccagtattactgtggacatcgccgtcatgggcgaggcccacggcctcattaccgacctcctggcagacccttctcttccaccaaacgtgtgcacatccttgagagccgtgagcaacttgctcagcacacagctcaccttccaggccattcacaascccagagtgaatcccgtyacttcgctcagtgaaaactatacctgttctgactctgaagagagctctgaaaaagacaagcttgctattccaaagcgcctgagaaggagtttgcctcctggcttgttgagacgagtttcttccacttggaccaccaccacctcggccacaggtctacccaccttggagcctgcaccagtacggagagaccgcagcaccagcatcaaactgcaggaagcaccttcatccagtcctgattcttggaataatccagtgatgatgaccctcaccaaaagcagatcctttacttcatcctatgctatttctgcagctaaccatgtaaaggctaaaaagcaaagtcgaccaggtgccctcgctaaaatttcacctctttcatcgccctgctcctcacckctccaagggactcctgccagcagcctggtcagcaaaatttctgcagtgcagtttccagaatctgctgacacaactgccaaacaaagcctaggttctcacagggccttaacttacactcagagtgccccagacctatcccctcaaatcctgactccacctgttatatgtagcagctgtggcagaccatattcccaagggaatcctgctgatgagcccctggagagaagtggggtagccactcggacaccaagtagaacagatgacactgctcaagttacctctgattatgaaaccaataacaacagtgacagcagtgacattgtacagaatgaagatgaaacagagtgcctgagagagcctctgaggaaagcatcggcttgcagcacctatgctcctgagaccatgatgtttctggacaaaccaattcttgctcccgaacctcttgtcatggataacctggactcaattatggagcagctaaatacttggaattttccaatttttgatttagtggaaaatataggaagaaaatgtggccgtattcttagtcaggtatcttacagactttttgaagacatgggcctctttgaagcttttaaaattccaattagggaatttatgaattattttcatgctttggagattggatatagggatattccttatcataacagaatccatgccactgatgttttacatgctgtttggtatcttactacacagcctattccaggcctctcaactgtgattaatgatcatggttcaaccagtgattcagattctgacagtggatttacacatggacatatgggatatgtattctcaaaaacgtataatgtgacagatgataaatacggatgtctgtctgggaatatccctgccttggagttgatggcgctgtatgtggctgcagccatgcacgattatgatcatccaggaaggactaatgctttcctggttgcaactagtgctcctcaggcggtgctatataacgatcgttcagttttggagaatcatcacgcagctgctgcatggaatcttttcatgtcccggccagagtataacttcttaattaaccttgaccatgtggaatttaagcatttccgtttccttgtcattgaagcaattttggccactgacctgaagaaacactttgacttcgtagccaaatttaatggcaaggtaaatgatgatgttggaatagattggaccaatgaaaatgatcgtctactggtttgtcaaatgtgtataaagttggctgatatcaatggtccagctaaatgtaaagaactccatcttcagtggacagatggtattgtcaatgaattttatgaacagggtgatgaagaggccagccttggattacccataagccccttcatggatcgttctgctcctcagctggccaaccttcaggaatccttcatctctcacattgtggggcctctgtgcaactcctatgattcagcaggactaatgcctggaaaatgggtggaagacagcgatgagtcaggagatactgatgacccagaagaagaggaggaagaagcaccagcaccaaatgaagaggaaacctgtgaaaataatgaatctccaaaaaagaagactttcaaaaggagaaaaatctactgccaaataactcagcacctcttacagaaccacaagatgtggaagaaagtcattgaagaggagcaacggttggcaggcatagaaaatcaatccctggaccagacccctcagtcgcactcttcagaacagatccaggctatcaaggaagaagaagaagagaaagggaaaccaagaggcgaggagataccaacccaaaagccagaccagtgacaatggatagaatgggctgtgtttccaaacagattgacttgtcaaagactctcttcaagccagcayaacatttagacacaacactgtagaaatttgagatgggcaaatggctattgcattttgggattcttcgcattttgtgtgtatatttttacagtgaggtacattgttaaaaactttttgctcaaagaagctttcacattgcaacaccagcttctaaggattttttaaggagggaatatatatgtgtgtgtgtatataagctcccacatagatacatgtaaaacatattcacacccatgcacgcacacacatacacactgaaggccacgattgctggctccacaatttagtaacatttatattaagatatatatatagtggtcactgtgatataataaatcataaaggaaaccaaatcacaaaggagatggtgtggcttagcaaggaaacagtgcaggaaatgtaggttaccaactaagcagcttttgctcttagtactgagggatgaaagttccagagcattatttgaattctgatacatcctgccaacactgtgtgtgtgtgtgtgtgtgtgtgtgtgtgtgtgtgtgtgtgtgaaagagagacagaagggaatggtttgagaggktgcttgtgtgcatgtgtgtgcatatgtaaagagatttttgtggtttaagtaactcagaatagctgtagcaaatgactgaatacatgtgaacaaacagaaggaagttcactctggagtgtctttgggaggcagccattccaaatgccctcctccatttagcttcaataaagggccttttgctgrtggagggcactcaagggctgggtgagagggccacgtgtttggtattacattactgctatgcaccacttgaaggagctctatcaccagcctcaaacccgaaagactgaggcattttccagtctacttgcctaatgaatgtatargaactgtctatgagtatggatgtcactcaactaagatcaaatcaccatttaaggggatggcattctttatacctaaacacctaagagctgaagtcaggtcttttaatcaggttagaattctaaatgatgccagagaaggcttgggaaattgtacttcagcgtgatagcctgtgtcttcttaatttgctgcaaaatatgtggtagagaaagaaaaggaaacagaaaaatcactctgggttatatagcaagagatgaaggagaatatttcaacacagggtttttgtgttgacataggaaaagcctgattcttggcaactgttgtagtttgtctttcaggggtgaaggtcccactgacaacccctgttgtggtgttccacacgctgtttgttggggtagcttccatcggcagtctggcccattgtcagtcatgcttcttctggccggggagattatagagagattgtttgaagatysggttattattgaaagtctttttttttgtttgttttgttttggtttgtttgtttatctacacttgtttatgctgtgagccaaacctctatttaaaaagttgatactcactttcaatattttatttcatattattatatatgtcatgatagttatcttgatgtaaatatgaagatttttttgtttctgtagatagtaaactctttttttaaaaaaggaaaagggaaacatttttataaagttatattttaatcaccatttttatacattgtagttctctccaagcccagtaagagaatgatgattcatttgcatggaggtcgatggacaaccaatcatctaccttttctaatttaaatgataatctgatatagttttattgccagttaaatgaggatgctgcaaagcatgttttttcactagtaacttttgctaactgaatgaattctgggtccatatctcccagatgaaaaactgttaaccaataccatattttatagttggtgtccatttctttccaacactgtttgttatgattcttccttsagtacttatatacagacctgctcattatctaaacaatcttaccttctaagtaaaccttgattgtgatttccagtttttattttctctgacgtagtagaaaggaatgtttacattaaaaatacttttgtttctcataaatggatattgtactcccccctttcaaagcattat

SEQ ID NO: 201 - DNA, 4606 bp, Homo sapiens
atggcagtgcccggcgacgctgcacgagtcaggaacaagcccgtccacagtggggtgagtcaagcccccacggcgggccgggactgccaccatcgtgcggaccccgcatcgccgcgggactcgggctgccgtggctgctggggagacctggtgctgcagccgctccggagctctcggaaactttcctcygcgctgtgcgcgggctgcctatcctttctgctggcgctgctggtgaggctggtccgcggggaggtcggctgtgacctggagcagtgtaaggaggcggcggcggcggaggaggaggaagcagccccgggagcagaaggggccgtcttcccggggcctcggggaggtgctcccgggggcggtgcgcggctcagcccctggctgcagccctcggcgctgctcttcagtctcctgtgtgccttcttctggatgggcttgtacctcctgcgcgccggggtgcgcctgcctctggctgtcgcgctgctggccgcctgctgcgggggggaagcgctcgtccagattgggctgggcgtcggggaggatcacttactctcactccccgccgcgggggtggtgctcagctgcttggccgccgcgacatggctggtgctgaggctgaggctgggcgtcctcatgatcgccttgactagcgckgtcaggaccgtgtccctcatttccttagagaggttcaaggtcgcctggagaccttacctggcgtacctggccggcgtgctggggatcctcttggccaggtacgtggaacaaatcttgccgcagtccgcggaggcggctccaagggagcatttggggtcccagctgattgctgggaccaaggaagatatcccggtgtttaagaggaggaggcggtccagctccgtcgtgtccgccgagatgtccggctgcagcagcaagtcccatcggaggacctccctgccctgtataccgagggaacagctcatggggcattcagaatgggaccacaaacgagggccaagaggatcacagtcttcaggaaccagtattactgtggacatcgccgtcatgggcgaagccacggcctcattaccgacctcctggcagacccttctcttccaccaaacgtgtgccacatccttgagagccgtgagcaacttgctcagcacacagctcaccttccaggccattcacaascccagagtgaatcccgtyacttcgctcagtgaaaactatacctgttctgactctgaagagagctctgaaaaagacaagcttgctattccaaagcgcctgagaaggagtttgcctcctggcttgttgagacgagtttcttccacttggaccaccaccacctcggccacaggtctacccaccttggagcctgcaccagtacggagagaccgcagcaccagcatcaaactgcaggaagcaccttcatccagtcctgattcttggaataatccagtgatgatgaccctcaccaaaagcagatcctttacttcatcctatgctatttctgcagctaaccatgtaaaggctaaaaagcaaagtcgaccaggtgccctcgctaaaatttcacctctttcatcgccctgctcctcacckctccaagggactcctgccagcagcctggtcagcaaaatttctgcagtgcagtttccagaatctgctgacacaactgccaaacaaagcctaggttctcacagggccttaacttacactcagagtgccccagacctatcccctcaaatcctgactccacctgttatatgtagcagctgtggcagaccatattcccaagggaatcctgctgatgagcccctggagagaagtggggtagccactcggacaccaagtcgaacagatgacactgctcaagttacctctgattatgaaaccaataacaacagtgacagcagtgacattgtacagaatgaagatgaaacagagtgcctgagagagcctctgaggaaagcatcggcttgcagcacctatgctcctgagaccatgatgtttctggacaaaccaattcttgctcccgaacctcttgtcatggataacctggactcaattatggagcagctaaatacttggaattttccaatttttgatttagtggaaaatataggaagaaaatgtggccgtattcttagtcaggtatcttacagactttttgaagacatgggcctctttgaagcttttaaaattccaattagggaatttatgaattattttcatgctttggagattggatatagggatattccttatcataacagaatccatgccactgatgttttacatgctgtttggtatcttactacacagcctattccaggcctctcaactgtgattaatgatcatggttcaaccagtgattcagattctgacagtggatttacacatggacatatgggatatgtattctcaaaaacgtataatgtgacagatgataaatacggatgtctgtctgggaatatccctgccttggagttgatggcgctgtatgtggctgcagccatgcacgattatgatcatccaggaaggactaatgctttcctggttgcaactagtgctcctcaggcggtgctatataacgatcgttcagttttggagaatcatcacgcagctgctgcatggaatcttttcatgtcccggccagagtataacttcttaattaaccttgaccatgtggaatttaagcatttccgtttccttgtcattgaagcaattttggccactgacctgaagaaacactttgacttcgtagccaaatttaatggcaaggtaaatgatgatgttggaatagattggaccaatgaaaatgatcgtctactggtttgtcaaatgtgtataaagttggctgatatcaatggtccagctaaatgtaaagaactccatcttcagtggacagatggtattgtcaatgaattttatgaacagggtgatgaagaggccagccttggattacccataagccccttcatggatcgttctgctcctcagctggccaaccttcaggaatccttcatctctcacattgtggggcctctgtgcaactcctatgattcagcaggactaatgcctggaaaatgggtggaagacagcgatgagtcaggagatactgatgacccagaagaagaggaggaagaagcaccagcaccaaatgaagaggaaacctgtgaaaataatgaatctccaaaaaagaagactttcaaaaggagaaaaatctactgccaaataactcagcacctcttacagaaccacaagatgtggaagaaagtcattgaagaggagcaacggttggcaggcatagaaaatcaatccctggaccagacccctcagtcgcactcttcagaacagatccaggctatcaaggaagaagaagaagagaaagggaaaccaagaggcgaggagataccaacccaaaagccagaccagtgacaatggatagaatgggctgtgtttccaaacagattgacttgtcaaagactctcttcaagccagcayaagcatttagatcacaacactgtagaaatttgagatgggcaaatggctattgcattttgggattcttcgcattttgtgtgtatatttttacagtgaggtacattgttaaaaactttttgctcaaagaagctttcacattgcaacaccagcttctaaggattttttaaggagggaatatatatgtgtgtgtgtatataagctcccacatagatacatgtaaaacatattcacacccatgcacgcacacacatacacactgaaggccacgattgctggctccacaatttagtaacatttatattaagatatatatatagtggtcactgtgatataataaatcataaaggaaaccaaatcacaaaggagatggtgtggcttagcaaggaaacagtgcaggaaatgtaggttaccaactaagcagcttttgctcttagtactgagggatgaaagttccagagcattatttgaattctgatacatcctgccaacactgtgtgtgtgtgtgtgtgtgtgtgtgtgtgtgtgtgtgtgtgtgaaagagagacagaagggatggtttgagagggktcgcttgtgtgcatgtgtgtgctatatgtaaagagatttttgtggtttaagtaactcagaatagctgtagcaaatgactgaatacatgtgaacaaacagaaggaagttcactctggagtgtctttgggaggcaggctattccaaatgccctcgtcgatttagcttcaataaagggccttttgctggtggagggcactcaagggctccctcagagggccacgtgtttggtattacattactgctatgcaccacttgaaggagctctatcaccagcctgaaacccgaagactgaggcattttccaggtctacttgcctaatgaatgtatargaactgtctatgagtatggatgtcactcaactaagatcaaatcaccatttaagggggatggcattctttatacctaaacacctaagagctgaagtcaggtcttttaatcaggttagaattctaaatgatgccagagaaggcttgggaaattgtacttcagggtgatagcctgtgtcttcttaatttactgggaaatatgtggtagagaaaggaaagga

SEQ ID NO: 202 - DNA, 2584 bp, Homo sapiens
gtgagctcgtctctgatctcgcgcaagagtgacacacaggtgttcaaagacgcttctggggagtgagggaagcggtttacgagtgacttggctggagcctcaggggcgggcactggcacggaacacaccctgaggccagccctggctrcccaggcggagctgcctcttctcccgcgggttggtggacccgctcagtacggagttggggragctctttcacttcggaggattgctcaacaaccatgctgggcatctggaccctcctacctctggttcttacgtctgttrctagattatcgtccaaaagtgttaatgcccaagtgrctgacatcaactccaagggattggaattgaggaagactgttactacagttgagactcaraacttggaaggcctgcatcatgatggccaattctgccataarccctgtcctccaggtgaaaggaaagctagggactgmacrgtcaatggggatgaaccagacygcgtgccctgccaagaagggaaggagtacacagacaaagcccatttttcttccaaatgcagaagatgtagattgtgtgatgaaggacatggcttagaagtggaaataaactgcacccggayccagaataccaagtgcagatgtaaaccaaactttttttgtaactctactgtatgtgaacactgtgacccttgcaccaaatgtgaacatggaatcatcaaggaatgcacactcaccagcaacaccaagtgcaaagaggaaggatccagatctaacttggggtggctttgtcttcttcttttgccaattccactaattgtttgggtgaagagaaaggaagtacagaaaacatgcagaaagcacagaaaggaaaaccaaggttctcatgaatctccaamyttaaatcctgaaacagtggcaataaatttatctgatgttgacttgagtaaatatatcaccactattgctggagtcatgmmactaagtcaagttaaaggctttsttyvaaagaatrrtgtcaatgaagmcaaaakabdtgagatcaagaatgacaatgtccaagacahagcarrayagaaagttyaactgcttcgtaattggcatcaacttcatggaaagaaagaagcgtatgacacattgattaaagatctcaaaaaagccaatctttgtaytcttgcagagaaaaktcagactatcatcctcaaggacattactagtgactcagaaaattcaaacttcagaaatgaaatccaaagcttggtctagagtgaaaaacaacaaattcagttctgagtatatgcaattagtgtttgaaaagattcttaatagctggctgtaaatactgcttggttttttactgggtacattttatcatttattagcgctgaagagccaacatatttgtagatttttaatatctcatgattctgcctccaaggatgtttaaaatctagttgggaaaacaaacttcatcaagagtaaatgcagtggcatgctaagtacccaaataggagtgtatgcagaggatgaaagattaagattatgctctggcatctaacatatgattctgtagtatgaatgtaatcagtgtatgttagtacaaatgtctatccacaggctaaccccactctatgaatcaatagaagaagctatgaccttttgctgaaatatcagttactgaacaggcaggccactttgcctctaaattacctctgataattctagagattttaccatatttctaaactttgtttataactctgagaagatcatatttatgtaaagtatatgtatttgagtgcagaatttaaataaggctctacctcaaagwcctttgcacagtttattggtgtcatattatacaatatttcaattgtgaattcacatagaaaacattaaattataatgtttgactattatatatgtgtatgcattttactggctcaaaactacctacttctttctcaggcatcaaaagcattttgagcaggagagtattactagagctttgccacctctccatttttgccttggtgctcatcttaatggcctaatgcacccccaaacatggaaatatcaccaaaaaatacttaatagtccaccaaaaggcaagactgcccttagaaattctagcctggtttggagatactaactgctctcagagaaagtagctttgtgacatgtcatgaacccatgtttgcaatcaaagatgataaaatagattcttatttttcccccacccccgaaaatgttcaataatgtcccatgtaaaacctgctacaaatggcagcttatacatagcaatggtaaaatcatcatctggatttaggaattgctcttgtcatacccycaagtttctaagatttaagattctccttactactatcctacgtttaaatatctttgaaagtttgtattaaatgtgaattttaagaaataatatttatatttctgtaaatgtaaactgtgaagatagttataaactgaagcagatacctggaaccacctaaagaacttccatttatggaggatttttttgccccttgtgtttggaattataaaatataggtaaaagtacgtaattaaataatgtttttggt

SEQ ID NO: 203 - DNA, 2095 bp, Homo sapiens
gtgagctcgtctctgatctcgcgcaagagtgacacacaggtgttcaaagacgcttctggggagtgagggaagcggtttacgagtgacttggctggagcctcaggggcgggcactggcacggaacacaccctgaggccagccctggctrcccaggcggagctgcctcttctcccgcgggttggtggacccgctcagtacggagttggggragctctttcacttcggaggattgctcaacaaccatgctgggcatctggaccctcctacctctggttcttacgtctgttrctagattatcgtccaaaagtgttaatgcccaagtgrctgacatcaactccaagggattggaattgaggaagactgttactacagttgagactcaraacttggaaggcctgcatcatgatggccaattctgccataarccctgtcctccaggtgaaaggaaagctagggactgmacrgtcaatggggatgaaccagacygcgtgccctgccaagaagggaaggagtacacagacaaagcccatttttcttccaaatgcagaagatgtagattgtgtgatgaaggacatggcttagaagtggaaataaactgcacccggayccagaataccaagtgcagatgtaaaccaaactttttttgtaactctactgtatgtgaacactgtgacccttgcaccaaatgtgaacatggaatcatcaaggaatgcacactcaccagcaacaccaagtgcaaagaggaaggatccagatctaacttggggtggctttgtcttcttcttttgccaattccactaattgtttgggtgaagagaaaggaagtacagaaaacatgcagaaagcacagaaaggaaaaccaaggttctcatgaatctccaamyttaaatcctgtagtggcaataaatttatctgatgttgacttgagtaaatatatcaccactattgctggagtcatgmmactaagtcaagttaaaggctttsttyvaaagaatrrtgtcaatgaagmcaaaakabdtgagatcaagaatgacaatgtccaagacahagcarrayagaaagttyaactgcttcgtaattggcatcaacttcatggaaagaaagaagcgtatgacacattgattaaagatctcaaaaaagccaatctttgtaytcttgcagagaaaaktcagactatcatcctcaaggacattactagtgactcagaaaattcaaacttcagaaatgaaatccaaagcttggtctagagtgaaaaacaacaaattcagttctgagtatatgcaattagtgtttgaaaagattcttaatagctggctgtaaatactgcttggttttttactgggtacattttatcatttattagcgctgaagagccaacatatttgtagatttttaatatctcatgattctgcctccaaggatgtttaaaatctagttgggaaaacaaacttcatcaagagtaaatgcagtggcatgctaagtacccaaataggagtgtatgcagaggatgaaagattaagattatgctctggcatctaacatatgattctgtagtatgaatgtaatcagtgtatgttagtacaaatgtctatccacaggctaaccccactctatgaatcaatagaagaagctatgaccttttgctgaaatatcagttactgaacaggcaggccactttgcctctaaattacctctgataattctagagattttaccatatttctaaactttgtttataactctgagaagatcatatttatgtaaagtatatgtatttgagtgcagaatttaaataaggctctacctcaaagwcctttgcacagtttattggtgtcatattatacaatatttcaattgtgaattcacatagaaaacattaaattataatgtttgactattatatatgtgtatgcattttactggctcaaaactacctacttctttctcaggcatcaaaagcattttgagcaggagagtattactagagctttgccacctctccatttttgccttggtgctcatcttaatggcctaatgcacccccaaacatggaaatatcaccaaaaaatacttaatagtccaccaaaaggcaaga

SEQ ID NO: 204 - DNA, 1989 bp, Homo sapiens
gtgagctcgtctctgatctcgcgcaagagtgacacacaggtgttcaaagacgcttctggggagtgagggaagcggtttacgagtgacttggctggagcctcaggggcgggcactggcacggaacacaccctgaggccagccctggctrcccaggcggagctgcctcttctcccgcgggttggtggacccgctcagtacggagttggggragctctttcacttcggaggattgctcaacaaccatgctgggcatctggaccctcctacctctggttcttacgtctgttrctagattatcgtccaaaagtgttaatgcccaagtgrctgacatcaactccaagggattggaattgaggaagactgttactacagttgagactcaraacttggaaggcctgcatcatgatggccaattctgccataarccctgtcctccaggtgaaaggaaagctagggactgmacrgtcaatggggatgaaccagacygcgtgccctgccaagaagggaaggagtacacagacaaagcccatttttcttccaaatgcagaagatgtagattgtgtgatgaaggacatgatgtgaacatggaatcatcaaggaatgcacactcaccagcaacaccaagtgcaaagaggaaggatccagatctaacttggggtggctttgtcttcttcttttgccaattccactaattgtttgggtgaagagaaaggaagtacagaaaacatgcagaaagcacagaaaggaaaaccaaggttctcatgaatctccaamyttaaatcctgaaacagtggcaataaatttatctgatgttgacttgagtaaatatatcaccactattgctggagtcatgmmactaagtcaagttaaaggctttsttyvaaagaatrrtgtcaatgaagmcaaaakabdtgagatcaagaatgacaatgtccaagacahagcarrayagaaagttyaactgcttcgtaattggcatcaacttcatggaaagaaagaagcgtatgacacattgattaaagatctcaaaaaagccaatctttgtaytcttgcagagaaaaktcagactatcatcctcaaggacattactagtgactcagaaaattcaaacttcagaaatgaaatccaaagcttggtctagagtgaaaaacaacaaattcagttctgagtatatgcaattagtgtttgaaaagattcttaatagctggctgtaaatactgcttggttttttactgggtacattttatcatttattagcgctgaagagccaacatatttgtagatttttaatatctcatgattctgcctccaaggatgtttaaaatctagttgggaaaacaaacttcatcaagagtaaatgcagtggcatgctaagtacccaaataggagtgtatgcagaggatgaaagattaagattatgctctggcatctaacatatgattctgtagtatgaatgtaatcagtgtatgttagtacaaatgtctatccacaggctaaccccactctatgaatcaatagaagaagctatgaccttttgctgaaatatcagttactgaacaggcaggccactttgcctctaaattacctctgataattctagagattttaccatatttctaaactttgtttataactctgagaagatcatatttatgtaaagtatatgtatttgagtgcagaatttaaataaggctctacctcaaagwcctttgcacagtttattggtgtcatattatacaatatttcaattgtgaattcacatagaaaacattaaattataatgtttgactattatatatgtgtatgcattttactggctcaaaactacctacttctttctcaggcatcaaaagcattttgagcaggagagtattactagagctttgccacctctccatttttgccttggtgctcatcttaatggcctaatgcacccccaaacatggaaatatcaccaaaaaatacttaatagtccaccaaaaggcaaga

SEQ ID NO: 205 - DNA, 5931 bp, Homo sapiens
gtgagctcgtctctgatctcgcgcaagagtgacacacaggtgttcaaagacgcttctggggagtgagggaagcggtttacgagtgacttggctggagcctcaggggcgggcactggcacggaacacaccctgaggccagccctggctrcccaggcggagctgcctcttctcccgcgggttggtggacccgctcagtacggagttggggragctctttcacttcggaggattgctcaacaaccatgctgggcatctggaccctcctacctctggttcttacgtctgttrctagattatcgtccaaaagtgttaatgcccaagtgrctgacatcaactccaagggattggaattgaggaagactgttactacagttgagactcaraacttggaaggcctgcatcatgatggccaattctgccataarccctgtcctccaggtgaaaggaaagctagggactgmacrgtcaatggggatgaaccagacygcgtgccctgccaagaagggaaggagtacacagacaaagcccatttttcttccaaatgcagaagatgtagattgtgtgatgaaggacatggcttagaagtggaaataaactgcacccggayccagaataccaagtgcagatgtaaaccaaactttttttgtaactctactgtatgtgaacactgtgacccttgcaccaaatgtgaacatggaatcatcaaggaatgcacactcaccagcaacaccaagtgcaaagaggaaggtaattatttttttacggttatattctcctttcccccaaccccatggaaagatgtgaagaaaaaccaatcactcttgattastagaaagtcctttatttaatcttaaagattgcttattttcatataaaatgtccaatgttccaacctacaggatccagatctaacttggggtggctttgtcttcttcttttgccaattccactaattgtttggggtaagttcttgctttgttcaaactgcagattgaaataacttgggaagtagttcacaaagatttgcctcattcttacctataaaaagctaccactttggtagatttatgtattgttaatttcttgcccctgaatgcagccttgagagctgactgataagaacraatgaaattattcctcagctagtttctgagcaacagttttggggcattgagtggtattctcatccttcctatgaacaggtgttctctgcagcagcagaattggccaaaaatcagaagyaattcttcactattcattgagatctccctatgcaaaaagagaacacaagaagcaaaggcattcccaggaaacacattgcagggaacactttaaaaacttgtacttcactgcctcctcttcctcggcctaattgcttgtttttaattatttctccttcttaacttaaaatactatggggacacatgttatacaaaggtgacttagtagagtcagtagaaaagccaaaattagatattatcataattagtctagaaaaatccctttaagtcattcatcaactacagggtcacaccaactttcagtaacttagaagtattcaattttcccttctcagaacaattatctgtttcttcagttcagttgaagaagaaagtttgccttgcctttagcggttgtttagctgaaaatacatttgggatatttaagcactgtaattgtgctcagagacatacagattcttctatctcacattgactttaatgcatacacctattgagtatgtatgcttgagttatttgtgtgtgtatttcatttctgggcatccatagcaagttgatgttgacttgcttgtcctacggcttctgcatcctgccatagtcttgccgtccacatctttgctggacagagagtggtgcttgccatatggtaagtcaaaagccatctccttgctaggccagcctgtggtaattagatgactaattaagatatgtcctttcactagaacacttgacttagtagtacgaaagttccaaaatcagcggtctcctgcgatgtttggccacttttaagtttcactgaatttctcctttttccttcttatatttctcttagtgtgaaagtatgttctcacatgcattctacaaggctgagacctgagttgataaaatttctttgttctttcagtgaagagaaaggaagtacagaaaacatgcagaaagcacagaaaggaaaaccaaggttctcatgaatctccaamyttaaatcctgtaggtattgaaataggtatcagctttccttgaaaagaaaaatagagaaattagtgatttggctttttgttacttccttttacttttttgtttcttgtttgtttcattttgtttgagatggagtcttgctccatagcccaggctggagtgcaggggtgcaatcatggctcactgcagcctcaaagtcctgggctcaagtgatcctcctgcctcaactgtgaccctgggactacaggcatgcaccaccatgccaggttaattttttatttttattttttatagagacagggttcactttgttgcccaggctgrtctcaaacttttgacctcaagcaatccttctgcctcagcctcccaaagttctgggattataggtgtgagccatcacatccggcctgttactttctttatttaaacattgcttgtgtttgtgkgtgcataggttaaaggggcctcacagatgaattatgatatggtacccaaattaaaagtaaacttgtacacaaaaaccgtaagaatcaacaaaggagggaattgagagtgtgctgaaaatgagctgaaaaaagaacttggccaacctccatgttccgtgttgttgttatccctgcagagaaacagcctttaccaggcatgggttcagtatccaagcctgagcaaagagattgctcttaaagtttgtcataagggcacagcttaactttctctggctgccggttgaccttatgtctcaccatatcttttcccaacatggtatcaatatatttcagatagcaagaaatacaccgagaaaagaaaccagttgcacttaatggaattattttcttatttggggccagggctcagtgggagttaggattctttaaattaatatggtaaaaaaaatttcaatttgagccattttctggtattaagaataagaatagttacagggaagaaaattttrgagtagttatatttattatttattttaataagtctatatgaaaaataacctcmacctattttatgaattctttaggtttcttgcctttaaaaactaagacaatattgcttagtttctggcaaggccggaacctttcagaataaaaattgaatggtaaaagtaaccttcttaatcacttaatctagcttcctaattttatacatcaagcaactgattgtacttctttctgaattaaggaaaaattagaagttcacatttagaatattctaaagatatatttttatttgtctttctctgcttccattttttgctttctaggaaacagtggcaataaatttatctggtaaggcttttatcattttatttcatagagatggcatcctttagagtaataggccaatttcagagtaaaataatrttactaatttcagtgacatattatgggatcttgttatttctcatacaattctacctgctcagcataaagcatttatcaggcagtttgtttaaatttataatgartactcatagttaaaaataatcaagtaacaataagacacaatagtctgaggcttaagaaacttttccttcataatcagctagatgtattacagaactcctgcctaaaaagatctagaggttaaagtgtactgtagactcaggtattatcagtgtacccaactctataacaacatacatgattccattcagtkgttctttgatctgtgatttagagataagatgatcataaactctttgcttatacttttagatttgtgggtcattgatcattggatccataagagatgttataggtgatcttttccaatcctcttaatttataaatgagaaaagaagatacagaaatgttatgtattgtggcccaggttatttaacaaattactgggtatatggcaggatttggagttagaactcaaggttgtcttgtttctgtattcccctagtcagctcttcatagacctttaggacttagctataytctgaagtactataaaaagagaaataaacatggttttcactaatgggaatttcatttagaaaaacaaattttcagactattttctatttttcagatgttgacttgagtaaatatatcaccactattgctggagtcatgmmactaagtcaagttaaaggctttsttyvaaagaatrrtgtcaatgaagmcaaaakabdtgagatcaagaatgacaatgtccaagacahagcarrayagaaagttyaactgcttcgtaattggcatcaacttcatggaaagaaagaagcgtatgacacattgattaaagatctcaaaaaagccaatctttgtaytcttgcagagaaaaktcagactatcatcctcaaggacattactagtgactcagaaaattcaaacttcagaaatgaaatccaaagcttggtctagagtgaaaaacaacaaattcagttctgagtatatgcaattagtgtttgaaaagattcttaatagctggctgtaaatactgcttggttttttactgggtacattttatcatttattagcgctgaagagccaacatatttgtagatttttaatatctcatgattctgcctccaaggatgtttaaaatctagttgggaaaacaaacttcatcaagagtaaatgcagtggcatgctaagtacccaaataggagtgtatgcagaggatgaaagattaagattatgctctggcatctaacatatgattctgtagtatgaatgtaatcagtgtatgttagtacaaatgtctatccacaggctaaccccactctatgaatcaatagaagaagctatgaccttttgctgaaatatcagttactgaacaggcaggccactttgcctctaaattacctctgataattctagagattttaccatatttctaaactttgtttataactctgagaagatcatatttatgtaaagtatatgtatttgagtgcagaatttaaataaggctctacctcaaagwcctttgcacagtttattggtgtcatattatacaatatttcaattgtgaattcacatagaaaacattaaattataatgtttgactattatatatgtgtatgcattttactggctcaaaactacctacttctttctcaggcatcaaaagcattttgagcaggagagtattactagagctttgccacctctccatttttgccttggtgctcatcttaatggcctaatgcacccccaaacatggaaatatcaccaaaaaatacttaatagtccaccaaaaggcaagactgcccttagaaattctagcctggtttggagatactaactgctctcagagaaagtagctttgtgacatgtcatgaacccatgtttgcaatcaaagatgataaaatagattcttatttttcccccacccccgaaaatgttcaataatgtcccatgtaaaacctgctacaaatggcagcttatacatagcaatggtaaaatcatcatctggatttaggaattgctcttgtcatacccycaagtttctaagatttaagattctccttactactatcctacgtttaaatatctttgaaagtttgtattaaatgtgaattttaagaaataatatttatatttctgtaaatgtaaactgtgaagatagttataaactgaagcagatacctggaaccacctaaagaacttccatttatggaggatttttttgccccttgtgtttggaattataaaatataggtaaaagtacgtaattaaataatgtttttggt

SEQ ID NO: 206 - DNA, 2337 bp, Homo sapiens
gtgagctcgtctctgatctcgcgcaagagtgacacacaggtgttcaaagacgcttctggggagtgagggaagcggtttacgagtgacttggctggagcctcaggggcgggcactggcacggaacacaccctgaggccagccctggctrcccaggcggagctgcctcttctcccgcgggttggtggacccgctcagtacggagttggggragctctttcacttcggaggattgctcaacaaccatgctgggcatctggaccctcctacctctggttcttacgtctgttrctagattatcgtccaaaagtgttaatgcccaagtgrctgacatcaactccaagggattggaattgaggaagactgttactacagttgagactcaraacttggaaggcctgcatcatgatggccaattctgccataarccctgtcctccagatgtgaacatggaatcatcaaggaatgcacactcaccagcaacaccaagtgcaaagaggaaggatccagatctaacttggggtggctttgtcttcttcttttgccaattccactaattgtttgggtgaagagaaaggaagtacagaaaacatgcagaaagcacagaaaggaaaaccaaggttctcatgaatctccaamyttaaatcctgaaacagtggcaataaatttatctgatgttgacttgagtaaatatatcaccactattgctggagtcatgmmactaagtcaagttaaaggctttsttyvaaagaatrrtgtcaatgaagmcaaaakabdtgagatcaagaatgacaatgtccaagacahagcarrayagaaagttyaactgcttcgtaattggcatcaacttcatggaaagaaagaagcgtatgacacattgattaaagatctcaaaaaagccaatctttgtaytcttgcagagaaaaktcagactatcatcctcaaggacattactagtgactcagaaaattcaaacttcagaaatgaaatccaaagcttggtctagagtgaaaaacaacaaattcagttctgagtatatgcaattagtgtttgaaaagattcttaatagctggctgtaaatactgcttggttttttactgggtacattttatcatttattagcgctgaagagccaacatatttgtagatttttaatatctcatgattctgcctccaaggatgtttaaaatctagttgggaaaacaaacttcatcaagagtaaatgcagtggcatgctaagtacccaaataggagtgtatgcagaggatgaaagattaagattatgctctggcatctaacatatgattctgtagtatgaatgtaatcagtgtatgttagtacaaatgtctatccacaggctaaccccactctatgaatcaatagaagaagctatgaccttttgctgaaatatcagttactgaacaggcaggccactttgcctctaaattacctctgataattctagagattttaccatatttctaaactttgtttataactctgagaagatcatatttatgtaaagtatatgtatttgagtgcagaatttaaataaggctctacctcaaagwcctttgcacagtttattggtgtcatattatacaatatttcaattgtgaattcacatagaaaacattaaattataatgtttgactattatatatgtgtatgcattttactggctcaaaactacctacttctttctcaggcatcaaaagcattttgagcaggagagtattactagagctttgccacctctccatttttgccttggtgctcatcttaatggcctaatgcacccccaaacatggaaatatcaccaaaaaatacttaatagtccaccaaaaggcaagactgcccttagaaattctagcctggtttggagatactaactgctctcagagaaagtagctttgtgacatgtcatgaacccatgtttgcaatcaaagatgataaaatagattcttatttttcccccacccccgaaaatgttcaataatgtcccatgtaaaacctgctacaaatggcagcttatacatagcaatggtaaaatcatcatctggatttaggaattgctcttgtcatacccycaagtttctaagatttaagattctccttactactatcctacgtttaaatatctttgaaagtttgtattaaatgtgaattttaagaaataatatttatatttctgtaaatgtaaactgtgaagatagttataaactgaagcagatacctggaaccacctaaagaacttccatttatggaggatttttttgccccttgtgtttggaattataaaatataggtaaaagtacgtaattaaataatgtttttggt

SEQ ID NO: 207 - DNA, 2032 bp, Homo sapiens
gtgagctcgtctctgatctcgcgcaagagtgacacacaggtgttcaaagacgcttctggggagtgagggaagcggtttacgagtgacttggctggagcctcaggggcgggcactggcacggaacacaccctgaggccagccctggctrcccaggcggagctgcctcttctcccgcgggttggtggacccgctcagtacggagttggggragctctttcacttcggaggattgctcaacaaccatgctgggcatctggaccctcctacctctggttcttacgtctgttrctagattatcgtccaaaagtgttaatgcccaagtgrctgacatcaactccaagggattggaattgaggaagactgttactacagttgagactcaraacttggaaggcctgcatcatgatggccaattctgccataarccctgtcctccaggtgaaaggaaagctagggactgmacrgtcaatggggatgaaccagacygcgtgccctgccaagaagggaaggagtacacagacaaagcccatttttcttccaaatgcagaagatgtagattgtgtgatgaaggacatggcttagaagtggaaataaactgcacccggayccagaataccaagtgcagatgtaaaccaaactttttttgtaactctactgtatgtgaacactgtgacccttgcaccaaatgtgaacatggaatcatcaaggaatgcacactcaccagcaacaccaagtgcaaagaggaagtgaagagaaaggaagtacagaaaacatgcagaaagcacagaaaggaaaaccaaggttctcatgaatctccaamyttaaatcctgtagtggcaataaatttatctgatgttgacttgagtaaatatatcaccactattgctggagtcatgmmactaagtcaagttaaaggctttsttyvaaagaatrrtgtcaatgaagmcaaaakabdtgagatcaagaatgacaatgtccaagacahagcarrayagaaagttyaactgcttcgtaattggcatcaacttcatggaaagaaagaagcgtatgacacattgattaaagatctcaaaaaagccaatctttgtaytcttgcagagaaaaktcagactatcatcctcaaggacattactagtgactcagaaaattcaaacttcagaaatgaaatccaaagcttggtctagagtgaaaaacaacaaattcagttctgagtatatgcaattagtgtttgaaaagattcttaatagctggctgtaaatactgcttggttttttactgggtacattttatcatttattagcgctgaagagccaacatatttgtagatttttaatatctcatgattctgcctccaaggatgtttaaaatctagttgggaaaacaaacttcatcaagagtaaatgcagtggcatgctaagtacccaaataggagtgtatgcagaggatgaaagattaagattatgctctggcatctaacatatgattctgtagtatgaatgtaatcagtgtatgttagtacaaatgtctatccacaggctaaccccactctatgaatcaatagaagaagctatgaccttttgctgaaatatcagttactgaacaggcaggccactttgcctctaaattacctctgataattctagagattttaccatatttctaaactttgtttataactctgagaagatcatatttatgtaaagtatatgtatttgagtgcagaatttaaataaggctctacctcaaagwcctttgcacagtttattggtgtcatattatacaatatttcaattgtgaattcacatagaaaacattaaattataatgtttgactattatatatgtgtatgcattttactggctcaaaactacctacttctttctcaggcatcaaaagcattttgagcaggagagtattactagagctttgccacctctccatttttgccttggtgctcatcttaatggcctaatgcacccccaaacatggaaatatcaccaaaaaatacttaatagtccaccaaaaggcaaga

SEQ ID NO: 208 - DNA, 2475 bp, Homo sapiens
gtgagctcgtctctgatctcgcgcaagagtgacacacaggtgttcaaagacgcttctggggagtgagggaagcggtttacgagtgacttggctggagcctcaggggcgggcactggcacggaacacaccctgaggccagccctggctrcccaggcggagctgcctcttctcccgcgggttggtggacccgctcagtacggagttggggragctctttcacttcggaggattgctcaacaaccatgctgggcatctggaccctcctacctctggttcttacgtctgttrctagattatcgtccaaaagtgttaatgcccaagtgrctgacatcaactccaagggattggaattgaggaagactgttactacagttgagactcaraacttggaaggcctgcatcatgatggccaattctgccataarccctgtcctccaggtgaaaggaaagctagggactgmacrgtcaatggggatgaaccagacygcgtgccctgccaagaagggaaggagtacacagacaaagcccatttttcttccaaatgcagaagatgtagattgtgtgatgaaggacatgatgtgaacatggaatcatcaaggaatgcacactcaccagcaacaccaagtgcaaagaggaaggatccagatctaacttggggtggctttgtcttcttcttttgccaattccactaattgtttgggtgaagagaaaggaagtacagaaaacatgcagaaagcacagaaaggaaaaccaaggttctcatgaatctccaamyttaaatcctgaaacagtggcaataaatttatctgatgttgacttgagtaaatatatcaccactattgctggagtcatgmmactaagtcaagttaaaggctttsttyvaaagaatrrtgtcaatgaagmcaaaakabdtgagatcaagaatgacaatgtccaagacahagcarrayagaaagttyaactgcttcgtaattggcatcaacttcatggaaagaaagaagcgtatgacacattgattaaagatctcaaaaaagccaatctttgtaytcttgcagagaaaaktcagactatcatcctcaaggacattactagtgactcagaaaattcaaacttcagaaatgaaatccaaagcttggtctagagtgaaaaacaacaaattcagttctgagtatatgcaattagtgtttgaaaagattcttaatagctggctgtaaatactgcttggttttttactgggtacattttatcatttattagcgctgaagagccaacatatttgtagatttttaatatctcatgattctgcctccaaggatgtttaaaatctagttgggaaaacaaacttcatcaagagtaaatgcagtggcatgctaagtacccaaataggagtgtatgcagaggatgaaagattaagattatgctctggcatctaacatatgattctgtagtatgaatgtaatcagtgtatgttagtacaaatgtctatccacaggctaaccccactctatgaatcaatagaagaagctatgaccttttgctgaaatatcagttactgaacaggcaggccactttgcctctaaattacctctgataattctagagattttaccatatttctaaactttgtttataactctgagaagatcatatttatgtaaagtatatgtatttgagtgcagaatttaaataaggctctacctcaaagwcctttgcacagtttattggtgtcatattatacaatatttcaattgtgaattcacatagaaaacattaaattataatgtttgactattatatatgtgtatgcattttactggctcaaaactacctacttctttctcaggcatcaaaagcattttgagcaggagagtattactagagctttgccacctctccatttttgccttggtgctcatcttaatggcctaatgcacccccaaacatggaaatatcaccaaaaaatacttaatagtccaccaaaaggcaagactgcccttagaaattctagcctggtttggagatactaactgctctcagagaaagtagctttgtgacatgtcatgaacccatgtttgcaatcaaagatgataaaatagattcttatttttcccccacccccgaaaatgttcaataatgtcccatgtaaaacctgctacaaatggcagcttatacatagcaatggtaaaatcatcatctggatttaggaattgctcttgtcatacccycaagtttctaagatttaagattctccttactactatcctacgtttaaatatctttgaaagtttgtattaaatgtgaattttaagaaataatatttatatttctgtaaatgtaaactgtgaagatagttataaactgaagcagatacctggaaccacctaaagaacttccatttatggaggatttttttgccccttgtgtttggaattataaaatataggtaaaagtacgtaattaaataatgtttttggt

SEQ ID NO: 209 - DNA, 1851 bp, Homo sapiens
gtgagctcgtctctgatctcgcgcaagagtgacacacaggtgttcaaagacgcttctggggagtgagggaagcggtttacgagtgacttggctggagcctcaggggcgggcactggcacggaacacaccctgaggccagccctggctrcccaggcggagctgcctcttctcccgcgggttggtggacccgctcagtacggagttggggragctctttcacttcggaggattgctcaacaaccatgctgggcatctggaccctcctacctctggttcttacgtctgttrctagattatcgtccaaaagtgttaatgcccaagtgrctgacatcaactccaagggattggaattgaggaagactgttactacagttgagactcaraacttggaaggcctgcatcatgatggccaattctgccataarccctgtcctccagatgtgaacatggaatcatcaaggaatgcacactcaccagcaacaccaagtgcaaagaggaaggatccagatctaacttggggtggctttgtcttcttcttttgccaattccactaattgtttgggtgaagagaaaggaagtacagaaaacatgcagaaagcacagaaaggaaaaccaaggttctcatgaatctccaamyttaaatcctgaaacagtggcaataaatttatctgatgttgacttgagtaaatatatcaccactattgctggagtcatgmmactaagtcaagttaaaggctttsttyvaaagaatrrtgtcaatgaagmcaaaakabdtgagatcaagaatgacaatgtccaagacahagcarrayagaaagttyaactgcttcgtaattggcatcaacttcatggaaagaaagaagcgtatgacacattgattaaagatctcaaaaaagccaatctttgtaytcttgcagagaaaaktcagactatcatcctcaaggacattactagtgactcagaaaattcaaacttcagaaatgaaatccaaagcttggtctagagtgaaaaacaacaaattcagttctgagtatatgcaattagtgtttgaaaagattcttaatagctggctgtaaatactgcttggttttttactgggtacattttatcatttattagcgctgaagagccaacatatttgtagatttttaatatctcatgattctgcctccaaggatgtttaaaatctagttgggaaaacaaacttcatcaagagtaaatgcagtggcatgctaagtacccaaataggagtgtatgcagaggatgaaagattaagattatgctctggcatctaacatatgattctgtagtatgaatgtaatcagtgtatgttagtacaaatgtctatccacaggctaaccccactctatgaatcaatagaagaagctatgaccttttgctgaaatatcagttactgaacaggcaggccactttgcctctaaattacctctgataattctagagattttaccatatttctaaactttgtttataactctgagaagatcatatttatgtaaagtatatgtatttgagtgcagaatttaaataaggctctacctcaaagwcctttgcacagtttattggtgtcatattatacaatatttcaattgtgaattcacatagaaaacattaaattataatgtttgactattatatatgtgtatgcattttactggctcaaaactacctacttctttctcaggcatcaaaagcattttgagcaggagagtattactagagctttgccacctctccatttttgccttggtgctcatcttaatggcctaatgcacccccaaacatggaaatatcaccaaaaaatacttaatagtccaccaaaaggcaaga

SEQ ID NO: 210 - DNA, 1011 bp, Homo sapiens
gacctggactgctctatctgtcttcacatggattgtggctcataacaatagctaaatgtggaattctgtgtatccgagacgtttatactttggaaacatttgcttggtgtcggagtcattctcaccagggtcatgggattcagtcaatgagaatttcaatggatggacaaaacattctggtgaatgggagagatgatggcacccttgtctacctaaagtggaagcgattyggaggacacctagccagtgaaattctggactattaccagaaactattaatttccctgagcagcgccatggacaaggagaatcattatttaagcacaacaccaaaagtttccgtagatttgggatccgattctgaacacacaaaacagaaggcaagcactgacttatcacaagatgaattagttctaaccgatgttaagaaggaaattccttggatacaacaaaaaagccaagaggccatcaaaaaggaggttaatctgttttccaagaaaaggaaagagataaaacaaggaatcaaatcactttccaaaactattctgaatatgatggaagaaaatgacaaactagaaaatattgcaaaattagaccaacaggaatttggtctggatcttgaggaactagaaaggcttcatgatgaaagtcaggaagaagtggcaaagatgataaaggatgtagagatgcataacttagccaagagctatttggctgaacttatcaaagaagaatgttggaattcgatggctgtgaaaggtcgagctcttaagtgttttcatatcccctgtgtggttgaaaacttcccratgaaagcgcgcacggttgaagagctgaaagaattggaaagagttttacagcaaaagaagattgaagcagagtgtcttaaactacggaaggaaattgtagaggctcagtctggagttaagttgattaaacagcgtcatgaagaggatgatgaagaagaggaagaggaagacaagacagtaaaatatagcaatttgcccaatt

SEQ ID NO: 211 - DNA, 4882 bp, Homo sapiens
ccgcagcctcggccgccgggcaagtakctccgagcggctgcttcccggttgcctcgacgaagacagggggcgccgcgctccgcttgctccgcgcctgagccatgcccagcagccctgwgtaaccaccgagtcccggccggagccgaccgacccagtgtgcgccgtctttcggccgagctgagctttcgtgcacgcaactccctctgccccagccggccccgcgccaccatgccccgggcgactgcacttggggccctggtgtcactgctgctgctgctgccgctgcctcgcggcgccgggggactcggggagcgcccggacgccaccgcagactactcagagctggacggcgaggagggcacggagcagcagctggagcattaccacgacccttgcaaagccgctgtcttttggggagacattgccttagatgaagatgacttgaagctgtttcacattsacawagccagagactggaccaagcagacagtgggggcaacaggacacagcacaggtgggcttgaagagcaggcatctgagagcagcccagacaccacagccatggacactggcaccaaggaagctggaaaggatggccgggagaataccacactcctgcacagccctgggaccttgcatgccgcagccaagaccttctctccccgggtccgaagagccacaacctcaaggacagagaggatatggcctggaggagtcatcccctacgtcattggagggaacttcactgggagccagagggccatttttaagcaggccatgagacactgggagaagcacacctgtgtgaccttcatagaaaggacggatgaggaaagctttattgtattcagttacagaacctgtggctgttgctcctatgttgggcgccgaggaggaggcccacaggccatatccattgggaagaactgtgacaagtttggcattgtggctcacgagctgggccatgtggttgggttttggcatgaacacacccggccagacagagaccaacatgtcaccatcatcagggaaaacatccagccaggtcaggagtataatttcttaaaaatggaagctggggaagtgagctctctgggagagacatacgactttgacagcatcatgcactacgcccggaacaccttctcaagaggagttttcttagacaccatccttccccgtcaagatgacaatggcrtcaggccaaccattggccagcgcgtgcggctcagtcagggagacatagctcaagcccggaagctgtacaaatgcccagcgtgtggggagaccctgcaggacacaacgggaaacttttctgcacctsgtttcccaaatgggtacccatcttactcccactgcgtctggaggatctcggtcaccccaggggaaaagatcgtattaaacttcacatccatggatttgtttaaaagccgactgtgctggtatgattacgtggaggtccgggatggttactggagaaaagccccccttttgggcaggttttgtggcgataagatcccggagcccctcgtctccacggacagccggctctgggtggagttccgcagcagcagcaacatcttgggcaagggcttctttgcagcgtacgaagctacctgcgggggagacatgaacaaagatgccggtcagattcaatctcccaactatccggatgactacagaccttccaaggaatgtgtctggaggattayggtttcagaggggtttcacgtgggacttaccttccaagcttttgagattgaaaggcacgacagctgtgcatatgactacctggaagtccgggatggccccacggaagagagtgccctgatcggccacttttgtggctatgagaagccggaggatgtgaaatcgagctccaacagactgtggatgaagtttgtgtccgatggctctatcaataaagcgggctttgcagccaattttttcaaggaggtggatgagtgttcctggccagatcacggygggtgcgagcatcgctgtgtgaacacgctgggcagctacaagtgtgcctgtgaccctggctacgagctggmcgccgataagaagatgtgtgaagtggcctgtggcggtttcattaccaagctgaatgsaaccatcaccagccctgggtggccgaaggagtatcccacaaacaaaaactgtgtctggcaggtggtggcccccgctcagtaccggatctcccttcagtttgaagtgtttgaactggaaggcaatgacgtctgtaagtacgactttgtagaggtgcgcagcrgcctgtcccccgacgccaagctgcacggcaggttctgcggctctgagacgccggaggtcatcacctcgcagagcaacaacatgcgcgtggagttcaagtccgacaayaccgtctccaagcgcggcttcagggcccacttcttctcagataaggacgagtgtgccaaggacaacggcgggtgtcagcatgagtgcgtcaacaccttcgggagctacctgtgcaggtgcagaaacggctactggctccacgagaatgggcatgactgcaaagaggctggctgtgcacacaagatcagcagtgtggaggggaccctggcgagccccaactggcctgacaaataccccagccggagggagtgtacctggaacatctcttcgactgcaggccacagagtgaaactcacctttaatgagtttgagatcgagcagcaccaggaatgtgcctatgaccacctggaaatgtatgacgggccggacagcctggcycccattctgggccgtttctgyggcagcaagaaaccagaccccacggtggcttccggcagcagtatgtttctcaggttttattcggatgcctcagtgcagaggaaaggcttccaggcagtgcacagcacagagtgcgggggcaggctgaaggctraagtgcagaccaaagagctctattcccacgcccagtttggggacaacaactacccgagcgaggcccgctgtgactgggtgatcgtggcagaggacggctacggcgtggagctgacattccggacctttgaggttgaggaggaggccgactgcggctacgactacatggaagcctacgacggctacgacagctcagcgcccaggctcggccgcttctgtggctctgggccattagaagaaatctactctgcaggtgattccctgatgattcgattccgcacagatgacaccatcaacaagaaaggctttcatgcccgatacaccagcaccaagttccaggatgccctgcacatgaagaaatagtgctgatgttcttgaaagacagaaactgagaatttkttttgttttgttttgtttttaacaacaatagcaccttgaaaatctgccctaaaacagtgtacagtatttttctcaaacaaaaactcagaatccagccttagaggtatatatttgaatgaaagtcttgtaagtttggccaacaaggtggagagaaaaatgttcttttgcttctgtctgcaatgttatcattcatgaactgttaaagtgttaaagattagrattgaagtcactgaccattccggctatgcttcttcataccattctccttgtcccttgctcctatgtggcaaaaggtcagccttggrgttggccgttcctctaatctggacttgcttgcaaaggtgccaggctgtcttctgtccatgttgggcataagggatgaaaacttggccgagactaatgtgtggcccacagctttggctggaatcattttctttctctctgccagggacatgtcaaccaagaaacctgaaaatatggatggatgtcaggactaaaaaaaggcatcacagtgagcagtgagcacagagggagtttcgagtataagaatcattgtcatgaagttaggagaccacaaagccatttctcagagtcattcactctccttgtccctttggtttccccccctccctaattgcagtgggggctaaggcatccattatgaatacagcagaacatttgctggcgagagtcctgtctgctgagaagacaatattgtggctcgtcctgatatttttttcattcattgactttgagaagactccacctgtgcttggaattccatgggcttcaaagaacatttcttcttttagctttggaggcacttgccgtggcacacctggactccttgacatccaattcaaactgcatttgcaaaatgtgcaaagacctcttatgagggaccaattcaggtcccttatggggtgaacactgttgaagactggttaattataagttatgtaagaatcatcgccttgtggaacaagtcaatcagtgactagcttcctgtagccaatcaggttaaagagtgcgttggtaactttgctctgattaactagtattcaatcaccaacttgcaaacagaattcataacacttggcacttgttctagagaagtgtagaggatgatgtttacataattttagcacctcaaggtataatttaaacagtgaggtagttttgaatggcatttcattaaggcatctatgggcattatgagctaaaagctgtggtatgttagctttaaaagagtatttatgttggaataatttttaaataatgtttacataactgtaagtcctgtttggttgttgttggacgcagggcggcacatgagtgtttttggttagagccaagatagctcccatgcaccggaattcctttgggatgaatcagcatcattttaaacaaagtatatgtaaaaggtgaaaggttatattttttacagatcagaatgtggcaccagaggactgtgtctcattaaagtgattgctgggagcaaaaactagaatgatacaaagaaaggtcagagaaatgcatgggaatattttttccttaaaacagaaaaaaa

SEQ ID NO: 212 - DNA, 1653 bp, Homo sapiens
aggacccacagccctggcsctccgcacgcacctcggtaacatcacagcaggtccaggccaatgataaccttataagaggccatgtcgaagcgcgacatcgtcctcaccaatgtcaccgttgtccagttgctgcgacagccgtgcccggtgaccagagcaccgcccccacctgagcctaaggctgaagtagagccccagccacaaccagagcccacaccagtcagggaggaaataaagccaccaccrccaccactgcctcctcaccccgctactcctcctcctaagatggtgtctgtggcccgggagctgactgtgggcatcaatggatttggacgcatcggtcgcctggtcctgcgckcctgcatggagaagggtgttaaggtggtggctgtgaatgatccattcattracccggaatacatggtgtacatgtttaagtatgactccacccacggccgatacaagggaagtgtggaattcaggaatggacaactggtcgtggacaaccatgagatctctgtctaccagtgcaaagagcccaaacagatcccctggagggctgtcgggagcccctacgtggtggagtccacaggcgtgtacctctccatacaggcagcttcggaccacatctctgcaggtgctcaacgtgtggtcatctccgcgccctcrccggatgcaccaatgttcgtyatgggtgtcaatgaaaatgactataaccctggctccatgaacattgtgagcaacgcgtcctgcaccaccaactgtttggctcccctcgccaaagtcatccacgagcgatttgggatcgtggaagggttgatgaccacagtccattcctacacggccacccagaagacagtggacgggccatcaaggaaggcctggcgagatgggcggggtgcccaccagaacatcatcccagcctccactggggctgcgaaagctgtgaccaaagtcatcccagagctcaaagggaagctgacagggatggcgttccgggtaccaaccccggatgtgtctgtcgtggacctgacctgccgcctcgcccagcctgccccctactcagccatcaaggaggctgtaaaagcagcagccaaggggcccatggctggcatccttgcctacaccgaggatgagstcgtctctacggacttcctcggtgatacccactcgtccatcttcgatgctaaggccggcattgcgctcaatgacaatttcgtgaagctcatttcatggtacgacaacgaatatggctacagtcaccgggtggtcgacctcctccgctacatgttcagccgagacaagtgaaacgggaaggtcctttctttccttcccaggggccggggccggaacatgtgcctcccgttccagcatctggctgcccgggggaggaaggacacccggggcgggcgccccacgccgatgggtccatggtgaaataaaaaacagtgctcacggctgcgtcccgtatctctgcgccggtcagggcgggttctgatccgggtttgaggcccgccccacccttactcgatcgcctgcgcccacgggcgaggggtcgcgctcgactccaagccgggttccacttcaggagaccgggaccgcgatggcagcggtagaggccccgcatggccggaagtcactccccaaagcgct

SEQ ID NO: 213 - DNA, 1680 bp, Homo sapiens
aggacccacagccctggcsctccgcacgcacctcggtaacatcacagcaggtccaggccaatgataaccttataagaggccatgtcgaagcgcgacatcgtcctcaccaatgtcaccgttgtccagttgctgcgacagccgtgcccggtgaccagagcaccgcccccacctgagcctaaggctgaagtagagccccagccacaaccagagcccacaccagtcagggaggaaataaagccaccaccrccaccactgcctcctcaccccgctactcctcctcctaagatggtgtctgtggcccgggagctgactgtgggcatcaatggatttggacgcatcggtcgcctggtcctgcgckcctgcatggagaagggtgttaaggtggtggctgtgaatgatccattcattracccggaatacatggtgtacatgtttaagtatgactccacccacggccgatacaagggaagtgtggaattcaggaatggacaactggtcgtggacaaccatgagatctctgtctaccagtgcaaagagcccaaacagatcccctggagggctgtcgggagcccctacgtggtggagtccacaggcgtgtacctctccatacaggcagcttcggaccacatctctgcaggtgctcaacgtgtggtcatctccgcgccctcrccggatgcaccaatgttcgtyatgggtgtcaatgaaaatgactataaccctggctccatgaacattgtgagtgtccrtgcacaccttggctgtttcagcaacgcgtcctgcaccaccaactgtttggctcccctcgccaaagtcatccacgagcgatttgggatcgtggaagggttgatgaccacagtccattcctacacggccacccagaagacagtggacgggccatcaaggaaggcctggcgagatgggcggggtgcccaccagaacatcatcccagcctccactggggctgcgaaagctgtgaccaaagtcatcccagagctcaaagggaagctgacagggatggcgttccgggtaccaaccccggatgtgtctgtcgtggacctgacctgccgcctcgcccagcctgccccctactcagccatcaaggaggctgtaaaagcagcagccaaggggcccatggctggcatccttgcctacaccgaggatgagstcgtctctacggacttcctcggtgatacccactcgtccatcttcgatgctaaggccggcattgcgctcaatgacaatttcgtgaagctcatttcatggtacgacaacgaatatggctacagtcaccgggtggtcgacctcctccgctacatgttcagccgagacaagtgaaacgggaaggtcctttctttccttcccaggggccggggccggaacatgtgcctcccgttccagcatctggctgcccgggggaggaaggacacccggggcgggcgccccacgccgatgggtccatggtgaaataaaaaacagtgctcacggctgcgtcccgtatctctgcgccggtcagggcgggttctgatccgggtttgaggcccgccccacccttactcgatcgcctgcgcccacgggcgaggggtcgcgctcgactccaagccgggttccacttcaggagaccgggaccgcgatggcagcggtagaggccccgcatggccggaagtcactccccaaagcgct

SEQ ID NO: 214 - DNA, 2715 bp, Homo sapiens
attaagagaagagacacttgctcatcaggcatggagagcactttgtcagcttccaatatgcaagacccttcatcttcacccttggaaaagtgtctcggctcagctaatggaaatggagaccttgattctgaagaaggctcaagcttggaggaaactggctttaactggggagaatatttggaagagacaggagcaagtgctgctccccacacatcattcaaacacgttgaaatcagcattcagagcaacttccagccaggaatgaaattggaagtggctaataagaacaacccggacacgtactgggtggccacgatcattaccacgtgcgggcagctgctgcttctgcgctactgcggttacggggaggaccgcagggccgacttctggtgtgacgtagtcatcgcggatttgcaccccgtggggtggtgcacacagaacaacaaggtgttgatgccgccggacgcaatcaaagagaagtacacagactggacagaatttctcatacgtgacttgactggttcgaggacagcacccgccaacctcctggaaggtcctctgcgagggaaaggccctatagacctcattacagttggttccttaatagaacttcaggattcccagaacccttttcagtactggatagttagtgtgattgaaaatgttggaggaagattacgccttcgctatgtgggattggaggacactgaatcctatgaccagtggttgttttacttggattacagacttcgaccagttggttggtktcaagagaataaatacagaatggacccaccttcagaaatctatcctttgaagatggcctctgaatggaaatgtactctggaaaaatcccttattgatgctgccaaatttcctcttycaatggaagtgtttaaggatcacgcagatttgcgaagccatttcttcacagttgggatgaagcttgagacagtgaatatgtgcgagcccttttacatctctcctgcgtcggtgactaaggtttttaacaatcacttttttcaagtgactattgaygacctaagacctgaaccaagtaaactgtcaatgctgtgccatgcagattctttggggattttgccagtacagtggtgccttaaaaatggagtcagcctcactcctcccaaaggttactctggccaggacttcgactgggcagattatcacaagcagcatggggcgcaggaagcccctcccttctgcttccgaaatacatcattcagtcgaggtttcacaaagaacatgaaacttgaagctgtgaaccccaggaatccaggagaactgtgtgtggcctccgttgtgagtgtgaaggggcggctaatgtggcttcacctggaagggctgcagactcctgttccagaggtcattgttgatgtggaatccatggacatcttcccagtgggctggtgtgaagccaattcttatcctttgactgcaccacacaaaacagtctcacaaaagaagagaaagattgcagtcgtgcaaccagagaaacaattgcygcccacagtgcctgttaagaaaatacctcatgacctttgtttattccctcacctggacaccacaggaaccgtcaacgggaaatactgctgtcctcagctcttcatcaaccacaggtgtttctcaggcccttacctgaacaaaggaaggattgcagagctacctcagtcggtgggaccgggcaaatgcgtgctggttcttaaagaggttcttagcatgataatcaacgcagcctacaagcctggaagggtattaagagaattacagctggtagaagatccccactggaatttccaggaagagacgctgaaggccaaatacagaggcaaaacatacagggctgtggtcaaaatcgtacggacatctgaccaagtcgcaaatttctgccgccgagtctgtgccaagctagagtgctgtccaaatttgtttagtcctgtgctgatatctgaaaactgcccagagaactgctccattcataccaaaaccaaatacacctattactatggaaagagaaagaagatckccaagccccscatcggggaaagcaaccccgacagcggacaccccaaacccgccaggcggaggaagcgacggaaatccattttcgtgcagaagaaacggaggtcttctgccgtggacttcaccgcgggctcgggggaggaaagtgaagaggaggacgctgacgccatggacgatgacaccgccagtgaggagaccggctccgagctccgggatgaccagacggacacctcgtcggcggaggtgccctcggcccggccccggagggccgtcaccctgcggagcggctcagagcccgtgcgccggccacccccagagaggacacgaaggggccgcggggcgccggctgcctcctcagcagaggaaggggagaagtgcccgccgaccaagcccgaggggacagaggacacgaaacaggaggaggaggagagactggttctggagagcaacccgttggagtggacggtcaccgacgtggtgaggttcattaagctgacagactgtgcccccttggccaagatatttcaggagcaggatattgacggccaagcactcctgcttctgacccttccgacggtgcaggagtgcatggagctgaagctggggcctgccatcaagttatgccaccagatcgagagagtcaaagtggctttctacgcccagtaygccaactga

SEQ ID NO: 215 - DNA, 5257 bp, Homo sapiens
atggctccactccgcgcgctgctgtcctacctgctgcctttgcactgtgcgctctgcgccgccgcgggcagccggaccccagagctgcacctctctggaaagctcagtgactatggtgtgacagtgccctgcagcacagactttcggggacgcttcctctcccacgtggtgtctggcccagcagcagcctctgcagggagcatggtagtggacacgccacccacactaccacgacactccagtcacctccgggtggctcgcagccctctgcacccaggagggaccctgtggcctggcagggtggggcgccactccctctacttcaatgtcactgttttcgggaaggaactgcacttgcgcctgcggcccaatcggaggttggtagtgccaggatcctcagtggagtggcaggaggattttcgggagctgttccggcagcccttacggcaggagtgtgtgtacactggaggtgtcactggaatgcctggggcagctgttgccatcagcaactgtgacggattggcgggcctcatcygcacagacagcaccracttcttcattgagcctctggagcggggccagcaggagaaggaggccagcgggaggacacatgtggtgtaccgccgggaggccgtccagcaggagtgggcagaacctgacggggacctgcacaatgaagcctttggcctgggagaccttcccaacctgctgggcctggtgggggaccagctgggcgacacagagcggaagcggcggcatgccaagccaggcagctacagcatcgaggtgctgctggtggtggacgactcggtggttcgcttccatggcaaggagcatgtgcagaactatgtcctcaccctcatgaatatcgtagatgagatttaccaygatgagtccctgggggttcatataaatattgccctcgtccgcttgatcatggttggctaccgacagtccctgagcctgatcgagcgcgggaacccctcacgcagcctggagcaggtgtgtcgctgggcacactcccagcagcgccaggaccccagccacgctgagcaccatgaccacgttgtgttcctcacccggcaggactttgggccctcagggtatgcacccgtcactggcatgtgtcaccccctgaggagctgtgccctcaaccatgaggatggcttctcctcagccttcgtgatagctcatgagaccggccacgtgctcggcatggagcatgacggtcaggggaatggctgtgcagatgagaccagcctgggcagcgtcatggcgcccctggtgcaggctgccttccaccgcttccattggtcccgctgcagcaagctggagctcagccgctacctcccctcctacgactgcctcctcgatgacccctttgatcctgcctggccccagcccccagagctgcctgggatcaactactcaatggatgagcagtgccgctttgactttggcagtggctaccagacctgcttggcattcaggacctttgagccctgcaagcagctgtggtgcagccatcctgacaacccgtacttctgcaagaccaagaaggggcccccgctggatgggactgagtgtgcacmcggcaagtggtgcttcaaaggtcactgcatctggaagtcgccggagcagacatatggccaggatggaggctggagctcctggaccaagtttgggtcatgttcgcggtcatgtgggggcggggtgcgatcccgcagccggagctgcaacaacccctccccagcctatggaggccgcctgtgcttagggcccatgttcgagtaccaggtctgcaacagcgaggagtgccctgggacctacgaggacttccgggcccagcagtgtgccaagcgcaactcctactatgtgcaccagaatgccaagcacagctgggtgccctacgagcctgacgatgacgcccagaagtgtgagctgatctgccagtcggcggacacrggggacgtggtgttcatgaaccaggtggttcacgatgggacacgctgcagctaycgggacccatacagcgtctgtgcgcgtggcgagtgtgtgcctgtcggctgtgacaaggaggtggggtccatgaaggcggatgacaagtgtggagtctgcgggggtgacaactcccactgcaggactgtgaaggggacgctgggcaaggcctccaagcaggcaggagctctcaagctggtgcagatcccagcaggtgccagrcacatccagattgaggcactggagaagtccccccaccgcattgtggtgaagaaccaggtcaccggcagcttcatcctcaaccccaagggcaaggaagccacaagccggaccttcaccgccatgggcctggagtgggaggatgcggtggaggatgccaaggaaagcctcaagaccagcgggcccctgcctgaagccattgccatcctggctctccccccaactgagggtggcccccgcagcagcctggcctacaagtacgtcatccatgaggacctgctkccccttatcgggagcaacaatgtgctcctggaggagatggacacctatgagtgggcgctcaagagctgggccccctgcagcaaggcctgtggaggagggatccagttcaccaaatacggctgccggcrcagacgagaccaccacatggtgcagcgacacctgtgtgaccacaagaagaggcccaagcccatccgccggcgctgcaaccagcacccgtgctctcagcctgtgtgggtgacggaggagtggggtgcctgcagccggagctgtgggaagctgggggtgcagacacgggggatacagtgcctgmtgcccctctccaatggaacccacaaggtcatgccggccaaagcctgygccggggaccggcctgaggcccgacggccctgtctcygagtgccctgcccagcccagtggaggctgggagcctggtcccagtgctctgccacctgtggagagggcatccagcagcggcaggtggtgtgcaggaccaacgccaacagcctcgggcattgcgagggggataggccagacactgtccaggtctgcarcctgccygcctgtggaggaaatcaccagaactccacggtgagggccgatgtctgggaacttgggacgccagaggggcagtgggtgccacaatctgracccctacatcccattaacaagatatcatcaacggagccctgcacgggagacaggtctgtcttctgccagatggaagtgctcgatcgctactgctccattcccggctaccaccggctctgctgtgtgtcctgcatcaagaaggcctcgggccccaaccctggcccagaccytggcycaacctcactgccccccttctccactcctggaagccccttaccaggaccccaggaccctgcagatgctgcrgagcctcctggaaagccaacgggatcagaggaccatcagcatggccgagccacacagctcccaggagctctggatacaagctccccagggacccagcatccctttgcccctgagacaccaatccctggagcatcctggagcatctcccctaccacccccggggggctgccttggggctggactcagacacctacrccagtccctgaggacaaagggcaacctggagaagacctgagrcatcccggcaccagcctccctgctgcctccccggtgacatgagctgtgccctgccatcccactggcacgtttacactctgtgtactgccccgygactcccagctcagaggacacacatagcagggcaggcgcaagcacagacttcattttaaatcattcgccttcttctcgtttggggctgtgatgctctttaccccacaaagcggggtgggaggaagacaaagatcagggaaagccctaatcggagatacctcagcaagctgcccccggcgggactgaccctctcagggcccctgttggtctcccctgccaagaccagggtcaactattgctccctcctcacagaccctgggcctgggcagrtctgaatcccggcyggtctgtagctrgaagctgtcagggctgcctgccttcccggaactgtgaggacccctgtggaggccctgcatatttggcccctctccccagaaaggcaaagcagggccagggtaggtgggggactgttcacagccaggccgagaggaggggggcctgggaatgtggcatgaggcttcccagctgcagggctggagggggtggaacacaagrtgatcgcaggcccagctccyggaagccaagagctccatgcagttccaccagctgaggccaggcagcagaggccagtttgtctttgctggccagaagatggtgctcatggccatactctggccttgcagatgtcactagtgttacttctagtgastccagattacagactggccccccaatctcaccccagcccaccagagaagggggctcaggacaccctggaccccaagtcctcagcatccagggatttccaaactggcgctcacyccctgactccaccaggatggcaacttcaattatcactctcagcctggaaggggactctgtgggacacagagggaacacgatttctcaggctgtcccttcaatcattgcccttctccgaagatcgctcctgctggagtcggacatcttcatcttctacctggctcaagctgggccagagtgtgtggttctcccaggggtggttggaccccaggactgaggaccagagtcyactcatagcctggccctggagatgacaagggccacccaggccaagtgccccagggcagggtgccagcccctggcctggtgctggagtggggaagacacactcacccacggtgctgtaagggcctgagctgtgctcagctgcyrgccatgctacctccaagggacaggtaacagtcttagatcctctggctctcaggaagtggcagggggtcccaggacacctccggggtcttggaggatgtctcctaaactcctgccaggtgatagaggtgcttctcacttcttccttccccaaggcaaaggggctgttctgagccagcctggaggaacatgagtagtgggcccctggcctgcaacccctttggagagtggaggtcctggggggctccccgccctccccctgttgccctcccctccctgggatgctggggcacacgyggagtcattcctgtgagaaccagcctggcctgtgttaaactcttgtgccttggaaatccagatctttaaaattttatgyatttattaacatcgccattggrcccca

SEQ ID NO: 216 - DNA, 3048 bp, Homo sapiens
gcaggcgccgcgcctccggccccgcccctccgcgcccctccgcgccccgcccccgccgctcggacggcccgagtcgcgccctcccgccccgcgccgcggaacttgctctaacttcctcggccgagccgggccgcgccgccgctgccgccgccgcgcgcggattctgcttctcagaagatgcactattatagatactctaacgccaaggtcagctgctggtacaagtacctccttttcagctacaacatcatcttctggttggctggagttgtcttccttggagtcgggctgtgggcatggagcgaaaagggtgtgctgtccgacctcaccaaagtgacccggatgcatggaatcgaccctgtggtgctggtcctgatggtgggcgtggtgatgttcaccctggggttcgccggctgcgtgggggctctgcgggagaatatctgcttgctcaactttttctgtggcaccatcgtgctcatcttcttcctggagctggctgtggccgtgctggccttcctgttccaggactgggtgagggaccggttccgggagttcttcgagagcaacatcaagtcctaccgggacgatatcgatctgcaaaacctcatcgactcccttcagaaagctaaccagtgctgtggcgcatatggccctgaagactgggacctcaacgtctacttcaattgcagcggtgccagctacagccgagagaagtgcggggtccccttctcctgctgcgtgccagatcctgcgcaaaaagttgtgaacacacagtgtggatatgatgtcaggattcagctgaagagcaagtgggatgagtccatcttcacgaaaggctgcatccaggcgctggaaagctggctcccgcggaacatttacatygtggctggcgtcttcatcgccatctcgctgttgcagatatttggcatcttcctggcaaggacgctgatctcagacatcgaggcagtgaaggccggccatcacttctgaggagcagagttgagggagccgagctgagccactgccccatcttaagcatcagcgtgacgtgacctctctgtttctgcttgctggtgctgaagaccaagggtcccccttgttacctgcccaaacttgtgactgcatccctctggagtctacmcagagacagagaatgtgtctttatgtgggagtggtgactckgaaagacagagagggctcctgtggctgccaggagggcttgactcagaccccctgcagctcaagcatgtctgcaggacaccctggtcccctctccactggcatccagacatctgctttgggtcatccacatctgtgggtgggccgtgggtagagggacccacaggcgtggacagggcatctctctccatcaagcaaagcagcatgggggcctgcccgtaacgggaggcggacgtggccccrctgggcctctgagtgccagcgcagtctgctgggacatgcacatatcaggggttgtttgcaggatcctcagccatgttcaagtgaagtaagcctgagcmagtgcgtggactggtgccacgggagtgccttgtccactgtmcccctgtgtccaccagctattctcctggcgccggaactgcctctggtcttgatagcattaagccctgatggcgccggtggcgcggtgggcatggttcttcactgagagccggctctccttttcttaaagtgtgtaaatagtttatttataggggtaagaatgttctcacaccatttcacttcctcttcctctcctccagcattctcctctgagcagccttagatagtgtccatggctggagccgaccctttgagtccccttgagtgtcttaagaaccagcccacaacagcctctctttctcctccacatactgcagcctccctccatgcatcccacatacaagcactcccccactccccagcgtggcctcactgtcttctggtcttggtgctactgaaattgtcacccagaatttgaatcctgaccctccccactgcaagcccagggagccccagcccaagatggccagcctgaaactgttggccagggctcctcttgtggccatgtacccagggctggctggcctgccatttgcctctccccggagacagccgttcttctgcaaccacaccccgtgcctagccacaaccccaggctgcagctgctcagaagctccaggcattttgtttctggtgaccgcccctaatgggatatcggtgatcactggtccacccttcctgtcagggcttttcyggggctgctcttggaaatgaagtcttaagtactgaataactcccctggggatagctggggcatttgtctagctgggctactttctaacactttgccatagctcagaccacttctcatcttcattctcaaatgcttttggcgtctccagggtgcctcaggaaaacatgaagtgggcattgtagaacttggggctactgtgtaactttggaagaaaaagttaagggtacttttaagtggatactgttttgatgaaattgccaacttcagggagcccagcttggagaaggaggacgtgagtattccttacaaggctcygaaacaattctttcttcacttagttttctttctgtgctctgcatcttatattccagcagggtcttccaatgcatggtttaataactacyagaactggccaggtgcagtggctcacgcctgtaatcccagaactttgggaggctaagacaggcagatcacttgaggccaggagttcgagaccagcctggacaacatggtgatacccagtttctactaaaaatacaaaaattagtcgggcatggtgatgtgcacctgtagtcccagctgctcgggaggctgaggcaggagaatcgcttgaacccgggagacagaggttgcaacgagccaagatcgagccactgcgctccggcctgggtgacaggagactccatctcaaaaaataaaattaaaaaaaaactactacaataaattatcaccttggactgtataaaacaacttttaaactagtctttttaaaaagtacacttaaataaaaatct

SEQ ID NO: 217 - DNA, 4102 bp, Homo sapiens
ggcaggctggggttgaaactcttcaccccttgcggtctgtactgcctcccaactgagcagccagggagaaggcctagagcctgtgcctttcagctagatagctggaggaactggctcctccctccttaggctgtgctggcctgagctgggagcctgagagctggggcagttgtctctaaagtggcttctgggattctggacttggggtggagtcgaaagcagggagccctgtgagttgattctgcttctcagaagatgcactattatagatactctaacgccaaggtcagctgctggtacaagtacctccttttcagctacaacatcatcttctggggtgtgctgtccgacctcaccaaagtgacccggatgcatggaatcgaccctgtggtgctggtcctgatggtgggcgtggtgatgttcaccctggggttcgccggctgcgtgggggctctgcgggagaatatctgcttgctcaactttttctgtggcaccatcgtgctcatcttcttcctggagctggctgtggccgtgctggccttcctgttccaggactgggtgagggaccggttccgggagttcttcgagagcaacatcaagtcctaccgggacgatatcgatctgcaaaacctcatcgactcccttcagaaagctaaccagtgctgtggcgcatatggccctgaagactgggacctcaacgtctacttcaattgcagcggtgccagctacagccgagagaagtgcggggtccccttctcctgctgcgtgccagatcctgcgcaaaaagttgtgaacacacagtgtggatatgatgtcaggattcagctgaagagcaagtgggatgagtccatcttcacgaaaggctgcatccaggcgctggaaagctggctcccgcggaacatttacatygtggctggcgtcttcatcgccatctcgctgttgcagatatttggcatcttcctggcaaggacgctgatctcagacatcgaggcagtgaaggccggccatcacttctgaggagcagagttgagggagccgagctgagccacgctgggaggccagagcctttctctgccatcagccctacgtccagagggagaggagccgacacccccagagccagtgccccatcttaagcatcagcgtgacgtgacctctctgtttctgcttgctggtgctgaagaccaagggtcccccttgttacctgcccaaacttgtgactgcatccctctggagtctacmcagagacagagaatgtgtctttatgtgggagtggtgactckgaaagacagagagggctcctgtggctgccaggagggcttgactcagaccccctgcagctcaagcatgtctgcaggacaccctggtcccctctccactggcatccagacatctgctttgggtcatccacatctgtgggtgggccgtgggtagagggacccacaggcgtggacagggcatctctctccatcaagcaaagcagcatgggggcctgcccgtaacgggaggcggacgtggccccrctgggcctctgagtgccagcgcagtctgctgggacatgcacatatcaggggttgtttgcaggatcctcagccatgttcaagtgaagtaagcctgagcmagtgcgtggactggtgccacgggagtgccttgtccactgtmcccctgtgtccaccagctattctcctggcgccggaactgcctctggtcttgatagcattaagccctgatggcgccggtggcgcggtgggcatggttcttcactgagagccggctctccttttcttaaagtgtgtaaatagtttatttataggggtaagaatgttctcacaccatttcacttcctcttcctctcctccagcattctcctctgagcagccttagatagtgtccatggctggagccgaccctttgagtccccttgagtgtcttaagaaccagcccacaacagcctctctttctcctccacatactgcagcctccctccatgcatcccacatacaagcactcccccactccccagcgtggcctcactgtcttctggtcttggtgctactgaaattgtcacccagaatttgaatcctgaccctccccactgcaagcccagggagccccagcccaagatggccagcctgaaactgttggccagggctcctcttgtggccatgtacccagggctggctggcctgccatttgcctctccccggagacagccgttcttctgcaaccacaccccgtgcctagccacaaccccaggctgcagctgctcagaagctccaggcattttgtttctggtgaccgcccctaatgggatatcggtgatcactggtccacccttcctgtcagggcttttcyggggctgctcttggaaatgaagtcttaagtactgaataactcccctggggatagctggggcatttgtctagctgggctactttctaacactttgccatagctcagaccacttctcatcgttcagggatggactgcaaccttaatttacttgccggagtgtacattctagtgtggtgtatactggtggctgttgatgatgatttttttttttttttttacacaattctctgtagactaggagaagaatgcttgtgtttttcggaagtgtgatgcttctctttgactgccaaactcttttatggaatatatctttatattaatgctgttttggtcatttttgtttggggtcactattgagatattgctaagcatctcagtggtaaacgcggctgccagaggaaccaagggatagggtatgtagaccttacagaaggatggatggtaaaggcagtccatcatcagcacaatctgacttacatttcattgagtaattttttttttttttaagattctgtatggcagcactttcagttgcccttgtgtgccggccacagccgcacaagttggcttgtggtttatcccccgctataagtgagagctggagaaacttcaactccataggtctagaggaaacattgttttaggttatttctgtccacccctgtgcgatactatttattgatccaagcagaagagcttggggacactgagtcgaagtggggacatgggattgaagcctgggcactgctgctgcatgagctgtgtgtcctgggtgtgccggcctttctgtgaagggggttggtggcagtgcccacctcactagatgcctctgacccagcctcccctgggggagtgggtggycacagaccctccctgccagagctcctggaaggytcctgcaggcctgacccatctattcctgtagacctggtttaggatgaagtctcggtgcgatttttgcagagttgggtttatctttcaactatagacccttctggctgttctcagccatatcatgtgactctgaatagttggatgaggaatggaaagaaagcaaggatgagagccggkcaygtggcagtctccgcccagcatcggctgtccgcacagaggcacagggcaggcctcctgtgcactccccacctagcactggcctgtcctgaatccccgccttccctggttggaggccagctgtggcatttgcaccctcttctcacctcaccatgcacatgctaactttaaagccttggggtctttcctgtaccccctcctcaaccctggtccaccccctctcaggatcttgtcaacgttatttttcctgtcccgtcttcctatcgctggccttcctttcccatcctaaaaacttgccgaggccctatggctccctccctttctttcccaggcagcttcttatctgggctgtctgtaccccttcctttgcaccacccaccatgccccacgtagctgaaagctgcttatcccaattgtcaactctggccttcttcagcctctgtagcaccagacactgcacctcctgaatgtcctctgcttctctgcttcagaggcccaggctcgccagttctctgacctctcccatatgtctgcttaggactctgctgcagctgtcctcaccagcctccggggaatcccactacccacagggcagggctgtgggctgggctgaaaaaccatctgcatggtccacaagaagcctggcactgggtttccccatgaataacaatgaaaa

SEQ ID NO: 218 - DNA, 4075 bp, Homo sapiens
gcaggcgccgcgcctccggccccgcccctccgcgcccctccgcgccccgcccccgccgctcggacggcccgagtcgcgccctcccgccccgcgccgcggaacttgctctaacttcctcggccgagccgggccgcgccgccgctgccgccgccgcgcgcggattctgcttctcagaagatgcactattatagatactctaacgccaaggtcagctgctggtacaagtacctccttttcagctacaacatcatcttctggttggctggagttgtcttccttggagtcgggctgtgggcatggagcgaaaagggtgtgctgtccgacctcaccaaagtgacccggatgcatggaatcgaccctgtggtgctggtcctgatggtgggcgtggtgatgttcaccctggggttcgccggctgcgtgggggctctgcgggagaatatctgcttgctcaactttttctgtggcaccatcgtgctcatcttcttcctggagctggctgtggccgtgctggccttcctgttccaggactgggtgagggaccggttccgggagttcttcgagagcaacatcaagtcctaccgggacgatatcgatctgcaaaacctcatcgactcccttcagaaagctaaccagtgctgtggcgcatatggccctgaagactgggacctcaacgtctacttcaattgcagcggtgccagctacagccgagagaagtgcggggtccccttctcctgctgcgtgccagatcctgcgcaaaaagttgtgaacacacagtgtggatatgatgtcaggattcagctgaagagcaagtgggatgagtccatcttcacgaaaggctgcatccaggcgctggaaagctggctcccgcggaacatttacatygtggctggcgtcttcatcgccatctcgctgttgcagatatttggcatcttcctggcaaggacgctgatctcagacatcgaggcagtgaaggccggccatcacttctgaggagcagagttgagggagccgagctgagccacgctgggaggccagagcctttctctgccatcagccctacgtccagagggagaggagccgacacccccagagccagtgccccatcttaagcatcagcgtgacgtgacctctctgtttctgcttgctggtgctgaagaccaagggtcccccttgttacctgcccaaacttgtgactgcatccctctggagtctacmcagagacagagaatgtgtctttatgtgggagtggtgactckgaaagacagagagggctcctgtggctgccaggagggcttgactcagaccccctgcagctcaagcatgtctgcaggacaccctggtcccctctccactggcatccagacatctgctttgggtcatccacatctgtgggtgggccgtgggtagagggacccacaggcgtggacagggcatctctctccatcaagcaaagcagcatgggggcctgcccgtaacgggaggcggacgtggccccrctgggcctctgagtgccagcgcagtctgctgggacatgcacatatcaggggttgtttgcaggatcctcagccatgttcaagtgaagtaagcctgagcmagtgcgtggactggtgccacgggagtgccttgtccactgtmcccctgtgtccaccagctattctcctggcgccggaactgcctctggtcttgatagcattaagccctgatggcgccggtggcgcggtgggcatggttcttcactgagagccggctctccttttcttaaagtgtgtaaatagtttatttataggggtaagaatgttctcacaccatttcacttcctcttcctctcctccagcattctcctctgagcagccttagatagtgtccatggctggagccgaccctttgagtccccttgagtgtcttaagaaccagcccacaacagcctctctttctcctccacatactgcagcctccctccatgcatcccacatacaagcactcccccactccccagcgtggcctcactgtcttctggtcttggtgctactgaaattgtcacccagaatttgaatcctgaccctccccactgcaagcccagggagccccagcccaagatggccagcctgaaactgttggccagggctcctcttgtggccatgtacccagggctggctggcctgccatttgcctctccccggagacagccgttcttctgcaaccacaccccgtgcctagccacaaccccaggctgcagctgctcagaagctccaggcattttgtttctggtgaccgcccctaatgggatatcggtgatcactggtccacccttcctgtcagggcttttcyggggctgctcttggaaatgaagtcttaagtactgaataactcccctggggatagctggggcatttgtctagctgggctactttctaacactttgccatagctcagaccacttctcatcgttcagggatggactgcaaccttaatttacttgccggagtgtacattctagtgtggtgtatactggtggctgttgatgatgatttttttttttttttttacacaattctctgtagactaggagaagaatgcttgtgtttttcggaagtgtgatgcttctctttgactgccaaactcttttatggaatatatctttatattaatgctgttttggtcatttttgtttggggtcactattgagatattgctaagcatctcagtggtaaacgcggctgccagaggaaccaagggatagggtatgtagaccttacagaaggatggatggtaaaggcagtccatcatcagcacaatctgacttacatttcattgagtaattttttttttttttaagattctgtatggcagcactttcagttgcccttgtgtgccggccacagccgcacaagttggcttgtggtttatcccccgctataagtgagagctggagaaacttcaactccataggtctagaggaaacattgttttaggttatttctgtccacccctgtgcgatactatttattgatccaagcagaagagcttggggacactgagtcgaagtggggacatgggattgaagcctgggcactgctgctgcatgagctgtgtgtcctgggtgtgccggcctttctgtgaagggggttggtggcagtgcccacctcactagatgcctctgacccagcctcccctgggggagtgggtggycacagaccctccctgccagagctcctggaaggytcctgcaggcctgacccatctattcctgtagacctggtttaggatgaagtctcggtgcgatttttgcagagttgggtttatctttcaactatagacccttctggctgttctcagccatatcatgtgactctgaatagttggatgaggaatggaaagaaagcaaggatgagagccggkcaygtggcagtctccgcccagcatcggctgtccgcacagaggcacagggcaggcctcctgtgcactccccacctagcactggcctgtcctgaatccccgccttccctggttggaggccagctgtggcatttgcaccctcttctcacctcaccatgcacatgctaactttaaagccttggggtctttcctgtaccccctcctcaaccctggtccaccccctctcaggatcttgtcaacgttatttttcctgtcccgtcttcctatcgctggccttcctttcccatcctaaaaacttgccgaggccctatggctccctccctttctttcccaggcagcttcttatctgggctgtctgtaccccttcctttgcaccacccaccatgccccacgtagctgaaagctgcttatcccaattgtcaactctggccttcttcagcctctgtagcaccagacactgcacctcctgaatgtcctctgcttctctgcttcagaggcccaggctcgccagttctctgacctctcccatatgtctgcttaggactctgctgcagctgtcctcaccagcctccggggaatcccactacccacagggcagggctgtgggctgggctgaaaaaccatctgcatggtccacaagaagcctggcactgggtttccccatgaataacaatgaaaa

SEQ ID NO: 219 - DNA, 3075 bp, Homo sapiens
ggcaggctggggttgaaactcttcaccccttgcggtctgtactgcctcccaactgagcagccagggagaaggcctagagcctgtgcctttcagctagatagctggaggaactggctcctccctccttaggctgtgctggcctgagctgggagcctgagagctggggcagttgtctctaaagtggcttctgggattctggacttggggtggagtcgaaagcagggagccctgtgagttgattctgcttctcagaagatgcactattatagatactctaacgccaaggtcagctgctggtacaagtacctccttttcagctacaacatcatcttctggggtgtgctgtccgacctcaccaaagtgacccggatgcatggaatcgaccctgtggtgctggtcctgatggtgggcgtggtgatgttcaccctggggttcgccggctgcgtgggggctctgcgggagaatatctgcttgctcaactttttctgtggcaccatcgtgctcatcttcttcctggagctggctgtggccgtgctggccttcctgttccaggactgggtgagggaccggttccgggagttcttcgagagcaacatcaagtcctaccgggacgatatcgatctgcaaaacctcatcgactcccttcagaaagctaaccagtgctgtggcgcatatggccctgaagactgggacctcaacgtctacttcaattgcagcggtgccagctacagccgagagaagtgcggggtccccttctcctgctgcgtgccagatcctgcgcaaaaagttgtgaacacacagtgtggatatgatgtcaggattcagctgaagagcaagtgggatgagtccatcttcacgaaaggctgcatccaggcgctggaaagctggctcccgcggaacatttacatygtggctggcgtcttcatcgccatctcgctgttgcagatatttggcatcttcctggcaaggacgctgatctcagacatcgaggcagtgaaggccggccatcacttctgaggagcagagttgagggagccgagctgagccactgccccatcttaagcatcagcgtgacgtgacctctctgtttctgcttgctggtgctgaagaccaagggtcccccttgttacctgcccaaacttgtgactgcatccctctggagtctacmcagagacagagaatgtgtctttatgtgggagtggtgactckgaaagacagagagggctcctgtggctgccaggagggcttgactcagaccccctgcagctcaagcatgtctgcaggacaccctggtcccctctccactggcatccagacatctgctttgggtcatccacatctgtgggtgggccgtgggtagagggacccacaggcgtggacagggcatctctctccatcaagcaaagcagcatgggggcctgcccgtaacgggaggcggacgtggccccrctgggcctctgagtgccagcgcagtctgctgggacatgcacatatcaggggttgtttgcaggatcctcagccatgttcaagtgaagtaagcctgagcmagtgcgtggactggtgccacgggagtgccttgtccactgtmcccctgtgtccaccagctattctcctggcgccggaactgcctctggtcttgatagcattaagccctgatggcgccggtggcgcggtgggcatggttcttcactgagagccggctctccttttcttaaagtgtgtaaatagtttatttataggggtaagaatgttctcacaccatttcacttcctcttcctctcctccagcattctcctctgagcagccttagatagtgtccatggctggagccgaccctttgagtccccttgagtgtcttaagaaccagcccacaacagcctctctttctcctccacatactgcagcctccctccatgcatcccacatacaagcactcccccactccccagcgtggcctcactgtcttctggtcttggtgctactgaaattgtcacccagaatttgaatcctgaccctccccactgcaagcccagggagccccagcccaagatggccagcctgaaactgttggccagggctcctcttgtggccatgtacccagggctggctggcctgccatttgcctctccccggagacagccgttcttctgcaaccacaccccgtgcctagccacaaccccaggctgcagctgctcagaagctccaggcattttgtttctggtgaccgcccctaatgggatatcggtgatcactggtccacccttcctgtcagggcttttcyggggctgctcttggaaatgaagtcttaagtactgaataactcccctggggatagctggggcatttgtctagctgggctactttctaacactttgccatagctcagaccacttctcatcttcattctcaaatgcttttggcgtctccagggtgcctcaggaaaacatgaagtgggcattgtagaacttggggctactgtgtaactttggaagaaaaagttaagggtacttttaagtggatactgttttgatgaaattgccaacttcagggagcccagcttggagaaggaggacgtgagtattccttacaaggctcygaaacaattctttcttcacttagttttctttctgtgctctgcatcttatattccagcagggtcttccaatgcatggtttaataactacyagaactggccaggtgcagtggctcacgcctgtaatcccagaactttgggaggctaagacaggcagatcacttgaggccaggagttcgagaccagcctggacaacatggtgatacccagtttctactaaaaatacaaaaattagtcgggcatggtgatgtgcacctgtagtcccagctgctcgggaggctgaggcaggagaatcgcttgaacccgggagacagaggttgcaacgagccaagatcgagccactgcgctccggcctgggtgacaggagactccatctcaaaaaataaaattaaaaaaaaactactacaataaattatcaccttggactgtataaaacaacttttaaactagtctttttaaaaagtacacttaaataaaaatct

SEQ ID NO: 220 - DNA, 2556 bp, Homo sapiens
aacttgctctaacttcctcggccgagccgggccgcgccgccgctgccgccgccgcgcgcggattctgcttctcagaagatgcactattatagatactctaacgccaaggtcagctgctggtacaagtacctccttttcagctacaacatcatcttctggttggctggagttgtcttccttggagtcgggctgtgggcatggagcgaaaagggtgtgctgtccgacctcaccaaagtgacccggatgcatggaatcgaccctgtggtgctggtcctgatggtgggcgtggtgatgttcaccctggggttcgccggctgcgtgggggctctgcgggagaatatctgcttgctcaactttttctgtggcaccatcgtgctcatcttcttcctggagctggctgtggccgtgctggccttcctgttccaggactgggtgagggaccggttccgggagttcttcgagagcaacatcaagtcctaccgggacgatatcgatctgcaaaacgtcatcgactcccttcagaaagctaaccagtgctgtggcgcatatggccctgaagactgggacctcaacgtctacttcaattgcagcggtgccagctacagccgagagaagtgcggggtccccttctcctgctgcgtgccagatcctgcgcaaaaagttgtgaacacacagtgtggatatgatgtcaggattcagctgaagagcaagtgggatgagtccatcttcacgaaaggctgcatccaggcgctggaaagctggctcccgcggaacatttacatygtggctggcgtcttcatcgccatctcgctgttgcagatatttggcatcttcctggcaaggacgctgatctcagacatcgaggcagtgaaggccggccgtcacttctgaggagcagagttgagggagccgagctgagccacgctgggaggccagagcctttctctgccatcagccctacgtccagagggagaggagccgacacccccagagccagtgccccatcttaagcatcagcgtgacgtgacctctctgtttctgcttgctggtgctgaagaccaagggtcccccttgttacctgcccaaacttgtgactgcatccctctggagtctacmcagagacagagaatgtgtctttatgtgggagtggtgactckgaaagacagagagggctcctgtggctgccaggagggcttgactcagaccccctgcagctcaagcatgtctgcaggacaccctggtcccctctccactggcatccagacatctgctttgggtcatccacatctgtgggtgggccgtgggtagagggacccacaggcgtggaccgggcatctccctccatcaagcaaagcagcatgggggcctgcccgtaacgggaggcggacgtggccccrctgggcctctgagtgccagcgcagtctgctgggacatgcacatatcaggggttgtttgcaggatcctcagccatgttcaagtgaagtaagcctgagcmagtgcgtggactggtgccacgggagtgccttgtccactgtmcccctgtgtccaccagctattctcctggcgccggaactgcctctggtcttgatagcattaagccctgatggcgccggtggcgcggtgggcatggttcttcactgagagccggctctccttttcttaaagtgtgtaaatagtttatttataggggtaagaatgttctcacaccatttcacttcctcttcctctcctccagcattctcctctgagcagccttagatagtgtccatggctggagccgaccctttgagtccccttgagtgtcttaagaaccagcccacaacagcctctctttctcctccacatactgcagcctccctccatgcatcccacatacaagcactcccccactccccagcgtggcctcactgtcttctggtcttggtgctactgaaattgtcacccagaatttgaatcctgaccctccccactgcaagcccagggagccccagcccaagatggccagcctgaaactgttggccagggctcctcttgtggccatgtacccagggctggctggcctgccatttgcctctccccggagacagccgttcttctgcaaccacaccccgtgcctagccacaaccccaggctgcagctgctcagaagctccaggcattttgtttctggtgaccgcccctaatgggatatcggtgatcactggtccacccttcctgtcagggcttttcyggggctgctcttggaaatgaagtcttaagtactgaataactcccctggggatagctggggcatttgtctagctgggctaccttctaacactttgccatagctcagaccacttctcatcgttcagggatggactgcaaccttaatttacttgccggagtgtacattctagtgtggtgtatactggtggctgttgatgacgatttttttttttttttttcacaattctctgtagactaggagaagaatgcttgtgtttttcggaagtgtgatgcttctctttgactgccaaactcttttatggaatatatctttatattaaaaaaaaaa

SEQ ID NO: 221 - DNA, 2507 bp, Homo sapiens
cgggcctggccccgagcagctgaagccyggggtcagcaggcgctgcgggcgcagctccggtgcaagcgaggacacgacacatgcagtggcttctggactgcgcgatgactggacgcaagtaacttctaggtctgcagacaagaggaagagaagatgaaggaagactgtctgccgarttctyacgtgcccatcagtgacagcaagtccattcagaagtcggagctcttaggcctgctgaaaacctacaactgctaccatgagggcaagagcttccagctgagacaccgtgagaagggactctgatcatcgaggggctcctcaacattgcctgggggctgaggcggcccatccggctgcagatgcaggatgaccgggagcaggtgcacctcccctccacytcatggatgcccrgacggcctagctgccctctaaaggagccatcgccccagaacgggaacatcacagcccaggggccaagcattcagccagtgcacaaggctgagagttccacagacagctcggggcccctggaggaggcagaggaggccccccagctgatgcggaccaagagcgaygccagttgcatgagccagaggaggcccaagtgccgcrcccccggtgasgcccagcgcatccggcgacaccggttctctatcaacggccacttctacaatcataagacctccgtgtttactccagcctatggatccgtgaccaatgtgagggtcaacagcaccatgacaaccctgcaggtgctcaccctgctgctgaacaaatttagggtggaagatggccccagtgagttcgcactctacatcgttcacgagtctggggagcggacaaaattaaaagactgcgagtacccgctgatttccagaatcctgcatgggccatgtgagaagatcgccaggatcttcctgatggaagctgacttgggcgtggaagtcccccatgaagtcgctcagtacattaagtttgaaatgccggtgctggacagttttgttgaaaaattaaaagaagaggaagaaagagaaataatcaaactgaccatgaagttccaagccctgcgtctgacgatgctgcagcgcctggagcagctggtggaggccaagtaactggccaacacctgcctcttccaaagtccccagcagtggcaggtgtacactgagccctggttgctggccccggccggtcacattgactgatggccaccgcctgacgaatcgagtgcctgtgtgtctacctctctgaagcctgagcaccatgattcccacagccagstcttggctccaagatgagcacccacaggaagccgacccaggcctgaggggccaggaacttgctgggtcagatctgtgtggccagccctgtccacaccatgcctctcctgcactggagagcagtgctggcccagcccctgcggcttaggcttcatctgcttgcacattgcctgtcccagagcccctgtgggtccacaagcccctgtcctcttccttcatatgagattcttgtctgccctcatatcacgctgccccacaggaatgctgctgggaaaagcagggcctgccagcaggtatgagatctagcctgctttcagccatcaccttgccacagtgtccccggcttctaagcctccaatatcaccctgtgagcctcgcacagctcagccccaacacagaggtgagaccaggaataaggccacaagtatctcactttctctgcagaaatcaatctttacttcatcagagagacctaaagcgattcttacaaggagcttgctgcaagaaacacggtcattcaatcacattgaggagggtccacatggcattgagagggtgctgcccgctcaatgcccagcagcagctctggaaggcagtgctcagccccatcaccactgtcccgtggatgcctgtgtacctcttgccttttctgggcttgcgtttctctcctctagtgggtggggatgactttcaatgactttcaatacttcccctgaaggaagaatgataaggagaaatgtctgttttgaggaaagggctttgaattccccagatactgaacaatttgtgtttgtgactgatggagaatttcaggaatgaatgagaaagcctttgcgaaactatgcaacagtttacatcagtcatgtgaagtatttgtctaaaacagagcaaactgaagaccaaattattctcctgttgaggtccgtggatggcagatttaaagggaagaaccacaaaggcttgcaaagataggagaggctccatctctaatgcatgtagaagctccttacgggtgcccatcaagagcatagcttggaagccaccatgctgtgcggaactgcgtcagggcaaatgtcacagcaggatttccccaacccagctccatcatcacagacacagagagctgcaggggaggcctgcccactgttttgtcgactctgccctcctctggcagcatagatccttaggtgctcaataaaggtgtgctgtattgaactgaagaagtga

SEQ ID NO: 222 - DNA, 2396 bp, Homo sapiens
caagtaacttctaggtctgcagacaagaggaagagaagatgaaggaagactgtctgccgarttctyacgtgcccatcagtgacagcaagtccattcagaagtcggagctcttaggcctgctgaaaacctacaactgctaccatgagggcaagagcttccagctgagacaccgtgaggaagaagggactctgatcatcgaggggctcctcaacattgcctgggggctgaggcggcccatccggctgcagatgcaggatgaccgggagcaggtgcacctcccctccacytcatggatgcccrgacggcctagctgccctctaaaggagccatcgccccagaacgggaacatcacagcccaggggccaagcattcagccagtgcacaaggctgagagttccacagacagctcggggcccctggaggaggcagaggaggccccccagctgatgcggaccaagagcgaygccagttgcatgagccagaggaggcccaagtgccgcrcccccggtgasgcccagcgcatccggcgacaccggttctctatcaacggccacttctacaatcataagacctccgtgtttactccagcctatggatccgtgaccaatgtgagggtcaacagcaccatgacaaccctgcaggtgctcaccctgctgctgaacaaatttagggtggaagatggccccagtgagttcgcactctacatcgttcacgagtctggggagcggacaaaattaaaagactgcgagtacccgctgatttccagaatcctgcatgggccatgtgagaagatcgccaggatcttcctgatggaagctgacttgggcgtggaagtcccccatgaagtcgctcagtacattaagtttgaaatgccggtgctggacagttttgttgaaaaattaaaagaagaggaagaaagagaaataatcaaactgaccatgaagttccaagccctgcgtctgacgatgctgcagcgcctggagcagctggtggaggccaagtaactggccaacacctgcctcttccaaagtccccagcagtggcaggtgtacactgagccctggttgctggccccggccggtcacattgactgatggccaccgcctgacgaatcgagtgcctgtgtgtctacctctctgaagcctgagcaccatgattcccacagccagstcttggctccaagatgagcacccacaggaagccgacccaggcctgaggggccaggaacttgctgggtcagatctgtgtggccagccctgtccacaccatgcctctcctgcactggagagcagtgctggcccagcccctgcggcttaggcttcatctgcttgcacattgcctgtcccagagcccctgtgggtccacaagcccctgtcctcttccttcatatgagattcttgtctgccctcatatcacgctgccccacaggaatgctgctgggaaaagcagggcctgccagcaggtatgagatctagcctgctttcagccatcaccttgccacagtgtccccggcttctaagcctccaatatcaccctgtgagcctcgcacagctcagccccaacacagaggtgagaccaggaataaggccacaagtatctcactttctctgcagaaatcaatctttacttcatcagagagacctaaagcgattcttacaaggagcttgctgcaagaaacacggtcattcaatcacattgaggagggtccacatggcattgagagggtgctgcccgctcaatgcccagcagcagctctggaaggcagtgctcagccccatcaccactgtcccgtggatgcctgtgtacctcttgccttttctgggcttgcgtttctctcctctagtgggtggggatgactttcaatgactttcaatacttcccctgaaggaagaatgataaggagaaatgtctgttttgaggaaagggctttgaattccccagatactgaacaatttgtgtttgtgactgatggagaatttcaggaatgaatgagaaagcctttgcgaaactatgcaacagtttacatcagtcatgtgaagtatttgtctaaaacagagcaaactgaagaccaaattattctcctgttgaggtccgtggatggcagatttaaagggaagaaccacaaaggcttgcaaagataggagaggctccatctctaatgcatgtagaagctccttacgggtgcccatcaagagcatagcttggaagccaccatgctgtgcggaactgcgtcagggcaaatgtcacagcaggatttccccaacccagctccatcatcacagacacagagagctgcaggggaggcctgcccactgttttgtcgactctgccctcctctggcagcatagatccttaggtgctcaataaaggtgtgctgtattgaactgaagaagtga

SEQ ID NO: 223 - DNA, 2511 bp, Homo sapiens
cgggcctggccccgagcagctgaagccyggggtcagcaggcgctgcgggcgcagctccggtgcaagcgaggacacgacacatgcagtggcttctggactgcgcgatgactggacgcaagtaacttctaggtctgcagacaagaggaagagaagatgaaggaagactgtctgccgarttctyacgtgcccatcagtgacagcaagtccattcagaagtcggagctcttaggcctgctgaaaacctacaactgctaccatgagggcaagagcttccagctgagacaccgtgaggaagaagggactctgatcatcgaggggctcctcaacattgcctgggggctgaggcggcccatccggctgcagatgcaggatgaccgggagcaggtgcacctcccctccacytcatggatgcccrgacggcctagctgccctctaaaggagccatcgccccagaacgggaacatcacagcccaggggccaagcattcagccagtgcacaaggctgagagttccacagacagctcggggcccctggaggaggcagaggaggccccccagctgatgcggaccaagagcgaygccagttgcatgagccagaggaggcccaagtgccgcrcccccggtgasgcccagcgcatccggcgacaccggttctctatcaacggccacttctacaatcataagacctccgtgtttactccagcctatggatccgtgaccaatgtgagggtcaacagcaccatgacaaccctgcaggtgctcaccctgctgctgaacaaatttagggtggaagatggccccagtgagttcgcactctacatcgttcacgagtctggggagcggacaaaattaaaagactgcgagtacccgctgatttccagaatcctgcatgggccatgtgagaagatcgccaggatcttcctgatggaagctgacttgggcgtggaagtcccccatgaagtcgctcagtacattaagtttgaaatgccggtgctggacagttttgttgaaaaattaaaagaagaggaagaaagagaaataatcaaactgaccatgaagttccaagccctgcgtctgacgatgctgcagcgcctggagcagctggtggaggccaagtaactggccaacacctgcctcttccaaagtccccagcagtggcaggtgtacactgagccctggttgctggccccggccggtcacattgactgatggccaccgcctgacgaatcgagtgcctgtgtgtctacctctctgaagcctgagcaccatgattcccacagccagstcttggctccaagatgagcacccacaggaagccgacccaggcctgaggggccaggaacttgctgggtcagatctgtgtggccagccctgtccacaccatgcctctcctgcactggagagcagtgctggcccagcccctgcggcttaggcttcatctgcttgcacattgcctgtcccagagcccctgtgggtccacaagcccctgtcctcttccttcatatgagattcttgtctgccctcatatcacgctgccccacaggaatgctgctgggaaaagcagggcctgccagcaggtatgagatctagcctgctttcagccatcaccttgccacagtgtccccggcttctaagcctccaatatcaccctgtgagcctcgcacagctcagccccaacacagaggtgagaccaggaataaggccacaagtatctcactttctctgcagaaatcaatctttacttcatcagagagacctaaagcgattcttacaaggagcttgctgcaagaaacacggtcattcaatcacattgaggagggtccacatggcattgagagggtgctgcccgctcaatgcccagcagcagctctggaaggcagtgctcagccccatcaccactgtcccgtggatgcctgtgtacctcttgccttttctgggcttgcgtttctctcctctagtgggtggggatgactttcaatgactttcaatacttcccctgaaggaagaatgataaggagaaatgtctgttttgaggaaagggctttgaattccccagatactgaacaatttgtgtttgtgactgatggagaatttcaggaatgaatgagaaagcctttgcgaaactatgcaacagtttacatcagtcatgtgaagtatttgtctaaaacagagcaaactgaagaccaaattattctcctgttgaggtccgtggatggcagatttaaagggaagaaccacaaaggcttgcaaagataggagaggctccatctctaatgcatgtagaagctccttacgggtgcccatcaagagcatagcttggaagccaccatgctgtgcggaactgcgtcagggcaaatgtcacagcaggatttccccaacccagctccatcatcacagacacagagagctgcaggggaggcctgcccactgttttgtcgactctgccctcctctggcagcatagatccttaggtgctcaataaaggtgtgctgtattgaactgaagaagtga

SEQ ID NO: 224 - DNA, 2118 bp, Homo sapiens
ggcggtcggtctcgccttgtcgccagctccattttcctctgaatgtatcctgtcaggtataatgtcagtgaatggcaagaaagttcttcatatggatcgaaacccttactacggaggagaragtgcatctataacaccattggaagatttatacaaaagatttaaaataccaggatcaccacccgagtcaatggggagaggaagagactggaatgttgacttgattcccaagttccttatggctaatggtcagctggttaagatgctgctttatacagaggtaactcgctatctggattttaaagtgactgaagggagctttgtctataagggtggaaaaatctacaaggttccttccactgaagcagaagccctggcatctagcctaatgggattgtttgaaaaacgtcgcttcaggaaattcctagtgtatgttgccaacttcgatgaaaaagatccaagaacttttgaaggcattgatcctaagaagaccacratgcgagatgtgtataagaaatttgatttgggtcaagacgttatagattttactggtcatgctcttgcactttacagaactgatgattacttagatcaaccgtgttatgaaaccattaatagaattaaactttacagtgaatctttggcaagatatggcaaaagcccatacctttatccactctatggccttggagaactgccccaaggatttgcaaggctaagtgctatttatggaggtacctatatgctgaataaacccattgaagaaatcattgtacagaatggaaaagtaattggtgtaaaatctgaaggagaaattgctcgctgtaagcagctcatctgtgaccccagctacgtaaaagatcgggtagaaaaagtgggccaggtgatcagagttatttgcatcctcagccaccccatcaagaacaccaatgatgccaactcctgccagatcattattccacagaaccaagtcaatcgaaagtcagatatctacgtctgcatgatctcctttgcgcacaatgtagcagcacaagggaagtacattgctatagttagtacaactgtggaaaccaaggagcctgagaaggaaatcagaccagctttggagctcttggaaccaattgaacagaaatttgttagcatcagtgacctcctggtaccaaaagacttgggaacagaaagccagatctttatttcccgcacatatgatgccacyactcattttgagacaacgtgtgatgacattaaaaacatctataagaggatgacaggatcagagtttgactttgaggaaatgaagcgcaagaagaatgacatctatggggaagactaacagcagtacatgttattatgtaattaggacacatttaaaatttggcaaataatgcatataatgaaatcaatattgtaaggcctgyttttgtaatgaaaatggagagaatgaagagcgctgtgccagtaaatactccccttcacctttctaattattaacttgttttcatggagtggctattcagcattggcagttaccacattctgttcaatttaaccaaactggcttttttttttttctagtgaagttaaacaaacattgggataccgacacagacaacttgagacagtttttttaatcttttaatcagtgtagctatgtgctgctgctgctcaagagctggatccatacaggttgtgtgycatctgtcctcttgaggttcaggagattctaaattgaatattccacggtttgggacagcatccggaagttttccctatgactttatrttttgtattatgtcaaatgttatggcagggcccaaatagcatagccacaagtttggtttatgtgggcataaaattctaaccaaaccccagacatagggagtcatttggagaaagcctgtatgtggtgttttaacctaataaagttgatgagagagaaggggagaggaagcgaacataaagcgggtcaagtgtagtgcatcttttgtatctcaggcgtggcttcttcagtggaccaagctgcaatgcagtattgacttgacagagcctctacttctgtctcaaaatggctccaaatgatttctgtactgcaaaataaagccaaattctggaaactac

SEQ ID NO: 225 - DNA, 2414 bp, Homo sapiens
agagtgccgggagcgcctgattggcggccctcccggcgcctgcaggccccgccccggctgcggaggctcagtcacagccctcccctcctcgctccctcccctcctctccccgcccagttcttctcttcccgtctgaggtggcggtcggtctcgccttgtcgccagctccattttcctctctttctcttcccctttccttcgcgcccaagagcgcctcccagcctcgtagggtggtcacggagcccctgcgccttttccttgctcgggtcctgcgtccgcgcctgcccygccatgaatgaggagtacgacgtgatcgtgctgggcaccggcctgacggaatgtatcctgtcaggtataatgtcagtgaatggcaagaaagttcttcatatggatcgaaacccttactacggaggagaragtgcatctataacaccattggaagatttatacaaaagatttaaaataccaggatcaccacccgagtcaatggggagaggaagagactggaatgttgacttgattcccaagttccttatggctaatggtcagctggttaagatgctgctttatacagaggtaactcgctatctggattttaaagtgactgaagggagctttgtctataagggtggaaaaatctacaaggttccttccactgaagcagaagccctggcatctagcctaatgggattgtttgaaaaacgtcgcttcaggaaattcctagtgtatgttgccaacttcgatgaaaaagatccaagaacttttgaaggcattgatcctaagaagaccacratgcgagatgtgtataagaaatttgatttgggtcaagacgttatagattttactggtcatgctcttgcactttacagaactgatgattacttagatcaaccgtgttatgaaaccattaatagaattaaactttacagtgaatctttggcaagatatggcaaaagcccatacctttatccactctatggccttggagaactgccccaaggatttgcaaggctaagtgctatttatggaggtacctatatgctgaataaacccattgaagaaatcattgtacagaatggaaaagtaattggtgtaaaatctgaaggagaaattgctcgctgtaagcagctcatctgtgaccccagctacgtaaaagatcgggtagaaaaagtgggccaggtgatcagagttatttgcatcctcagccaccccatcaagaacaccaatgatgccaactcctgccagatcattattccacagaaccaagtcaatcgaaagtcagatatctacgtctgcatgatctcctttgcgcacaatgtagcagcacaagggaagtacattgctatagttagtacaactgtggaaaccaaggagcctgagaaggaaatcagaccagctttggagctcttggaaccaattgaacagaaatttgttagcatcagtgacctcctggtaccaaaagacttgggaacagaaagccagatctttatttcccgcacatatgatgccacyactcattttgagacaacgtgtgatgacattaaaaacatctataagaggatgacaggatcagagtttgactttgaggaaatgaagcgcaagaagaatgacatctatggggaagactaacagcagtacatgttattatgtaattaggacacatttaaaatttggcaaataatgcatataatgaaatcaatattgtaaggcctgyttttgtaatgaaaatggagagaatgaagagcgctgtgccagtaaatactccccttcacctttctaattattaacttgttttcatggagtggctattcagcattggcagttaccacattctgttcaatttaaccaaactggcttttttttttttctagtgaagttaaacaaacattgggataccgacacagacaacttgagacagtttttttaatcttttaatcagtgtagctatgtgctgctgctgctcaagagctggatccatacaggttgtgtgycatctgtcctcttgaggttcaggagattctaaattgaatattccacggtttgggacagcatccggaagttttccctatgactttatrttttgtattatgtcaaatgttatggcagggcccaaatagcatagccacaagtttggtttatgtgggcataaaattctaaccaaaccccagacatagggagtcatttggagaaagcctgtatgtggtgttttaacctaataaagttgatgagagagaaggggagaggaagcgaacataaagcgggtcaagtgtagtgcatcttttgtatctcaggcgtggcttcttcagtggaccaagctgcaatgcagtattgacttgacagagcctctacttctgtctcaaaatggctccaaatgatttctgtactgcaaaataaagccaaattctggaaactac

SEQ ID NO: 226 - DNA, 2355 bp, Homo sapiens
agagtgccgggagcgcctgattggcggccctcccggcgcctgcaggccccgccccggctgcggaggctcagtcacagccctcccctcctcgctccctcccctcctctccccgcccagttcttctcttcccgtctgaggtggcggtcggtctcgccttgtcgccagctccattttcctctctttctcttcccctttccttcgcgcccaagagcgcctcccagcctcgtagggtggtcacggagcccctgcgccttttccttgctcgggtcctgcgtccgcgcctgcccygccatgaatgaggagtacgacgtgatcgtgctgggcaccggcctgacggaatgtatcctgtcaggtataatgtcagtgaatggcaagaaagttcttcatatggatcgaaacccttactacggaggagaragtgcatctataacaccattggaagatttatacaaaagatttaaaataccaggatcaccacccgagtcaatggggagaggaagagactggaatgttgacttgattcccaagttccttatggctaatggtcagctggttaagatgctgctttatacagaggtaactcgctatctggattttaaagtgactgaagggagctttgtctataagggtggaaaaatctacaaggttccttccactgaagcagaagccctggcatctagcctaatgggattgtttgaaaaacgtcgcttcaggaaattcctagtgtatgttgccaacttcgatgaaaaagatccaagaacttttgaaggcattgatcctaagaagaccacratgcgagatgtgtataagaaatttgatttgggtcaagacgttatagattttactggtcatgctcttgcactttacagaactgatgattacttagatcaaccgtgttatgaaaccattaatagaattaaactttacagtgaatctttggcaagatatggcaaaagcccatacctttatccactctatggccttggagaactgccccaaggatttgcaaggctaagtgctatttatggaggtacctatatgctgaataaacccattgaagaaatcattgtacagaatggaaaagtaattggtgtaaaatctgaaggagaaattgctcgctgtaagcagctcatctgtgaccccagctacgtaaaagatcgggtagaaaaagtgggccaggtgatcagagttatttgcatcctcagccaccccatcaagaacaccaatgatgccaactcctgccagatcattattccacagaaccaagtcaatcgaaagtcagatatctacgtctgcatgatctcctttgcgcacaatgtagcagcacaagggaagtacattgctatagttagtacaactgtggaaaccaaggagcctgagaaggaaatcagaccagctttggagctcttggaaccaattgaacagaaatttgttagcatcagtgacctcctggtaccaaaagacttgggaacagaaagccagatctttatttcccgcacatatgatgccacyactcattttgagacaacgtgtgatgacattaaaaacatctataagaggatgacaggatcagagtttgactttgaggaaatgaagcgcaagaagaatgacatctatggggaagactaacagcagtacatgttattatgtaattaggacacatttaaaatttggcaaataatgcatataatgaaatcaatattgtaaggcctgyttttgtaatgaaaatggagagaatgaagagcgctgtgccagtaaatactccccttcacctttctaattattaacttgttttcatggagtggctattcagcattggcagttaccacattctgttcaatttaaccaaactggcttttttttttttctagtgaagttaaacaaacattgggataccgacacagacaacttgagacagtttttttaatcttttaatcagtgtagctatgtgctgctgctgctcaagagctggatccatacaggttgtgtgycatctgtcctcttgaggttcaggagattctaaattgaatattccacggtttgggacagcatccggaagttttccctatgactttatrtttgtgggcataaaattctaaccaaaccccagacatagggagtcatttggagaaagcctgtatgtggtgttttaacctaataaagttgatgagagagaaggggagaggaagcgaacataaagcgggtcaagtgtagtgcatcttttgtatctcaggcgtggcttcttcagtggaccaagctgcaatgcagtattgacttgacagagcctctacttctgtctcaaaatggctccaaatgatttctgtactgcaaaataaagccaaattctggaaacta

SEQ ID NO: 227 - DNA, 5555 bp, Homo sapiens
  misc_feature (1)...(5555): n = A,T,C or G, or insertion/deletion polymorphism (see Tables 1-2)
ctgccggaagttttggagcgccggacaagctgaggtccgcgactcgtcgctaagattccccaaaactgagatttcaagaaaattcaccctttccgctttctttggcgcccttcaaccgtgaaggaaatgaaggttgagaacctggaacccgcttccaatgaccaagccctttctctgtgcctcacaacagtcttgcgctgtagctgtttttattacccctattttactactggggaggagatttgaggtcctgaaagtgaagtgacttgctggacgtcacttagcagaggagatggcgaaacctggattagaggcgatgccttctaactcccagcgtggacttgcctcctttcctgggggtgactgaatgcccagccagggacgcgacgtctctggccagcagaaatacggcctcctccccgccgactgggcaaagggggaccttgcggccaaggagggattcgcaggcgggccgggggtgggagcgggggccggagccggagccttggcccgcccccgggcggcgctgtgattggccggccgctccggcgggcgtcgcgattggccgtcctgcagccgttgagatttgaactcggtatttgtggctttgcccgcgcgttgccagactcagaggcggccctttgcctctgcctgccggggattggccggattctccgccgacttgaaaactgccttgctaattggtgcgtgttgtgcacgcgtgttttttccttttcatttcagcctgactgccggaatcagagccgcgggtgagatccccagccctgtgagcctgtaggagtagaatggctccccaaatgtatgagttccatctgccattatccccagaggagttgttgaaaagtggaggggtgaatcagtatgttgtgcaagaggtactgtccatcaaacatcttccaccacagcttagagcttttcaggctgcctttcgagctcaggggcccctggctatgctgcagcactttgatactatctacagcattttgcatcactttcgaagtatagatcctggcctcaaagaagatactctgsaattcctgataaaagtggtatcccgccactcccaggagcttccagctatcctggatgatacaactttgagtggatcagatagaaacgcccatctaaatgccctcaaaatgaactgttaygctctgatacgtctcctggaatcctttgagaccatggccagccagacaaaccttgtggacctggaccttggtgggaagggtaagaaagctcggaccaaggcagcccatggctttgactgggaagaagagaggcaaccaattcttcagcttttaacacagctacttcagttggacatccgtcacctgtggaaccactcaataattgaagaagaatttgtcagtttggttactggctgttgctaccgccttctggagaatcccaccattaatcaccagaagaaccgccccactcgggaagccataacacacctgcttggtgtagccttgacccgttataaccatatgctcagtgctacagtgaagatcatccagatgctgcagcactttgaacacctggcacctgtactggttgcagccgtgagtctatgggcaactgactatggaatgaagagcatagtgggagagattgtaagagagattggacaaaagtgtccccaagagctgagtcgagacccttcagggacaaagggctttgcagcattcctgacagaactagcagaacgtgtcccagctatcctgatgtccagcatgtgcattttgctagatcacctggatggagaaaattacatgatgcgtaatgctgtgctggcagccatggcggagatggtgctgcaggttctcagtggcgatcaactggaagcagcagcccgagacaccagagaccagttcttggatactttacaagcccatggccatgatgtcaactcctttgtgcggagccgtgttttgcagctcttcacccgaattgtccagcagaaggctctccccctgacacgtttccaggcagtggtggctttagctgtgggacgtctggcagacaagtcagtgctagtatgtaaaaatgccatccagctgctggccagttttctagccaataatcctttctcctgcaagcttastgatgctgaccttgccggaccactgcagaaggagacccagaaattacaagagatgagggcccagaggcgaactgcagcagcttctgcagtgctggacccagaggaggagtgggaagccatgctgccagagttgaagtctaccctgcagcagcttctacagcttccccagggagaggaggagattcctgagcaaattgccaatacagagacaactgaagatgtgaaaggacgcatctatcaactgcttgccaaagctagttacaaaaaggccatcattctcactcgagaagccacaggccacttccaggagtccgaacccttcagtcatatagacccagaggagtcagaggagaccaggctcttgaatatcttaggacttatcttcaaaggcccagcagcttccacayaagaaaagaatccccgggagtctacaggaaacatggtcacaggacagactgtctgtaaaaataaacccaatatgtcggatcctgaggaatccaggggaaatgatgaactagtgaagcaggagatgctggtacagtatctgcaggatgcctacagcttctcccggaagattacagaggccattggcatmatcagcaagatgatgtatgaaaacacaactacagtggtgcaggaggtgattgaattctttgtgatggtcttccaatttggggtaccccaggccctgtttggggtgcgccgtatgctgcctctcatctggtctaaggagcctggtgtccgggaagccgtgcttaatgcctaccgccaactctacctcaaccccaaaggggactctgccagagccaaggcccaggctttgattcagaatctctctctgctgctagtggatgcctcggttgggaccattcagtgtcttgaggaaattctctgtgagtttgtgcagaaggatgagttgaaaccagcagtgacccagctgctgtgggagcgggccaccgagaaggtcgcctgctgtcctctggagcgctgttcctctgtcatgcttcttggcatgatggcacgaggaaagccagaaattgtgggaagcaatttagacacactgntgagcatagggctggatgagaagtttccacaggactacaggctggcccagcaggtgtgccatgccattgccaacatctcggacaggagaaagccttctctgggcaaacgtcacccccccttccggctgcctcaggaacacaggttgtttgagcgactgcgggagacagtcacaaaaggctttgtccacccagacccactctggatcccattcaaagaggtggcagtgaccctcatttaccaactggcagagggccccgaagtgatctgtgcccagatattgcagggctgtgcaaaacaggccctggagaagctagaagagaagagaaccagtcaggaggacccgaaggagtcccccgcaatgctccccactttcctgttgatgaacctgctgtccctggctggggatgtggctctgcagcagctggtccacttggagcaggcagtgagtggagagctctgccggcgccgagttctccgggaagaacaggagcacaagaccaaagatcccaaggagaagaatacgagctctgagaccaccatggaggaggagctggggctggttggggcaacagcagatgacacagaggcagaactaatccgtggcatctgcgagatggaactgttggatggcaaacagacactggctgcctttgttccactcttgcttaaagtctgtaacaacccaggcctctatagcaacccagacctctctgcagctgcttcacttgcccttggcaagttctgcatgatcagtgccactttctgcgactcccagcttcgtcttctgttcaccatgctggaaaagtctccacttcccattgtccggtctaacctcatggttgccactggggatctggccatccgctttcccaatctggtggacccctggactcctcatctgtatgctcgyctccgggaccctgctcagcaagtgcggaaaacagcggggctggtgatgacccacctgatcctcaaggacatggtgaaggtgaaggggcaggtcagygagatggcggtgctgctcatcgaccccgagcctcagattgctgccctggccaagaacttcttcaatgagctctcccacaagggcaaygcaatctatratctccttccagatatcatcagccgcctgtcagaccccgagctgggggtggaggaagagcctttccacaccatcatgaaacagctcctctcctacatcaccaaggacaagcagacagagagcctggtggaaaagctgtgtcagcggttccgcacatccckaactgagcggcagcagcgagacctggcctactgtgtgtcacagctgcccctcacagagcgaggcctccgtaagatgcttgacaattttgactgttttggagacaaactgtcagatgagtccatcttcagtgcttttttgtcagttgtrggcaagctgcgacgtggggccaagcckgagggcaaggctataatagatgaatttgagcagaagcttcgggcctgtcataccagaggtttggatggaatcaaggagcttgagattggccaagcaggtagccagagagcgccatcagccaagaaaccatccastggttctaggtaccagcctctggcttctacagcctcagacaatgactttgtcacaccagagccccgccgtactacccgtcggcatccaaacacccagcagcgagcttccaaaaagaaacccaaagttgtcttctcaagtgatgagtccagtgaggaagatctttcagcagagatgacagaagacgagacacccaagaaaacaactcccattctcagagcatcggctcgcaggcacagatcctaggaagtctgttcctgtcctccctgtgcagggtatcctgtagggtgacctggaattcgaattctgtttcccttgtaaaatatttgtctgtctcttttttwwaaaaaaaaaaaaggccgggcactgtggctcacgcctgtaatcccagcactttgcgataccaaggcgggtggataacctgaggtagggagttcgagaccagcctgaccaacatggagaaaccccatctctactaaaaataaaaaattagccgggcgtattggcgtgcgcctgtaatcccagctactcaagaggctgaggcaggagaatcgcctgaacccagaggcggaggttgtagtgagccgaaatcacaccattgcactccagcttgggcaacaatagcgaacctccatctcaaattwaaaaaaaaatgcctacacgctctttaaaatgcaaggctttctcttaaattagcctaactgaactgcgttgagctgcttcaactttggaatatatgtttgccaatctccttgttttctaatgaataaatgtttttatatactttta

SEQ ID NO: 228 - DNA, 4932 bp, Homo sapiens
  misc_feature (1)...(4932): n = A,T,C or G, or insertion/deletion polymorphism (see Tables 1-2)
tttggagcgccggacaagctgaggtccgcgactcgtcgctaagattccccaaaactgagatttcaagaaaattcaccctttccgctttctttggcgcccttcaaccgtgaaggaaatgaagcctgactgccggaatcagagccgcgggtgagatccccagccctgtgagcctgtaggagtagaatggctccccaaatgtatgagttccatctgccattatccccagaggagttgttgaaaagtggaggggtgaatcagtatgttgtgcaagaggtactgtccatcaaacatcttccaccacagcttagagcttttcaggctgcctttcgagctcaggggcccctggctatgctgcagcactttgatactatctacagcattttgcatcactttcgaagtatagatcctggcctcaaagaagatactctgsaattcctgataaaagtggtatcccgccactcccaggagcttccagctatcctggatgatacaactttgagtggatcagatagaaacgcccatctaaatgccctcaaaatgaactgttaygctctgatacgtctcctggaatcctttgagaccatggccagccagacaaaccttgtggacctggaccttggtgggaagggtaagaaagctcggaccaaggcagcccatggctttgactgggaagaagagaggcaaccaattcttcagcttttaacacagctacttcagttggacatccgtcacctgtggaaccactcaataattgaagaagaatttgtcagtttggttactggctgttgctaccgccttctggagaatcccaccattaatcaccagaagaaccgccccactcgggaagccataacacacctgcttggtgtagccttgacccgttataaccatatgctcagtgctacagtgaagatcatccagatgctgcagcactttgaacacctggcacctgtactggttgcagccgtgagtctatgggcaactgactatggaatgaagagcatagtgggagagattgtaagagagattggacaaaagtgtccccaagagctgagtcgagacccttcagggacaaagggctttgcagcattcctgacagaactagcagaacgtgtcccagctatcctgatgtccagcatgtgcattttgctagatcacctggatggagaaaattacatgatgcgtaatgctgtgctggcagccatggcggagatggtgctgcaggttctcagtggcgatcaactggaagcagcagcccgagacaccagagaccagttcttggatactttacaagcccatggccatgatgtcaactcctttgtgcggagccgtgttttgcagctcttcacccgaattgtccagcagaaggctctccccctgacacgtttccaggcagtggtggctttagctgtgggacgtctggcagacaagtcagtgctagtatgtaaaaatgccatccagctgctggccagttttctagccaataatcctttctcctgcaagcttastgatgctgaccttgccggaccactgcagaaggagacccagaaattacaagagatgagggcccagaggcgaactgcagcagcttctgcagtgctggacccagaggaggagtgggaagccatgctgccagagttgaagtctaccctgcagcagcttctacagcttccccagggagaggaggagattcctgagcaaattgccaatacagagacaactgaagatgtgaaaggacgcatctatcaactgcttgccaaagctagttacaaaaaggccatcattctcactcgagaagccacaggccacttccaggagtccgaacccttcagtcatatagacccagaggagtcagaggagaccaggctcttgaatatcttaggacttatcttcaaaggcccagcagcttccacayaagaaaagaatccccgggagtctacaggaaacatggtcacaggacagactgtctgtaaaaataaacccaatatgtcggatcctgaggaatccaggggaaatgatgaactagtgaagcaggagatgctggtacagtatctgcaggatgcctacagcttctcccggaagattacagaggccattggcatmatcagcaagatgatgtatgaaaacacaactacagtggtgcaggaggtgattgaattctttgtgatggtcttccaatttggggtaccccaggccctgtttggggtgcgccgtatgctgcctctcatctggtctaaggagcctggtgtccgggaagccgtgcttaatgcctaccgccaactctacctcaaccccaaaggggactctgccagagccaaggcccaggctttgattcagaatctctctctgctgctagtggatgcctcggttgggaccattcagtgtcttgaggaaattctctgtgagtttgtgcagaaggatgagttgaaaccagcagtgacccagctgctgtgggagcgggccaccgagaaggtcgcctgctgtcctctggagcgctgttcctctgtcatgcttcttggcatgatggcacgaggaaagccagaaattgtgggaagcaatttagacacactgntgagcatagggctggatgagaagtttccacaggactacaggctggcccagcaggtgtgccatgccattgccaacatctcggacaggagaaagccttctctgggcaaacgtcacccccccttccggctgcctcaggaacacaggttgtttgagcgactgcgggagacagtcacaaaaggctttgtccacccagacccactctggatcccattcaaagaggtggcagtgaccctcatttaccaactggcagagggccccgaagtgatctgtgcccagatattgcagggctgtgcaaaacaggccctggagaagctagaagagaagagaaccagtcaggaggacccgaaggagtcccccgcaatgctccccactttcctgttgatgaacctgctgtccctggctggggatgtggctctgcagcagctggtccacttggagcaggcagtgagtggagagctctgccggcgccgagttctccgggaagaacaggagcacaagaccaaagatcccaaggagaagaatacgagctctgagaccaccatggaggaggagctggggctggttggggcaacagcagatgacacagaggcagaactaatccgtggcatctgcgagatggaactgttggatggcaaacagacactggctgcctttgttccactcttgcttaaagtctgtaacaacccaggcctctatagcaacccagacctctctgcagctgcttcacttgcccttggcaagttctgcatgatcagtgccactttctgcgactcccagcttcgtcttctgttcaccatgctggaaaagtctccacttcccattgtccggtctaacctcatggttgccactggggatctggccatccgctttcccaatctggtggacccctggactcctcatctgtatgctcgyctccgggaccctgctcagcaagtgcggaaaacagcggggctggtgatgacccacctgatcctcaaggacatggtgaaggtgaaggggcaggtcagygagatggcggtgctgctcatcgaccccgagcctcagattgctgccctggccaagaacttcttcaatgagctctcccacaagggcaaygcaatctatratctccttccagatatcatcagccgcctgtcagaccccgagctgggggtggaggaagagcctttccacaccatcatgaaacagctcctctcctacatcaccaaggacaagcagacagagagcctggtggaaaagctgtgtcagcggttccgcacatccckaactgagcggcagcagcgagacctggcctactgtgtgtcacagctgcccctcacagagcgaggcctccgtaagatgcttgacaattttgactgttttggagacaaactgtcagatgagtccatcttcagtgcttttttgtcagttgtrggcaagctgcgacgtggggccaagcckgagggcaaggctataatagatgaatttgagcagaagcttcgggcctgtcataccagaggtttggatggaatcaaggagcttgagattggccaagcaggtagccagagagcgccatcagccaagaaaccatccastggttctaggtaccagcctctggcttctacagcctcagacaatgactttgtcacaccagagccccgccgtactacccgtcggcatccaaacacccagcagcgagcttccaaaaagaaacccaaagttgtcttctcaagtgatgagtccagtgaggaagatctttcagcagagatgacagaagacgagacacccaagaaaacaactcccattctcagagcatcggctcgcaggcacagatcctaggaagtctgttcctgtcctccctgtgcagggtatcctgtagggtgacctggaattcgaattctgtttcccttgtaaaatatttgtctgtctcttttttwwaaaaaaaaaaaaggccgggcactgtggctcacgcctgtaatcccagcactttgcgataccaaggcgggtggataacctgaggtagggagttcgagaccagcctgaccaacatggagaaaccccatctctactaaaaataaaaaattagccgggcgtattggcgtgcgcctgtaatcccagctactcaagaggctgaggcaggagaatcgcctgaacccagaggcggaggttgtagtgagccgaaatcacaccattgcactccagcttgggcaacaatagcgaacctccatctcaaattwaaaaaaaaatgcctacacgctctttaaaatgcaaggctttctcttaaattagcctaactgaactgcgttgagctgcttcaactttggaatatatgtttgccaatctccttgttttctaatgaataaatgtttttatatactttta

SEQ ID NO: 229 - DNA, 1412 bp, Homo sapiens
gttgggaggcaccacaaatkcctaacaaactgctgaagcgccctccgaagggacagacctcatctccaccccgccccgtccctccgccagactggagcgcaaactatggtcgcattgatcactgaaggatcctcacagcaaccgctcctttccggagtcggatgagaggagagttgtgactggcaattggcaggggcggggcgggctaggcctgtagcgctgggcgaccgtcctgggcatggattgggccgcggggttgtcaccgttatccgggaggcgtggtcagcactaataaaggcggaggccggcgcggcagctgcagtaagttccagcgcagctagaccgcggggtrgtcggcgcgaggcggagcttggcagttccgtccacttcagccgcagcgtccctcrycgggtgtctcgccgcagcctccggagaggaacagaccctcactctctctgtcagaaaaatgtctgctccagctcagccacctgctgaagggacagaagggactgccccaggtgggggtccccctggccctcctcctaacatgaccagtaacagacgactacagcaaacccaggcacaagtggaggaggtggtggacatcatacgtgtgaacgtggacaaggtcctggagagggaccagaagctgtcagagctggatgaccgagctgatgccttgcaggcaggagcatcacaatttgagagcagtgctgcmaagctaaagaggaagtattggtggaaaaactgcaagatgatgatcatgctgggagccatctgtgccatcatcgtggtagttattgtaaggcgggactgaagagctggaagaaagcagtcagtaccctcccaacggcccccctcgaaggtctccactctcctctgggctcctccttgcctaatgcagggggtcaccgctggagaagaaccaccactgtcctcgatgtgtcccaagcctggagcgaatccgtcctcttggctctcccagccctatcacaggaatcattcctgggtttctgtccctctgaggctcaccaggtgtagttggccttgttctttgggggtattagcccttctactttctttctcacccaccctgtaccctcttctgtgtgtctytgctatccccctttcctcccaccacccatgtgcatgagcaaatgtgcaacaaaaccctgggactttgcagtcaaatgaagctgagcttcccacatcccgttcttcggtttgccatgagacgatgtggggtttccactgtgtgtctgtcatcacctctttgtctttttttcctaaccctgatctcatacttgtatagagtaataacaacagttgtacttccaccaaaggcatgtkgcatatttaccaatgtcatgtattctgaacaaaggcaaaaaatacaaattcctaccattaaa

SEQ ID NO: 230 - DNA, 1669 bp, Homo sapiens
gttgggaggcaccacaaatkcctaacaaactgctgaagcgccctccgaagggacagacctcatctccaccccgccccgtccctccgccagactggagcgcaaactatggtcgcattgatcactgaaggatcctcacagcaaccgctcctttccggagtcggatgagaggagagttgtgactggcaattggcaggggcggggcgggctaggcctgtagcgctgggcgaccgtcctgggcatggattgggccgcggggttgtcaccgttatccgggaggcgtggtcagcactaataaaggcggaggccggcgcggcagctgcagtaagttccagcgcagctagaccgcggggtrgtcggcgcgaggcggagcttggcagttccgtccacttcagccgcagcgtccctcrycgggtgtctcgccgcagcctccggagaggaacagaccctcactctctctgtcagaaaaatgtctgctccagctcagccacctgctgaagggacagaagggactgccccaggtgggggtccccctggccctcctcctaacatgaccagtaacagacgactacagcaaacccaggcacaagtggaggaggtggtggacatcatacgtgtgaacgtggacaaggtcctggagagggaccagaagctgtcagagctggatgaccgagctgatgccttgcaggcaggagcatcacaatttgagagcagtgctgcmaagctaaagaggaagtattggtggaaaaactgcaagatgatgatcatgctgggagccatctgtgccatcatcgtggtagttattgtaatctacttttttacttgagaatgtaccaccccttccctgttgtccattgccatccacattcatgtcctctgccctctgtttgctctctcaacacacttccccacccaccgtcctccattccagcccaggcttctccatcacccattcctcctttttcgttgcgttcatttgcactctgtccctcaacactagaaatgctgctcgtggcacaatctaagtcattacccgaagagcaacagctggcgcctcctccctgcctgctttttctgtactctcaagttcccccaaagccccaaagagttggaggccaagggaaggggcagggaggggagtggctgaggcgaagtacccatgaagctgcccagacttgggaggagaagagtatcggtgcccatggtgacttctagaaaacctggccactggtaggagctagggaggggctgggaagatggcagctcactcagtactgcctggtcatgtggagctttccttcctggaccaggcctgragagggtcctgggggtggaccaaagtccaacttggtttcagtgcagtacccttttcgaaagtaaaaacttgttttttgtagttayttctaatctgttcgtccaggattttccgtgtctttggggatcttacaactttactttgttctccagaggcctggagaacacttagggattgtgaaaatagcaggacttgtttccatcctagaagcagtcccatgtgcttctagctggaaggagctttctcttctttacattttctacagcattctgtatgagggcaccaaataaatccatctagctggtagttttatctagccaaataatttaacctagctcccagttaattgttggcata

SEQ ID NO: 231 - DNA, 1734 bp, Homo sapiens
gttgggaggcaccacaaatkcctaacaaactgctgaagcgccctccgaagggacagacctcatctccaccccgccccgtccctccgccagactggagcgcaaactatggtcgcattgatcactgaaggatcctcacagcaaccgctcctttccggagtcggatgagaggagagttgtgactggcaattggcaggggcggggcgggctaggcctgtagcgctgggcgaccgtcctgggcatggattgggccgcggggttgtcaccgttatccgggaggcgtggtcagcactaataaaggcggaggccggcgcggcagctgcagtaagttccagcgcagctagaccgcggggtrgtcggcgcgaggcggagcttggcagttccgtccacttcagccgcagcgtccctcrycgggtgtctcgccgcagcctccggagaggaacagaccctcactctctctgtcagaaaaatgtctgctccagctcagccacctgctgaagggacagaagggactgccccaggtgggggtccccctggccctcctcctaacatgaccagtaacagacgactacagcaaacccaggcacaagtggaggaggtggtggacatcatacgtgtgaacgtggacaaggtcctggagagggaccagaagctgtcagagctggatgaccgagctgatgccttgcaggcaggagcatcacaatttgagagcagtgctgcmaagctaaagaggaagtattggtggaaaaactgcaagatgatgatcatgctgggagccatctgtgccatcatcgtggtagttattgtaagtaagtatcgctgaagttgctggtggggtgaagaggtgggaaggtcctggagtcttctccctgcctgcctgcctgcctggggagtggggctgctctgactgaggtatggagaccgctgctatgggatcgtcacctggttcgggacrggggaagggcagagacaagggatttctttgatggacaagccttccccctgcaamgcattgcagggagatggcgcctcctgttctgaggaagtggggctatgctgtgtgtcactggcttgggttggagggagaccatggggatggggcacttaacaatggaragacctgaatgtctggtaacttggtgtaattcrccctcttgttttctcctgtctctttctcttttccgtctgggacttcctgattcctgtgtccagtctacttttttacttgagaatgtaccaccccttccctgttgtccattgccatccacattcatgtcctctgccctctgtttgctctctcaacacacttccccacccaccgtcctccattccagcccaggcttctccatcacccattcctcctttttcgttgcgttcatttgcactctgtccctcaacactagaaatgctgctcgtggcacaatctaagtcattacccgaagagcaacagctggcgcctcctccctgcctgctttttctgtactctcaagttcccccaaagccccaaagagttggaggccaagggaaggggcagggaggggagtggctgaggcgaagtacccatgaagctgcccagacttgggaggagaagagtatcggtgcccatggtgacttctagaaaacctggccactggtaggagctagggaggggctgggaagatggcagctcactcagtactgcctggtcatgtggagctttccttcctggaccaggcctgragagggtcctgggggtgg

SEQ ID NO: 232 - DNA, 1098 bp, Homo sapiens
gttgggaggcaccacaaatkcctaacaaactgctgaagcgccctccgaagggacagacctcatctccaccccgccccgtccctccgccagactggagcgcaaactatggtcgcattgatcactgaaggatcctcacagcaaccgctcctttccggagtcggatgagaggagagttgtgactggcaattggcaggggcggggcgggctaggcctgtagcgctgggcgaccgtcctgggcatggattgggccgcggggttgtcaccgttatccgggaggcgtggtcagcactaataaaggcggaggccggcgcggcagctgcagtaagttccagcgcagctagaccgcggggtrgtcggcgcgaggcggagcttggcagttccgtccacttcagccgcagcgtccctcrycgggtgtctcgccgcagcctccggagaggaacagaccctcactctctctgtcagaaaaatgtctgctccagctcagccacctgctgaagggacagaagggactgccccaggtgggggtccccctggccctcctcctaacatgaccagtaacagacgactacagcaaacccaggcacaagtggaggaggtggtggacatcatacgtgtgaacgtggacaaggtcctggagagggaccagaagctgtcagagctggatgaccgagctgatgccttgcaggcaggagcatcacaatttgagagcagtgctgcmaagctaaagaggaagtattggtggaaaaactgcaagatgatgatcatgctgggagccatctgtgccatcatcgtggtagttattgtaagtaagtatcgctgaagttgctggtggggtgaagaggtgggaaggtcctggagtcttctccctgcctgcctgcctgcctggggagtggggctgctctgactgaggtatggagaccgctgctatgggatcgtcacctggttcgggacrggggaagggcagagacaagggatttctttgatggacaagccttccccctgcaamgcattgcagggagatggcgcctcctgttctgaggacaatggaragacctgaatgtctggtaacttggtgtaattcrccctcttgttttctcc

SEQ ID NO: 233 - DNA, 2428 bp, Homo sapiens
gacctaacagyaccctgggtggaaacctcttcagcatttgcttggaatcagtaagctaaaaacaaaatcaaccgggaccccagcttttcagaactgcagggaaacagccatcatgagtgaggtcaccaagaattccctggagaaaatccttccacagctgaaatgccatttcacctggaacttattcaaggaagacagtgtctcaagggatctagaagatagagtgtgtaaccagattgaatttttaaacactgagttcaaagctacaatgtacaacttgttggcctacataaaacacctagatggtaacaacgaggcagccctggaatgcttacggcaagctgaagagttaatccagcaagaacatgctgaccaagcagaaatcagaagtctagtcacttggggaaactacgcctgggtytactatcacttgggcagaytctcagatgctcagatttatgtagataaggtgaaacaaacctgcaagaaattttcaaatccatacagtattgagtattctgaacttgactgtgaggaagggtggacacaactgaartgtggaagaaatgaaagggcraaggtgtgttttgagaargctctggaagaaaagcccaacaacccagaattctcctctggactggcaattgcgatgtaccatctggataatcacccagagaaacagttctctactgatgttttgaagcaggccattgagctgagtcctgataaccaatacgtcaaggttctcttgggcctgaaactgcagaagatgaataaagaagctgaaggagagcagtttgttgaagaagccttggaaaagtctccttgccaaacagatgtcctccgcagtgcagccaaattttacagaagaaaaggtgacctagacaaagctattgaactgtttcaacgggtgttggaatccacaccaaacaatggctacctctatcaccagattgggtgctgctacaaggcaaaagtaagacaaatgcagaatacaggagaatctgaagctagtggaaataaagagatgattgaagcactaaagcaatatgctatggactattcgaataaagctcttgagaagggactgaatcctctgaatgcatactccgatctcgctgagttcctggagacrgaatgttatcagacaccattcaataaggaagtccctgatgctgaaaagcaacaatcccatcagcgctactgcaaccttcagaaatataatgggaagtctgaagacactgctgtgcaacatggtttagagggtttgtccataagcaaaaaatcaactgrcaaggaagagatcaaagaccaaccacagaatgtatcygaaaatctgcttccacaaaatgcaccraattattggtatcttcaaggattaattcataagcagaatggagatctgctgcaagcagccaaatgttatgagaaggaactgggccgcctgctaagggatgccccttcaggcataggcagtattttcctgtcagcatctgagcttgaggatggtagtgaggaaatgggccagggcgcagtcagctccagtcccagagagctcctctctaactcagagcaactgaactgagacagaggaggaaaacagagcatcagaagcctgcagtggtggttgtgacgggtaggasgataggaagacagggggccccaacctgggattgctgagcagggaagctttgcatgttgctctaaggtacatttttaaagagttgttttttggccgggcgcagtggctcatgcctgtaatcccagcactttgggaggccgaggtgggcggatcacgaggtctggagtttgagaccatcctggctaacacagtgaaatcccgtctctactaaaaatacaaaaaattagccaggcgtggtggctggcacctgtagtcccagctacttgggaggctgaggcaggagaatggcgtgaacctggaaggaagaggttgcagtgagccaagattgcgcccctgcactccagcctgggcaacagagcaagactccatctcaaaaaaaaaaaaaaaaaaaaaaaagagttgttttctcatgttcattatagttcattacagttacatagtccgaaggtcttacaactaatcactggtagcaataaatgcttcaggcccacatgatgctgattagttctcagttttcattcagttcacaatataaccaccattcctgccctccctgccaagggtcataaatggtgactgcctaacaacaaaatttgcagtctcatctcattttcatccagacttctggaactcaaagattaacttttgactaaccctggaatatctcttatctcacttatagcttcaggcatgtatttatatgtattcttgatagcaataccataatcaatgtgtattcctgatagtaatgctacaataaatccaaacatttcaactctgttagaa

SEQ ID NO: 234 - DNA, 2460 bp, Homo sapiens
aaaacatcagctgatgcgtgccctactctcccacccctttatrtagttccttcagtatttacttgaggcagacaggaagacttctgaagaacaaatcagcctggtcaccagcttttcgsaacagcagagacacagagggcagtcatgagtgaggtcaccaagaattccctggagaaaatccttccacagctgaaatgccatttcacctggaacttattcaaggaagacagtgtctcaagggatctagaagatagagtgtgtaaccagattgaatttttaaacactgagttcaaagctacaatgtacaacttgttggcctacataaaacacctagatggtaacaacgaggcagccctggaatgcttacggcaagctgaagagttaatccagcaagaacatgctgaccaagcagaaatcagaagtctagtcacttggggaaactacgcctgggtytactatcacttgggcagaytctcagatgctcagatttatgtagataaggtgaaacaaacctgcaagaaattttcaaatccatacagtattgagtattctgaacttgactgtgaggaagggtggacacaactgaartgtggaagaaatgaaagggcraaggtgtgttttgagaargctctggaagaaaagcccaacaacccagaattctcctctggactggcaattgcgatgtaccatctggataatcacccagagaaacagttctctactgatgttttgaagcaggccattgagctgagtcctgataaccaatacgtcaaggttctcttgggcctgaaactgcagaagatgaataaagaagctgaaggagagcagtttgttgaagaagccttggaaaagtctccttgccaaacagatgtcctccgcagtgcagccaaattttacagaagaaaaggtgacctagacaaagctattgaactgtttcaacgggtgttggaatccacaccaaacaatggctacctctatcaccagattgggtgctgctacaaggcaaaagtaagacaaatgcagaatacaggagaatctgaagctagtggaaataaagagatgattgaagcactaaagcaatatgctatggactattcgaataaagctcttgagaagggactgaatcctctgaatgcatactccgatctcgctgagttcctggagacrgaatgttatcagacaccattcaataaggaagtccctgatgctgaaaagcaacaatcccatcagcgctactgcaaccttcagaaatataatgggaagtctgaagacactgctgtgcaacatggtttagagggtttgtccataagcaaaaaatcaactgrcaaggaagagatcaaagaccaaccacagaatgtatcygaaaatctgcttccacaaaatgcaccraattattggtatcttcaaggattaattcataagcagaatggagatctgctgcaagcagccaaatgttatgagaaggaactgggccgcctgctaagggatgccccttcaggcataggcagtattttcctgtcagcatctgagcttgaggatggtagtgaggaaatgggccagggcgcagtcagctccagtcccagagagctcctctctaactcagagcaactgaactgagacagaggaggaaaacagagcatcagaagcctgcagtggtggttgtgacgggtaggasgataggaagacagggggccccaacctgggattgctgagcagggaagctttgcatgttgctctaaggtacatttttaaagagttgttttttggccgggcgcagtggctcatgcctgtaatcccagcactttgggaggccgaggtgggcggatcacgaggtctggagtttgagaccatcctggctaacacagtgaaatcccgtctctactaaaaatacaaaaaattagccaggcgtggtggctggcacctgtagtcccagctacttgggaggctgaggcaggagaatggcgtgaacctggaaggaagaggttgcagtgagccaagattgcgcccctgcactccagcctgggcaacagagcaagactccatctcaaaaaaaaaaaaaaaaaaaaaaaagagttgttttctcatgttcattatagttcattacagttacatagtccgaaggtcttacaactaatcactggtagcaataaatgcttcaggcccacatgatgctgattagttctcagttttcattcagttcacaatataaccaccattcctgccctccctgccaagggtcataaatggtgactgcctaacaacaaaatttgcagtctcatctcattttcatccagacttctggaactcaaagattaacttttgactaaccctggaatatctcttatctcacttatagcttcaggcatgtatttatatgtattcttgatagcaataccataatcaatgtgtattcctgatagtaatgctacaataaatccaaacatttcaactctgttagaa

SEQ ID NO: 235 - DNA, 1481 bp, Homo sapiens
attgtcagctcctgattctgcagaaaacaygaaactgagctgtacaaagatgctgatgaggggctgcagcatgcaattcacttcaccagcagtcactaagaatgaaaatgcggttcttggggttggtggtctgtttggttctctggmccctgcattctgaggggtctrgagggaaactgacagctgtggatcctgaaacaaacatgaatgtgagtgaaattatctcttastggggattccctagtgaggaatacctagttgagacagaagatggatatattctgtgccttaaccgaattcctcatgggaggaagaaccattctgacaaaggtcccaaaccagttgtcttcctgcaacatggcttgctggcagattctagtaacwgggtcacaaaccttgccaacagcagcctgggcttcattcttgctgatgctggttttgacgtgtrgatgggcaacagcagaggaaatacctggtctcggaaacvtaagacactctcagtttctcaggatgaattctgggctttcagttatgawgagatggcaaaatatgacctaccagcttccattaacttcattctgaataaaactggccaagaacaagtgtattatgtgggtcattctcaaggcaccactataggttttatagcattttcacagatccctgagctggctaaaaggattaaaatgttttttgcccygggtcytgtggcttccgtcgccttctgtactagccctatggccaaattaggacgattaccagatcatctcattaaggacttatttggagacaaagaatttcttccccagagtgcgtttttgaagtggctgggtacccacgtttgcactcatgtcatactgaaggagctctgtggaaatctctgttttcttctgtgtggatttaatgagagaaatttaaatatgtctagagtggatgtatatacaacacattctcctgctggaacttctgtgcaaaacatgttacactggagccaggctgttaaattccaaaagtttcaagcctttgactggggaagcagtgccaagaattattttcattacaaccagagttawcctcccacatacaatgtgaaggacatgcttgtgccgactgcagtctggagcrggggtcacgactggcttgcagatgtctacgacgtcaatatcttacygactcagatcaccaacttggtgttccatgagagcattccggaatgggagcatcttgacttcatttggggcctggatgccccttggaggctttataataaaattattaatctaatgaggaaatatcagtgaaagctggacttgagctgtgtaccaccaagtcaatgattatgtcatgtgaaaatgtgtttgcttcatttctgtaaaacacttgtttttctttcccaggtcttttgtttttttatatccaagaaactattttttctttaattagggctggaataggaagccagtgtctcaaccatagtattg

SEQ ID NO: 236 - DNA, 2537 bp, Homo sapiens
ccggcccctgagagctggcactgcgactcgagacagcggcccggcaggacagctccagactgttttattatacagaatgaaaatgcggttcttggggttggtggtctgtttggttctctggmccctgcattctgaggggtctrgagggaaactgacagctgtggatcctgaaacaaacatgaatgtgagtgaaattatctcttastggggattccctagtgaggaatacctagttgagacagaagatggatatattctgtgccttaaccgaattcctcatgggaggaagaaccattctgacaaaggtcccaaaccagttgtcttcctgcaacatggcttgctggcagattctagtaacwgggtcacaaaccttgccaacagcagcctgggcttcattcttgctgatgctggttttgacgtgtrgatgggcaacagcagaggaaatacctggtctcggaaacvtaagacactctcagtttctcaggatgaattctgggctttcagttatgawgagatggcaaaatatgacctaccagcttccattaacttcattctgaataaaactggccaagaacaagtgtattatgtgggtcattctcaaggcaccactataggttttatagcattttcacagatccctgagctggctaaaaggattaaaatgttttttgcccygggtcytgtggcttccgtcgccttctgtactagccctatggccaaattaggacgattaccagatcatctcattaaggacttatttggagacaaagaatttcttccccagagtgcgtttttgaagtggctgggtacccacgtttgcactcatgtcatactgaaggagctctgtggaaatctctgttttcttctgtgtggatttaatgagagaaatttaaatatgtctagagtggatgtatatacaacacattctcctgctggaacttctgtgcaaaacatgttacactggagccaggctgttaaattccaaaagtttcaagcctttgactggggaagcagtgccaagaattattttcattacaaccagagttawcctcccacatacaatgtgaaggacatgcttgtgccgactgcagtctggagcrggggtcacgactggcttgcagatgtctacgacgtcaatatcttacygactcagatcaccaacttggtgttccatgagagcattccggaatgggagcatcttgacttcatttggggcctggatgccccttggaggctttataataaaattattaatctaatgaggaaatatcagtgaaagctggacttgagctgtgtaccaccaagtcaatgattatgtcatgtgaaaatgtgtttgcttcatttctgtaaaacacttgtttttctttcccaggtcttttgtttttttatatccaagaaaatgataactttgaagatgcccagttcactctagtttcaattagaaacatactagctattttttctttaattagggctggaataggaagccagtgtctcaaccatagtattgtctctttaagtcttttaaatatcactgatgtgtaaaaaggtcattatatccattctgtttttaaaatttaaaatatattgactttttgcccttcataggacaaagtaatatatgtgttggaattttaaaattgtgttgtcattggtaaatctgtcactgacttaagcgaggtataaaagtacgcagttttcatgtccttgccttaaagagctctctagtctaacggtcttgtagttagagatctaaatgacattttatcatgttttcctgcagcaggtgcatagtcaaatccagaaatatcacagctgtgccagtaataaggatgctaacaattaattttatcaaacctaactgtgacagctgtgatttgacacgttttaattgctcaggttaaatgaaatagttttccggcgtcttcaaaaacaaattgcactgataaaacaaaaacaaaagtatgttttaaatgctttgaagactgatacactcaaccatctatattcatgagctctcaatttcatggcaggccatagttctacttatctgagaagcaaatccctgtggagactataccactattttttctgagattaatgtactcttggagcccgctactgtcgttattgatcacatctgtgtgaagccaaagccccgtggttgcccatgagaagtgtcctwgttcattttcacccaaatgaagtgtgaacgtgatgttttcggatgcaaactcagctcagggattcattttgtgtcttagttttatatgcatccttatttttaatacacctgcttcacgtccctatgttgggaagtccatatttgtctgcttttcttgcagcatcatttccttacaatactgtcyggtggacaaaatgacaattgatatgtttttctgatataattactttagctgcactaacagtacaatgcttgttaatggttaatataggcagggcgaatactactttgtaacttttaaagtcttaaacttttcaataaaattgagtgagacttataggcccaaagaatt

SEQ ID NO: 237 - DNA, 2786 bp, Homo sapiens
atgcgtaggcgacgcgctggtagagctgtggacctgccagcctgcgaggcggaggacgggctccatctcttagaaacgcctacggcgcatgctctatggggtcaactggggggctggcaagcggcmgcgctggtctrgggcggagtctccgaggcacttcccggtggctggctgctctgattggctgaacaaatagtccgagggtggtgggcatccgccctcccgacaaggcagaccaggccccctgcaggtcccctatccgcaccccggcccctgagagctggcactgcgactcgagacagcggcccggcaggacagctccagaatgaaaatgcggttcttggggttggtggtctgtttggttctctggmccctgcattctgaggggtctrgagggaaactgacagctgtggatcctgaaacaaacatgaatgtgagtgaaattatctcttastggggattccctagtgaggaatacctagttgagacagaagatggatatattctgtgccttaaccgaattcctcatgggaggaagaaccattctgacaaaggtcccaaaccagttgtcttcctgcaacatggcttgctggcagattctagtaacwgggtcacaaaccttgccaacagcagcctgggcttcattcttgctgatgctggttttgacgtgtrgatgggcaacagcagaggaaatacctggtctcggaaacvtaagacactctcagtttctcaggatgaattctgggctttcagttatgawgagatggcaaaatatgacctaccagcttccattaacttcattctgaataaaactggccaagaacaagtgtattatgtgggtcattctcaaggcaccactataggttttatagcattttcacagatccctgagctggctaaaaggattaaaatgttttttgcccygggtcytgtggcttccgtcgccttctgtactagccctatggccaaattaggacgattaccagatcatctcattaaggacttatttggagacaaagaatttcttccccagagtgcgtttttgaagtggctgggtacccacgtttgcactcatgtcatactgaaggagctctgtggaaatctctgttttcttctgtgtggatttaatgagagaaatttaaatatgtctagagtggatgtatatacaacacattctcctgctggaacttctgtgcaaaacatgttacactggagccaggctgttaaattccaaaagtttcaagcctttgactggggaagcagtgccaagaattattttcattacaaccagagttawcctcccacatacaatgtgaaggacatgcttgtgccgactgcagtctggagcrggggtcacgactggcttgcagatgtctacgacgtcaatatcttacygactcagatcaccaacttggtgttccatgagagcattccggaatgggagcatcttgacttcatttggggcctggatgccccttggaggctttataataaaattattaatctaatgaggaaatatcagtgaaagctggacttgagctgtgtaccaccaagtcaatgattatgtcatgtgaaaatgtgtttgcttcatttctgtaaaacacttgtttttctttcccaggtcttttgtttttttatatccaagaaaatgataactttgaagatgcccagttcactctagtttcaattagaaacatactagctattttttctttaattagggctggaataggaagccagtgtctcaaccatagtattgtctctttaagtcttttaaatatcactgatgtgtaaaaaggtcattatatccattctgtttttaaaatttaaaatatattgactttttgcccttcataggacaaagtaatatatgtgttggaattttaaaattgtgttgtcattggtaaatctgtcactgacttaagcgaggtataaaagtacgcagttttcatgtccttgccttaaagagctctctagtctaacggtcttgtagttagagatctaaatgacattttatcatgttttcctgcagcaggtgcatagtcaaatccagaaatatcacagctgtgccagtaataaggatgctaacaattaattttatcaaacctaactgtgacagctgtgatttgacacgttttaattgctcaggttaaatgaaatagttttccggcgtcttcaaaaacaaattgcactgataaaacaaaaacaaaagtatgttttaaatgctttgaagactgatacactcaaccatctatattcatgagctctcaatttcatggcaggccatagttctacttatctgagaagcaaatccctgtggagactataccactattttttctgagattaatgtactcttggagcccgctactgtcgttattgatcacatctgtgtgaagccaaagccccgtggttgcccatgagaagtgtcctwgttcattttcacccaaatgaagtgtgaacgtgatgttttcggatgcaaactcagctcagggattcattttgtgtcttagttttatatgcatccttatttttaatacacctgcttcacgtccctatgttgggaagtccatatttgtctgcttttcttgcagcatcatttccttacaatactgtcyggtggacaaaatgacaattgatatgtttttctgatataattactttagctgcactaacagtacaatgcttgttaatggttaatataggcagggcgaatactactttgtaacttttaaagtcttaaacttttcaataaaattgagtgagacttataggcccaaagaatt

SEQ ID NO: 238 - DNA, 2236 bp, Homo sapiens
agcaggggtgtttgccagcagcctgcactctcagaaatcagacttgagtggccggaacccttgagaccagaggcttaccatgctgctccctaggagggccaggaactgctgacgtgaccactggacagttattcgtgtctcttacaattaccaarcagaatggacaagcttaataaaataaccgtccccgccagtcagaagttgagrcagcttcaaaagatggtccatgatattaaaaacaatgaaggtggaataatgaataaaatcaaaaagytaaaagtcaaagcacctccaagtgttcctcgaagggactacgcttcagagagcccygctgacgaagaggagcagtggtcygatgactttgacagcgactatgaaaatccagatgagcactcggactcagagatgtacgtgatgcccgccgaggagaacgctgatgacagctacgagccgcctccagtagagcaggaaaccaggccggttcacccagccctgcccttcgccagaggcgagtatatagacaatcgatcaagccagaggcattccccacccttcagcaagacacttcccagtaagcccagctggccttcagagaaagcaaggctcacctccaccctgccggccctgactgctttgcagaaacctcaagtcccacccaaacccaaaggcctccttgaggatgaggctgattatgtggtccccgtggaagataatgatgaaaactatattcatcccacagaaagcagttcacctccacctgaaaaagctcccatggtgaatagatcaaccaagccaaattcctcaacgcccgcctctcctccaggaacagcttcaggtcgaaacagtggggcctgggaaaccaagtcacctccaccagctgcaccatccccgttgccacgggccgggaaaaaaccaacgacaccactgaagacaactccagttgcctctcaacagaatgcttcaagtgtttgtgaagaaaaacctatacctgctgaacgccaccgagggtcaagtcacagacaagaagctgtgcagtcaccagtgtttcctcctgcccagaaacaaatccaccaaaaacccatacctctgccaagatttacagaagggggaaacccaactgtggatgggcccctacccagcttttcatctaattccactatttcagaacaggaagctggcgttctctgcaagccatggtatgctggagcctgtgatcgaaagtctgctgaagaggcattgcacagatcaaacaaggatggatcatttcttattcggaaaagctctggccatgattccaaacaaccatatacactagttgtattctttaataagcgagtatataatattcctgtgcgatttattgaagcaacaaaacaatatgccttgggcagaaagaaaaatggtgaagagtactttggaagtgttgctgaaatcatcaggaatcatcaacatagtcctttggttcttattgacagtcagaataacacaaaagattccmccagactgaagtatgcagttaaagtttcataaagggggaaaaaaaagatcaataccattgcttcagacactttcccaaagtttctccttttgagaaaaagtcccaaaacttcatattttggattatgaatcatccagtaataaaatggaagatggagtcagctattgaagtggtcatccatttctttttaagaagctcatgtggacttgttctattgcctgacctgatgaactgttaatatctggtgaggttgagttatcatgctactaatattttccaaataaatatttttatttttaaaaataagtgtaaagtatattatcaaaataagaaaataatgctcttgcataaaacaaagtggctggaaatttaaacctccacaatgatcattggtacactaatgtagctgggctctccactgccaatgcttgacaattaagtcttggttaaaattttaatttgtagaaaataaggtattaaaggtaatgtatgatatctgtaagtataggcaagaaggatgtaatggttcctttttgtgagcactctcaaccatgggatatatatatatatggatatgaactttctataagttcttgtctaggattatgctgttagttttgcttactaaagataattataccctctttgatctacatgtctatcaaatagaacctaaacttgatatgaggtttgtattagtccattatcacgctgctaataaagacatactcaagactg

SEQ ID NO: 239 - DNA, 2167 bp, Homo sapiens
agcaggggtgtttgccagcagcctgcactctcagaaatcagacttgagtggccggaacccttgagaccagaggcttaccatgctgctccctaggagggccaggaactgctgacgtgaccactggacagttattcgtgtctcttacaattaccaarcagaatggacaagcttaataaaataaccgtccccgccagtcagaagttgagrcagcttcaaaagatggtccatgatattaaaaacaatgaaggtggaataatgaataaaatcaaaaagytaaaagtcaaagcacctccaagtgttcctcgaagggactacgcttcagagagcccygctgacgaagaggagcagtggtcygatgactttgacagcgactatgaaaatccagatgagcactcggactcagagatgtacgtgatgcccgccgaggagaacgctgatgacagctacgagccgcctccagtagagcaggaaaccaggccggttcacccagccctgcccttcgccagaggcgagtatatagacaatcgatcaagccagaggcattccccacccttcagcaagacacttcccagtaagcccagctggccttcagagaaagcaaggctcacctccaccctgccggccctgactgctttgcagaaacctcaagtcccacccaaacccaaaggcctccttgaggatgaggctgattatgtggtccccgtggaagataatgatgaaaactatattcatcccacagaaagcagttcacctccacctgaaaaaggtcgaaacagtggggcctgggaaaccaagtcacctccaccagctgcaccatccccgttgccacgggccgggaaaaaaccaacgacaccactgaagacaactccagttgcctctcaacagaatgcttcaagtgtttgtgaagaaaaacctatacctgctgaacgccaccgagggtcaagtcacagacaagaagctgtgcagtcaccagtgtttcctcctgcccagaaacaaatccaccaaaaacccatacctctgccaagatttacagaagggggaaacccaactgtggatgggcccctacccagcttttcatctaattccactatttcagaacaggaagctggcgttctctgcaagccatggtatgctggagcctgtgatcgaaagtctgctgaagaggcattgcacagatcaaacaaggatggatcatttcttattcggaaaagctctggccatgattccaaacaaccatatacactagttgtattctttaataagcgagtatataatattcctgtgcgatttattgaagcaacaaaacaatatgccttgggcagaaagaaaaatggtgaagagtactttggaagtgttgctgaaatcatcaggaatcatcaacatagtcctttggttcttattgacagtcagaataacacaaaagattccmccagactgaagtatgcagttaaagtttcataaagggggaaaaaaaagatcaataccattgcttcagacactttcccaaagtttctccttttgagaaaaagtcccaaaacttcatattttggattatgaatcatccagtaataaaatggaagatggagtcagctattgaagtggtcatccatttctttttaagaagctcatgtggacttgttctattgcctgacctgatgaactgttaatatctggtgaggttgagttatcatgctactaatattttccaaataaatatttttatttttaaaaataagtgtaaagtatattatcaaaataagaaaataatgctcttgcataaaacaaagtggctggaaatttaaacctccacaatgatcattggtacactaatgtagctgggctctccactgccaatgcttgacaattaagtcttggttaaaattttaatttgtagaaaataaggtattaaaggtaatgtatgatatctgtaagtataggcaagaaggatgtaatggttcctttttgtgagcactctcaaccatgggatatatatatatatggatatgaactttctataagttcttgtctaggattatgctgttagttttgcttactaaagataattataccctctttgatctacatgtctatcaaatagaacctaaacttgatatgaggtttgtattagtccattatcacgctgctaataaagacatactcaagactg

SEQ ID NO: 240 - DNA, 2903 bp, Homo sapiens
cctctttcgaaccctgtaggattttacttcttgacgcatctgtttatttaaaaccaaaggggtatgttgaggcatgggcaccctggcagcagaccccaaaccaaccctcttgacttgtgcctgcctttcaggatatgttcccttcctgaatttgtctaaraaggctgagttggggggtggttgctgatttttataacatatagccagttgttcataggcctgtgytttaaagaagggcaagcctgaactcaccgtcctgcctcagggcctgggctccatacctggggagtagacagtcttctactttctaaaaagctggacttgaaatttggagtaaatctcctggttgagtgacaggtgtttcgcagctgagcccttgaggagattctccagttgggcagagacatcccttcctcagacgccttgtgggctggactcctttggcccagttcaaagtgaggggagggctcccaacaggccgggaagacagttgacttcaccctccttgggtttgtctgtctgtccgtctctgggaatggtcgcttcctgttttcccttttccttttaagcctcgccttgttcccctcttctctctcttcatgaactactccgagtcttggtctccgtccctctatctctggctcctgcatctgtctcggcttctggccttcctctccccctcccctcccctccctcgcgctgtcattcaccccgctcctctccgcgcacagccaatggagagacccagtcgaaaccgcgaagctctcttgcaccgggctttttcgcctggtgattgatgtcccagagtcaacagcgagcgagcagccggagcggggaagcagaagccagagaggggaagaatacggcgccccctctctccctcccctcccccttctactttagcctttctgcgcacttcgcttccaagtctccgcgcagccaggagccgctgttgcctcccagcccctrctagctgccccccgagccgagcgcagcgagcgccgccgcccgggccccccggtggggccagggccagcatggagcacctgggtccgcaccacctccacccgggtcacgcagagcccattagcttcggcatcgaccagatcctcaacagcccggaccagggtggctgcatgggacccgcctcgcgcctccaggacggagaatacggccttggctgcttggtcggaggcgcctacacttacggcggcgggggctccgcggccgcgacgggggctggaggarcgggggcctatggtactggaggtcccggcggccccggaggcccggcaggcggcggcggcgcctgcagcatgggtcctctgaccggctcctacaacgtgaacatggccttggcaggcggccccggtcctggcggcggcggcggcagcagcggcggtgccggggcactcagcgctgcgggggtaatccgggtgccggcacacaggccgctcgccggagccgtggcccacccccagcccctggccaccggcttgcccaccgtgccctctgtgcctgccatgccgggcgtcaacaacctcactggcctcaccttcccytggatggagagtaaccgcagatacacaaaggacaggttcacagrtcacccctatcagaaccggacgccccccaagaagaagaagccgcgcacgtccttcacacgcctgcagatctgcgagctggagaagcgcttccaccgccagaagtacctggcctcggccgagcgcgccgccctggccaaggcgctcaaaatgaccgatgcgcaggtcaaaacctggttccagaaccggcggacaaagtggagacggcagactgcggaggaacgggaggccgagaggcagcaagcgaaccgcatcctcctgcagttgcagcaggaggccttccagaagagcctggcacagccgctgcccgctgaccctctgtgcgtgcacaactcgtcgctcttcgccctgcagaatctgcagccgtggtctgacgaytcgaccaaaatcactagcgtcacgtcggtggcgtcggcctgcgagtgagcctgcccattctgccctgtgggaccccaggcccactcaggggtcactgaggcstgagacccaggactcctccccaccytcctggcctcagactgcacccaggaggggaacactgccctcgcacggccccraagggcccccacatttgtgccgacactgttctcccttcggtggaagagytcaagggacaaggacacgcgcccccytcccagaggcgtcccgcacctgtctgaactgttaagaaatctgtttttgtttatttcattttattttaatttttaacgtgggattcagagaaaggcaagggaggtaagggaggaggagcttctggggtccccagggctgtcatctgaatttgccctgggaaaccccttctctgtgacccayttctcatcacacacatggaaacccataggyccacacacaggtggtgtcactgtccctcctggtgtcaccccagagccacacatgggcatstatgggagagtgtcaaccagacagagggtcacagtgtttacactttggaccttacgatcaggcwcaggtcaggggtgacacagactcatcctgaacagcatggcactccctccagcacaaacacaaggtcatggccacactgtgacacactacaccacacacarcagccaacagctacaacagcctcacttggtctgccaggcccccaccacacatcccagcccaatccaggtacgcacagacaggttttcacataaatgcagcccatttctccagaacccatttgaggggtgggggggtgttaatttatgcacttataaggtgttttctgtgtaaccattttataaagtgcttgtgtaatttatgtgaaaaaaataaataaaagcctccggatcc

SEQ ID NO: 241 - DNA, 2350 bp, Homo sapiens
tgggagggcttcctccatggaacgcgagcctcgagacgtctgacgttaggcaccgttcgcagcgcctcgggctcgcacggcaggatcgaaagcgtgattggctggcggcgtctgtggtctcgggcaccgcccagtcgcgggacgctgcctctgcggaactgggggtggggcgtgttgacccccttaaaggcgccagagcccgcggtcacggctcaggttcccggtgcttcgcgcgtctgccgttgtcacaggccagggaggtggcaccaccaggcgaagcttggcgagattgtgtcgtcaagcgcgtacgggcgccaattggccgggcgatgtggcgtggactggcgctggcgcgagcgattgsctgcgcggcccgggggcggggccagtgggcggtgcgcgccgcagactgtgctcaaagcgggcgccatccgggaccggcggttgtctgtggccggaggctgatcagtgttctagaacagatcagacattttgtaatgatgcctgaaataaacactaaccacctcgacaagcaacaggttcaactcctggcagagatgtgtatccttattgatgaaaatgacaataaaattggagctgagaccaagaagaattgtcacctgaacgagaacattgagaaaggattattgcatcgagcttttagtgtcttcttattcaacaccgaaaataagcttctgctacagcaaagatcagatgctaagattacctttccaggttgttttacgaatacgtgttgtagtcatccattaagcaatccagccgagcttgaggaaagtgacgcccttggagtgaggcgagcagcacagagacggctgaaagctgagctaggaattcccttggaagaggttcctccagaagaaattaattatttaacacgaattcactacaaagctcagtctgatggtatctggggtgaacatgaaattgattacattttgttggtgaggaagaatgtaactttgaatccagatcccaatgagattaaaagctattgttatgtgtcaaaggaagaactaaaagaacttctgaaaaaagcagccagtggtgaaattaagataacgccatggtttaaaattattgcagcgacttttctctttaaatggtgggataacttaaatcatttgaatcagtttgttgaccatgagaaaatatacagaatgtgaatatgtaggtaaatgattacagaaaaatttatctgcttaacaaacttagaatgactttttccttttaaatttagttctatcattaatttatcattaaatttagttctatcatttggtactatcattaatgtattatatacactgatactttaaaacttgtgtggaaaaaactaacttataattttgtatcacacaccctggatatgtgttctgtttctaagcgacatttgtgagagattattgtaaaatgagagcgagcaaataaaacttaatttaatctttgcagatacatacttatgggaaatttgaacaaatgagtgaaactctgtgtttttagtaggctgtgataaacatttccggagcacttgcagaggacttgctatttgccaggtgctttatgtatcattaaatttttctcatagttcagaaaaatgtgcaaaggaaactattgtctcgctccttcaaaacagtcttaattaactttcatattagcagattaaactagcagagcaggttcaagggaaattaaatgatatggaccctaatttgtatcattctgagttgattgtgtggtttattcattctggaaacatgttgatacttacagtcagccactgcttttgataagtgatattgattaggttgaatcttcttgtaaatagtatttaccagttagcaaagtctgtgttttcagaattacagtgagcacagaggtgttcataaaatgggaattgagtcccactcggtaagagttgcttaaacttgacactgttgacatttgggctggataaaacccctgtggtggggtctgtgctgtgcattgcaggatggtgagcagcgtccctctcatgtgacacccacagttatgccggatgttgccagatgcccctaggggacagagtcaacccccaactgaggaccactgtcctacagagtcaggaaatattgtagggagaaaaaaataacaacaacaaaggcctgtgttaatgttaaatagatgagattatggaatrtgtatattaatgttaaaaattgtaccttgatcaatgtactttttataaacttgccatagatatctcagatttgaaacctcaagacagatttattattcttaaatgctgtatgataatgaagaaaaataaaaatttatttcttgcaaagttaaa

SEQ ID NO: 242 - DNA, 1881 bp, Homo sapiens
tgttctagaacagatcagacattttgtaatgatgcctgaaataaacactaaccacctcgacaagcaacaggttcaactcctggcagagatgtgtatccttattgatgaaaatgacaataaaattggagctgagaccaagaagaattgtcacctgaacgagaacattgagaaaggattattgcatcgagcttttagtgtcttcttattcaacaccgaaaataagcttctgctacagcaaagatcagatgctaagattacctttccaggttgttttacgaatacgtgttgtagtcatccattaagcaatccagccgagcttgaggaaagtgacgcccttggagtgaggcgagcagcacagagacggctgaaagctgagctaggaattcccttggaagaggttcctccagaagaaattaattatttaacacgaattcactacaaagctcagtctgatggtatctggggtgaacatgaaattgattacattttgttggtgaggaagaatgtaactttgaatccagatcccaatgagattaaaagctattgttatgtgtcaaaggaagaactaaaagaacttctgaaaaaagcagccagtggtgaaattaagataacgccatggtttaaaattattgcagcgacttttctctttaaatggtgggataacttaaatcatttgaatcagtttgttgaccatgagaaaatatacagaatgtgaatatgtaggtaaatgattacagaaaaatttatctgcttaacaaacttagaatgactttttccttttaaatttagttctatcattaatttatcattaaatttagttctatcatttggtactatcattaatgtattatatacactgatactttaaaacttgtgtggaaaaaactaacttataattttgtatcacacaccctggatatgtgttctgtttctaagcgacatttgtgagagattattgtaaaatgagagcgagcaaataaaacttaatttaatctttgcagatacatacttatgggaaatttgaacaaatgagtgaaactctgtgtttttagtaggctgtgataaacatttccggagcacttgcagaggacttgctatttgccaggtgctttatgtatcattaaatttttctcatagttcagaaaaatgtgcaaaggaaactattgtctcgctccttcaaaacagtcttaattaactttcatattagcagattaaactagcagagcaggttcaagggaaattaaatgatatggaccctaatttgtatcattctgagttgattgtgtggtttattcattctggaaacatgttgatacttacagtcagccactgcttttgataagtgatattgattaggttgaatcttcttgtaaatagtatttaccagttagcaaagtctgtgttttcagaattacagtgagcacagaggtgttcataaaatgggaattgagtcccactcggtaagagttgcttaaacttgacactgttgacatttgggctggataaaacccctgtggtggggtctgtgctgtgcattgcaggatggtgagcagcgtccctctcatgtgacacccacagttatgccggatgttgccagatgcccctaggggacagagtcaacccccaactgaggaccactgtcctacagagtcaggaaatattgtagggagaaaaaaataacaacaacaaaggcctgtgttaatgttaaatagatgagattatggaatrtgtatattaatgttaaaaattgtaccttgatcaatgtactttttataaacttgccatagatatctcagatttgaaacctcaagacagatttattattcttaaatgctgtatgataatgaagaaaaataaaaatttatttcttgcaaagttaaa

SEQ ID NO: 243 - DNA, 2346 bp, Homo sapiens
cccgcagccccgaggggtctggkcgcgctgaagaccccttcggctgctgggccaacgcccccacccttggtcacctactcctgccgccgagcggttcgcgggaggtggcctcgggggtcgtagctactcaccggcggggcgctccgagtccatctgccccgtagcccggcagccggggcgggagggctgcgagcccggggcgcggtccgcctgaggcctgagacccggggccgcctgcgctcagggccgcggtgccggccgcgcgggagcctggcggggacggcgcggtcagtgttcggctcctccgcagtgactcaccagcgtcctgaagcttttgatcaccattggctgggaaggaaaaacagaatcagctgttccctgcgaaaggtatcatatgtttcttacaaagtggaggtttgtggcagccctgcatggagcaagtctgtcagcaccatctttctaacatgttctagaacagatcagacattttgtaatgatgcctgaaataaacactaaccacctcgacaagcaacaggttcaactcctggcagagatgtgtatccttattgatgaaaatgacaataaaattggagctgagaccaagaagaattgtcacctgaacgagaacattgagaaaggattattgcatcgagcttttagtgtcttcttattcaacaccgaaaataagcttctgctacagcaaagatcagatgctaagattacctttccaggttgttttacgaatacgtgttgtagtcatccattaagcaatccagccgagcttgaggaaagtgacgcccttggagtgaggcgagcagcacagagacggctgaaagctgagctaggaattcccttggaagaggttcctccagaagaaattaattatttaacacgaattcactacaaagctcagtctgatggtatctggggtgaacatgaaattgattacattttgttggtgaggaagaatgtaactttgaatccagatcccaatgagattaaaagctattgttatgtgtcaaaggaagaactaaaagaacttctgaaaaaagcagccagtggtgaaattaagataacgccatggtttaaaattattgcagcgacttttctctttaaatggtgggataacttaaatcatttgaatcagtttgttgaccatgagaaaatatacagaatgtgaatatgtaggtaaatgattacagaaaaatttatctgcttaacaaacttagaatgactttttccttttaaatttagttctatcattaatttatcattaaatttagttctatcatttggtactatcattaatgtattatatacactgatactttaaaacttgtgtggaaaaaactaacttataattttgtatcacacaccctggatatgtgttctgtttctaagcgacatttgtgagagattattgtaaaatgagagcgagcaaataaaacttaatttaatctttgcagatacatacttatgggaaatttgaacaaatgagtgaaactctgtgtttttagtaggctgtgataaacatttccggagcacttgcagaggacttgctatttgccaggtgctttatgtatcattaaatttttctcatagttcagaaaaatgtgcaaaggaaactattgtctcgctccttcaaaacagtcttaattaactttcatattagcagattaaactagcagagcaggttcaagggaaattaaatgatatggaccctaatttgtatcattctgagttgattgtgtggtttattcattctggaaacatgttgatacttacagtcagccactgcttttgataagtgatattgattaggttgaatcttcttgtaaatagtatttaccagttagcaaagtctgtgttttcagaattacagtgagcacagaggtgttcataaaatgggaattgagtcccactcggtaagagttgcttaaacttgacactgttgacatttgggctggataaaacccctgtggtggggtctgtgctgtgcattgcaggatggtgagcagcgtccctctcatgtgacacccacagttatgccggatgttgccagatgcccctaggggacagagtcaacccccaactgaggaccactgtcctacagagtcaggaaatattgtagggagaaaaaaataacaacaacaaaggcctgtgttaatgttaaatagatgagattatggaatrtgtatattaatgttaaaaattgtaccttgatcaatgtactttttataaacttgccatagatatctcagatttgaaacctcaagacagatttattattcttaaatgctgtatgataatgaagaaaaataaaaatttatttcttgcaaagttaaa

SEQ ID NO: 244 - DNA, 1407 bp, Homo sapiens
tcctgcacccctgctcttgggacacagtgccctccggctctaataggccaggagttgggggggcaactggctctgctccctggccctggctccccctgctccctggggctgcccgaggtgaaggtgacaggtgggggaggcaggtggagaattgggccagtgagctcatggcaaaggcgcccagctgggcaggggtgggtgctctggcctataaagcccccgaggccctgtggcctgcagaggcggttatggacggcaccatggaggactccgaggcggtgcagagggccacagcgctcatcgagcagcggctggcacaggaggaggagaatgagaaactccgaggagacrcacgccagaagctgcccatggacttgctggtgctggaggatgagaagcaccacggggctcagagtgcagccctgcagaaggtgaagggccaagagcgcgtgcgcaagacgtccctggacctgcggcgggagatcatcgatgtgggcgggatccagaacctcatcgagctgcggaagaaacgcaagcagaagaagcgggacgctctggccgcctcgcatgagccgcccccagagcccgaggagatcactggccytgtggatgaggagaccttcctgaaagctgcggtggaggggaaaatgaaggtcattgagaagttcctggctgacggggggtcagccgacacgtgcgaccagttccgtcggacagcactgcaccgagcttccctggaaggccacatggaaatcctggagaagcttctagataatggggccactgtggacttccaggatcggctggactgcacagccatgcattgggcctgccgcgggggccacttagaggtggtgaaacttctgcaaagccatggagcagacaccaatgtgagggataagctgctgagcaccccgctgcacgtggcagtccggacagggcaggtggagattgtggagcactttctatccctgggcctggaaatcaatgccagagacagggaaggggatactgccctgcatgacgctgtgaggctcaaccgctacaaaatcatcaaactgctgctcctgcatggggctgacatgatgaccaagaacctggcaggaaagaccccgacggacctggtgcagctctggcaggctgatacccggcacgccctggagcatcctgagccgggggctgagcataacgggctggaggggcctaatgatagtgggcgagagacccctcagcctgtgccagcccagtgaatgcgtgccccagcccagccagctacccagcccctctctgtgtgcagccggagggtcctaagaatggctcccggagctaactgagggcccagccttttttctgcatgatccaggagcacataccacaaactaccacaataaaaaagctgtttttgct

SEQ ID NO: 245 - DNA, 1148 bp, Homo sapiens
tcctgcacccctgctcttgggacacagtgccctccggctctaataggccaggagttgggggggcaactggctctgctccctggccctggctccccctgctccctggggctgcccgaggtgaaggtgacaggtgggggaggcaggtggagaattgggccagtgagctcatggcaaaggcgcccagctgggcaggggtgggtgctctggcctataaagcccccgaggccctgtggcctgcagaggcggttatggacggcaccatggaggactccgaggcggtgcagagggccacagcgctcatcgagcagcggctggcacaggaggaggagaatgagaaactccgaggagacrcacgccagaagctgcccatggacttgctggtgctggaggatgagaagcaccacggggctcagagtgcagccctgcagaaggtgaagggccaagagcgcgtgcgcaagacgtccctggacctgcggcgggagatcatcgatgtgggcgggatccagaacctcatcgagctgcggaagaaacgcaagcagaagaagcgggacgctctggccgcctcgcatgagccgcccccagagcccgaggagatcactggccytgtggatgaggagaccttcctgaaagctgcggtggaggggaaaatgaaggtcattgagaagttcctggctgacggggggtcagccgacacgtgcgaccagttccgtcggacagcactgcaccgagcttccctggaaggccacatggaaatcctggagaagcttctagataatggggccactgtggacttccaggatcggctggactgcacagccatgcattgggcctgccgcgggggccacttagaggtggtgaaacttctgcaaagccatggagcagacaccaatgtgagggataaggaaggggatactgccctgcatgacgctgtgaggctcaaccgctacaaaatcatcaaactgctgctcctgcatggggctgacatgatgaccaagaacctggcaggaaagaccccgacggacctggtgcagctctggcaggctgatacccggcacgccctggagcatcctgagccgggggctgagcataacgggctggaggggcctaatgatagtgggcgagagacccctcagcctgtgccagcccag

SEQ ID NO: 246 - DNA, 1159 bp, Homo sapiens
agaggcggttatggacggcaccatggaggactccgaggcggtgcagagggccacagcgctcatcgagcagcggctggcacaggaggaggagaatgagaaactccgaggagacrcacgccagaagctgcccatggacttgctggtgctggaggatgagaagcaccacggggctcagagtgcagccctgcagaaggtgaagggccaagagcgcgtgcgcaagacgtccctggacctgcggcgggagatcatcgatgtgggcgggatccagaacctcatcgagctgcggaagaaacgcaagcagaagaagcgggacgctctggccgcctcgcatgagccgcccccagagcccgaggagatcactggccytgtggatgaggagaccttcctgaaagctgcggtggaggggaaaatgaaggtcattgagaagttcctggctgacggggggtcagccgacacgtgcgaccagttccgtcggacagcactgcaccgagcttccctggaaggccacatggaaatcctggagaagcttctagataatggggccactgtggacttccaggatcggctggactgcacagccatgcattgggcctgccgcgggggccacttagaggtggtgaaacttctgcaaagccatggagcagacaccaatgtgagggataagctgctgagcaccccgctgcacgtggcagtccggacagggcaggtggagattgtggagcactttctatccctgggcctggaaatcaatgccagagacagggaaggggatactgccctgcatgacgctgtgaggctcaaccgctacaaaatcatcaaactgctgctcctgcatggggctgacatgatgaccaagaacctggcaggaaagaccccgacggacctggtgcagctctggcaggctgatacccggcacgccctggagcatcctgagccgggggctgagcataacgggctggaggggcctaatgatagtgggcgagagacccctcagcctgtgccagcccagtgaatgcgtgcsccagcccagccagctctctgtgtgcagccggagggtcctaagaatggctcccggagctaactgagggcccagccttttttctgcatgatccaggagcacataccacaaactaccacaaataaaaaagcttgtttttgg

SEQ ID NO: 247 - DNA, 4892 bp, Homo sapiens
aggcgttgtgaggagttgtgggggagtgagggagagaagaggttgaaaagcttattagctgctgtacggtaaaagtgagctcttacgggaatgggaatgtagttttagccctccagggattctatttagcccgccaggaattaaccttgactataaataggccatcaatgacctttccagagaatgttcagagacctcaactttgtttagagrtcttgtgtgggtggaacttcctgtttgcacacagagcagcataaagcccagttgctttgggaagtgtttgggaccagatggattgtagggagtagggtacaatacagtctgktctcctccagctccttctttctgcaacatggggaagaacaaactccttcatccaagtctggttcttctcctcttggtcctcctgcccacagacgcctcagtctctggaaaaccgcagtatatggttctggtcccctccctgctccacactgagaccactgagaagggctgtgtccttctgagctacctgaatgagacagtgactgtaagtgcttccttggagtctgtcaggggaaacaggagcctcttcactgacctggaggcggagaatgacgtactccactgtgtcgccttcgctgtcccaaagtcttcatccaatgaggaggtaatgttcctcactgtccaagtgaaaggaccaacccaagaatttaagaagcggaccacagtgatggttaagaacgaggacagtctggtctttgtccagacagacaaatcaatctacaaaccagggcagacagtgaaatttcgtgttgtctccatggatgaaaactttcaccccctgaatgagttgattccactagtatacattcaggatcccaaaggaaatcgcatcgcacaatggcagagtttccagttagagggtggcctcaagcaattttcttttcccctctcatcagagcccttccagggctcctacaaggtggtggtacagaagaaatcaggtggaaggacagagcaccctttcaccgtggaggaatttgttcttcccaagtttgaagtacaagtaacagtgccaaagataatcaccatcttggaagaagagatgaatgtatcagtgtgtggcctatacacatatgggaagcctgtccctggacatgtgactgtgagcatttgcagaaagtatagtgacgcttccgactgccacggtgaagattcacaggctttctgtgagaaattcagtggacagctaaacagccatggctgcttctatcagcaagtaaaaaccaaggtcttccagctgaagaggaaggagtatgaaatgaaacttcacactgaggcccagatccaagaagaaggaacagtggtggaattgactggaaggcagtccagtgaaatcacaagaaccataaccaaactctcatttgtgaaagtggactcacactttcracagggaattcccttctttgggcaggtgcgcctagtagatgggaaaggcgtccctataccaaataaagtcatattcatcagaggaaatgaagcaaactattactccaatgctaccacggatgagcatggccttgtacagttctctatcaacaccaccaatgttatgggtacctctcttactgttagggtcaattacaaggatcrtagtccctgttayggctaccagtgggtrtcagaagaacacgaagaggcacatcacactgcttatcttgtgttctccccaagcaagagctttgtccaccttragcccatgtctcatgaactaccctgtggccatactcagacagtccaggcacattatattctgaatggaggcaccctgctggggctgaagaagctctccttctattatctgataatggcaaagggaggcattgtccgaactgggactcatggactgcttgtgaagcaggaagacatgaagggccatttttccatctcaatccctgtgaagtcagacattgctcctgtcgctcggttgctcatctatgctgttttacctaccggggacgtgattggggattctgcaaaatatgatgttgaaaattgtctggccaacaaggtggatttgagcttcagcccatcacaaagtctcccagcctcacacgcccacctgcgagtcacagcggctcctcagtccgtctgcgccctccgtgctgtggaccaaagcgtgctgctcatgaagcctgatgctgagctctcggcgtcctcggtttacaacctgctaccagaaaaggacctcactggcttccctgggcctttgaatgaccaggacratgaagactgcatcaatcgtcataatgtctatattaatggaatcacatatactccagtatcaagtacaaatgaaaaggatatgtacagcttcctagaggacatgggcttaaaggcattcaccaactcaaagattcgtaaacccaaaatgtgtccacagcttcaacagtatgaaatgcatggacctgaaggtctacrtgtaggtttttatgagtcagatgtaatgggaagaggccatgcacgcctggtgcatgttgaagagcctcacacggagaccgtacgaaagtacttccctgagacatggatctgggatttggtggtggtaaactcagcaggtgtggctgaggtaggagtaacagtccctgacaccatcaccgagtggaaggcaggggccttctgcctgtctgaagatgctggacttggtatctcttccactgcctctctccgagccttccagcccttctttgtggagctcacaatgccttactctgtgattcgtggagaggccttcacactcaaggccacggtccwaaactaccttcccaaatgcatccgggtcagtgtgcagctggaagcctctccygccttcctagctgtcccagtggagaaggaacaagygcctcactgcatctgtgcaaacgggcggcaaactgtgtcctgggcagtaaccccaaagtcattaggaaatgtgaatttcactgtgagcgcagaggcactagagtctcaagagctgtgtgggactgaggtgccttcagttcctgaacacggaaggaaagacacagtcatcaagcctctgttggttgaacctgaaggactagagaaggaaacaacattcaactccctactttgtccatcaggtggtgaggtttctgaagaattatccctgaaactgccaccaaatgtggtagaagaatctgcccgagcttctgtctcagttttgggagacatattaggctctgccatgcaaaacacacaaaatcttctccagatgccctatggctrtggagagcagaatatggtcctctttgctcctaacatctatgtactggattatctaaatgaaacacagcagcttactccagagrtcaagtccaaggccattggctatctcaacactggttaccagagacagttgaactacaaacactatgatggctcctacagcacctttggggagcgatatggcaggaaccagggcaacacctggctcacagcctttgttctgaagacttttgcccaagctcgagcctacatcttcatcgatgaagcacacattacccaagccctcatatggctctcccagaggcagaaggacaatggctgtttcaggagctctgggtcactgctcaacaatgccataaagggaggagtagaagatgaagtgaccctctccgcctatatcaccatcgcccttctggagattcctctcacagtcactcaccctgttgtccgcaatgccctgttttgcctggagtcagcctggaagacagcacaagaaggggaccatggcagccatgtatataccaaagcactgctggcctatgcttttgccctggcaggtaaccaggacargaggaaggaagtactcaagtcacttaatgaggaagctgtgaagaaagacaactctgtccattgggagcgccctcagaaacccaaggcaccagtggggcatttttacgaaccccaggctccctctgctgaggtggagatgacatcctatgtgctcctcgcttatctcacggcccagccagccccaacctcggaggacctgacctctgcaaccaacatcgtgaagtggatcaygaagcagcagaatgcccagggcggtttctcctccacccaggacacagtggtggctctccatgctctgtccaaatatggagcagccacatttaccaggactgggaaggctgcacaggtgactatccagtcttcagggacattttccagcaaattccaagtggacaacaacaaccgcctgttactgcagcaggtctcattgccagagctgcctggggaatacagcatgaargtgacaggagaaggatgtgtctacctccagacatccttgaaatacaatattctcccagaaaaggaagagttcccctttgctttaggagtgcagactctgcctcaaacttgtgatgaacccaaagcccacaccagcttccaaatctccctaagtgtcagttacacagggagccgctctgcctccaacatggcgatcgttgatgtgaagatggtctctggcttcattcccctgaagccaacagtgaaaatgcttgaaagatctaaccatgtgagccggacagaagtcagcagcaaccatgtcttgatttaccttgataaggtgtcaaatcagacactgagcttgttcytcacggttctgcaagatgtcccagtaagagatctgaaaccagccatagtgaaagtctatgattactacgagacggatgagtttgcaattgctgagtacaatgctccttgcagcaaagatcttggaaatgcttgaagaccacaaggctgaaaagtgctttgctggagtcctgttytcwgagctccmcagaagacacgtgtttttgtatctttaaagacttgatgaataaacactttttctggtcaatgtc

SEQ ID NO: 248 - DNA, 6497 bp, Homo sapiens
gtctagcgggatcgcttgcttggtaasccggagggagagattggaaaccgcggagtttcctttgggaggctgcggccagccggggctgacttgttatgttgggctccrgaggccgttaagagccgagagagacatgaggtgtctctgaagcccggtcgcctgggccatgaagaagatttttagtaagaagggcgagtcgcccttgggctccttcgcgcggcggcrgaggagcagcgcgggaggcgggggcgagccgggggagggcgcctactcgcagcccggctaccacgtccgagaccgagatctcggcaagatccacaaagctgccagcgcgggtaatgtggcgaaagtgcagcagatccttttgctcaggaagaatggcttgaacgatagagacaagatgaacaggacggctctacatttggcctgtgccaatggtcatccagaagtagtaactctcctggtggacagaaaatgccagctcaatgtctgtgacaacgaaaacaggacagctctgatgaaggctgtacaatgccaggaagagaaatgtgcaactattctgctagaacatggtgctgatccaaatcttgcggatgtccatggcaacactgctcttcactatgctgtctataatgaggacatatcagtagcaacaaagctgcttttgtatgatgcaaatattgaagcaaaaaacaaggatgacctcacaccacttttacttgcagtaagtggaaaaaagcagcaaatggtggaatttttaataaagaaaaaagcaaatgtaaatgcagtrgataagttggaaagcagtcaccaactaatttcagaatataaagaagaaaggatacctaaacattcttctcaaaatagtaattcagtggatgaaagctctgaagactccttaagcaggctttctggcaaaccgggtgttgatgattcatggcctacctcagatgacgaaracctcaattttgatactaagaatgtcccaaaaccaagcttagcaaagctaatgactgcttctcagcaatccaggaaaaatttagaagcaacatatggcactgtgagaacaggaaatagaactttgtttgaggatagagattcckatagtcaagatgaagttgtggttgaaagccttcctacaacatcaatcaaagtccagtgcttttctcatcctacctatcaatcacctgaccttcttccaaaaccttcccacaagtcgttagcaaaccctggtcttatgaaggaagaaccaacaaagccaggcattgcaaaaaaagaaaatggtattgatattattgaaagtgctccactagagcaaacaaataatgacaatttgacttatgttgatgaagtgcacaaaaataatagaagtgatatgatgtccgcattaggattaggacaagaggaagatatagaatcaccttgggattctgagagtrtctctgagaattttccacagaagtatgttgatcctttagctggggctgcagacggaaaagaaaaaaatataggaaatgaacaagcagaagatgtgttttatataccttcttgcatgagtggatcaagaaactttaagatggctaaactagaggatacaagaaatgtaggcatgccagtagcccacatggagtctcctgagagatatcttcacttgaagcctaccattgaaatgaaagattctgttccaaataaagcaggaggaatgaaggatgtacaaacatccaaagcagctgaacatgacttagaagtagcatcagaagaagagcaagaaagggaagggagtgaaaataaccagccacaggttgaagaagaaaggaaaaaacacagaaataatgaaatggaagtatcagcaaacatacatgatggtgctactgatgatgctgaagatgatgatgatgatgatggattaattcaaaaaagaaagagtggagaaactgatcatcagcaatttcccaggaaggaaaataaagagtatgctagtggtcctgccttgcaaatgaaggaagtaaagagcactgaaaaagaaaaacrgacctcgaaagaatctgtgaattcaccagtgtttgggaaggccagtttactaactggtggcctgctacaagtggatgatgacagcagtttaagtgaaatagatgaggatgaaggaaggcctactaagaaaacatctaatgaaaagaacaaggtcaaaaaccaaatacagtctatggatgatgttgatgacttaactcagtcatctgaaacagcctcagaggattgtgagctaccccactctagttacaagaattttatgttgctcattgaacaacttggaatggagtgtaaagattctgttagcctattgaaaatccaggatgcagctctttcatgtgaaagattattagaacttaaaaaaaatcactgtgaactacttacagtaaaaattaaaaaaatggaagacaaggttaatgtactacaaagggagctatctgaaacaaaagaaataaaatcacagttagagcatcaaaaagttgaatgggaacgagaactgtgctctttgagatttwgcttaaaccaagaagaagagaagagaagaaatgctgatacgttgtatgaaaaaattagggaacagttaagaagaaaagaagagcaatataggaaagaagttgaagtgaaacaacagcttgaactgagtctccaaacactggagatggaattgaggactgtaaaaagtaatttgaatcaggtcgttcaagagcgaaatgacgctcagaggcaactttctcgagaacagaatgccagaatgttacaagatggaattctgaccaatcacctttccaaacaaaaggagattgaaatggctcaraagaaaatgaattctgagaattctcatagtcatgaagaagaaaaagacctatcgcataaaaatagcatgttgcaggaagaaattgctatgctaagactagaaatagacacaataaaaaatcaaaaccaggaaaaagaaaagaaatgttttgaggaccttaaaattgtaaaagaaaagaatgaagaccttcagaagactataaaacagaatgaggaaacattaacacaaacaatatcccagtataatggacggcttagtgttctgacagctgagaatgcaatgctaaattctaaaytggmgaatgaaaagcaaagcaaggaaagactggaagcagaagttgaatcataccattctagattggctgctgctatacatgatcgtgatcaaagtgagacatcaaaaagagaactagaacttgctttccagagagcaagagatgaatgttctcgtttacaggacaaaatgaattttgatgtgtctaacctaaaagataacaatgagattctttctcaacaactatttaaaactgaaagtaaactcaatagcctagaaattgagttccatcacacgagagatgccctcagagaaaagactttgggtttagaacgggtacaaaaggacctaagccaaacacagtgtcaaatgaaggaaatggaacaaaagtatcaaaatgaacaagttaaagtgaataaatacattggaaarcaggagtctgtagaggagagattgtctcaactacaaagtgagaatatgttgcttcgacaacaactggatgatgcccacaacaaggctgacaataaagagaagacagtgattaatatccaagaccagtttcatgctattgtgcaaaaacttcaagctgagagtgaaaagcaaagtcttctgctagaagaaagaaataaggagttaatcagtgaatgtaatcacttaaaagaaagacagtatcaatatgaaaatgaaaaggcagaaagagaagttgttgtgagacaacttcaacaagaactagctgataccctaaaaaaacaatctatgtcagaggcttcactggaggttacgtcacgttatcgtattaatttagaagatgagacacaggatttaaagaagaaattaggtcaaatcagaaatcaattgcaagaagcacaggatcgacatacagaagctgtcagatgtgctgagaagatgcaagatcacaagcaaaagcttgaaaaagataatgccaagttaaaagttacartcaaaaagcaaatggacaaaattgaggagcttcagaaaaacctgttaaatgcaaatttgtctgaagatgaaaaggaacaattaaagaaacttatggaattaaaacagtcactggaatgtaatttggatcaagaaatgaagaaaaatgttgaattagaaagagagataactggatttaagaacctcttaaaaatgacaagaaagaagttaaatgaatatgaaaatggagaatttagtttccatggagatttaaaaactagtcaatttgaaatggatattcagattaataagctaaaacataagattgatgatcttacagcagaactggagactgcaggttcaaaatgtctacatctggatacaaagaaccaaattcttcaagaggagttgttatctatgaaaacagtacaaaagaaatgtgaaaaactacagaagaataaaaagaagttggaacaagaagtgatcaacctgagaagtcatatagaaaggaatatggtagaacttggtcaagtcaaacagtataaacaggagattgaagaaagagcaagacaggaaatagcagaaaaattaaaagaagtcaatctatttttacaggcacaagcagcatctcaagaaaacttagagcagttwagagagaataattttgcttcaatgaaaagtcagatggaactcagaattaaagatctggaatctgaactctccaaaataaaaacttctcaagaagactttaataaaaccgaactggaaaaatataagcaactctatctagaagaattaaaagttagaaaatctttgtcaagtaaactaaccaaaactaatgagaggctagcagaggtcaacaccaaacttcttgtggaaaaacagcagagcagatctttgttcaccactctcactaccaggccagtcatggagccaccttgtgtgggaaatcttaataatagtttagatctcaacagaaaacttattccaagagaaaacttagtgatctctacctcaaatccacgggcttcaaataatagcatggagaactacttgagcaagatgcagcaggagttggaaaaaaatataactagagaactcaaagaagctgctgctgaattggaatctggatcaatagcttcccctctagggtctactgatgagtcaaatctaaatcaagatctagtttggaaagcatcaagagaatatgtacaggttttaaagaaaaattatatgatctgaaagataagattttattactgggctgtttatgtgacattttrtttctcattaaatattaatatatgacatgtaaaaatattaaaggaacgtatttttgtatcatatatgtcagatcaaaatttatatagtattttaaacaatgttacttggcttctttaacttttaagtggattttgccaatgaaaaccaggaatattgagttttacatactcaaactgcccaaatgtgagctgtttaaacagccaaaccactaagttgtcattaatactttagtgcagttaattgatggcttatttgtattttgtaatttttatcactatatgtagtggtagatgtctaattggacttagacatcattttgttgtgcaggaactgtggtcattgttcatgtttggatgtattacaattgttacagtgccatcaaatttacataattttaattttaagcactgatttatatagctgttctcagggagaaacaagatttgcctgattcaccttttctgtttgtttatttatttttaattaaccttttggaaatagccttcagtttagagaaaatttcgaagttttagtacaaagactttctcctccgaacaatttgagagtaaattgctgacattatgtcatcacccctgattactttagtgggcattcctacaagtcaggacattctacataactacagtgcaaaccttgcaatcagaaagtcaacattaayacattctagtttgttacttctctgtaatgtcctttatagcaaaaggatcccattctaatccatggcttgtatttagttgttgtatctgttagatctttcagtctggaacagttcctcagtctttccttgaccttcatgaccttgaatattttgaagagtaaagtctggtaatataagaatgtmcctcaattgggtttcatggtgattagatttagattatatgattttttggcaggagtatcacagaagtgacccagtgatcttctcattgcatcttacctgtgaccctacagttttgatttgccctgttactggtaatgttagcattgatcactaacagtggtatctgctgaatttctcctctgtaatgttattttttcaccttgtggttaattagtrttttacagggaggtaatttgagactatgtacatatctctactccccatcgaaccytcaatttattcatttgcttgtatcaa

SEQ ID NO: 249 - DNA, 3654 bp, Homo sapiens
tttttcttcttcctgtctaatagcccaatagaatcctgccagaatttctacaaagatttcacattacagatcgacatggctttcaacgtgttcttccttctctacttyggcttgcggtttattgcagccaacgataaattgtggttctggctggaagtgaactctgtagtggatttcttcacggtgccccccgtgtttgtgtctgtgtacttaaacagaagttggcttggtttgagatttttaagagctctgagactgatacagttttcagaaattttgcagtttctgaatattcttaaaacaagtaattccatcaagctggtgaatctgctctccatatttatcagcacgtggctgactgcagccgggttcatccatttggtggagaattcaggggacccatgggaaaatttccaaaacaaccaggctctcacctactgggaatgtgtctatttactcatggtcacaatgtccaccgttggttatggggatgtttatgcaaaaaccacacttgggcgcctcttcatggtcttcttcatcctcgggggactggccatgtttgccagctacgtccctgaaatcatagagttaataggaaaccgcaagaaatacgggggctcctatagtgcggttagtggaagaaagcacattgtggtctgcggacacatcactctggagagtgtttccaacttcctgaaggactttctgcacaaggaccgggatgacgtcaatgtggagatcgtttttcttcacaacatctcccccaacctggagcttgaagctctgttcaaacgacattttactcaggtggaattttatcagggttccgtcctcaatccacatgatcttgcaagagtcaagatagagtcagcagatgcatgcctgatccttgccaacaagtactgcgctgacccggatgcggaggatgcctcgaatatcatgagagtaatctccataaagaactaccatccgaagataagaatcatcactcaaatgctgcagtatcacaacaaggcccatctgctaaacatcccgagctggaattggaaagaaggtgatgacgcaatctgcctcgcagagttgaagttgggcttcatagcccagagckgcctggctcaaggcctctccaccatgcttgccaacctcttctccatgaggtcattcataaagattgaggaagacacatggcagaaatactacttggaaggagtctcaaatgaaatgtacacagaatatctctccagtgccttcgtgggtctgtccttccctactgtttgtgagctgtgttttgtgaagctcaagctcctaatgatagccattgagtacaagtctgccaaccgagagagccgtatattaattaatcctggaaaccatcttaagatccaagaaggtactttaggatttttcatcgcaagtgatgccaaagaagttaaaagggcatttttttactgcaaggcctgtcatgatgacatcacagatcccaaaagaataaaaaaatgtggctgcaaacggcccaagatgtccatctacaagagaatgagacgggcatgttgttttgattgcggacgttctgagcgtgactgctcatgcatgtcaggccgtgtgcgtggtaacgtggacacccttgagagagccttcccactttcttctgtctctgttaatgattgctccaccagtttccgtgcctttgaagatgagcagccgtcaacactatcaccaaaaaaaaagcaacggaatggaggcatgcggaactcacccaacacctcgcctaagctgatgaggcatgaccccttgttaattcctggcaatgatcagattgacaacatggactccaatgtgaagaagtacgactctactgggatgtttcactggtgtgcacccaaggagatagagaaagtcatcctgactcgaagtgaagctgccatgaccgtcctgagtggccatgtygtggtctgcatctttggcgacgtcagctcagccctgatcggcctccggaacctggtgatgccgctccgtgccagcaactttcattaccatgagctcaagcacattgtgtttgtgggctctattgagtacctcaagcgggaatgggagacgcttcataacttccccaaagtgtccatattgcctggtacgccattaagtcgggctgatttaagggctgtcaacatcaacctctgtgacatgtgcgttatcctgtcagccaatcagaataatattgatgatacttcgctgcaggacaaggaatgcatcttggcgtcactcaacatcaaatctatgcagtttgatgacagcatcggagtcttgcaggctaattcccaagggttcacacctccaggaatggatagatcctctccagataacagcccagtgcacgggatgttacgtcaaccatccatcacaactggggtcaacatccccatcatcactgaactagtgaacgatactaatgttcagtttttggaccaagacgatgatgatgaccctgatacagaactgtacctcacgcagccctttgcctgtgggacagcatttgccgtcagtgtcctggactcactcatgagcgcgacgtacttcaatgacaatatcctcaccctgatacggaccctggtgacyggaggagccacgccggagctggaggctctgattgctgaggaaaacgcccttagaggtggctacagcaccccgcagacactggccaatagggaccgctgccgcgtggcccagttagctctgctcgatgggccatttgcggacttaggggatggtggttgttatggtgatctgttctgcaaagctctgaaaacatataatatgctttgttttggaatttaccggctgagagatgctcacctcagcacccccagtcagtgcacaaagaggtatgtcatcaccaacccgccctatgagtttgagctcgtgccgacggacctgatcttctgcttaatgcagtttgaccacaatgccggccagtcccgggccagcctgtcccattcctcccactcgtcgcagtcctccagcaagaagagctcctctgttcactccatcccatccacagcaaaccgacagaaccggcccaagtccagggagtcccgggacaaacagaagtacgtgcaggaagagcggctttgatatgtgtatccaccgccactgtgtgaaactgtatctgccactcatttccccagttggtgtttccaacaaagtaactttccctgttttcccctgtagtccccccctttttttttacacatatttgcatatgtatgatagtgtgcatgtggttgtcatttttatttcaccaccataaaacccttgagcacaacagcaaataagcagacggrccaaaagttatttatgattctgggggaaaaataacccaaaggcatgctccagacataaatagctcactgcaggaacgagttcacagattagaagggagcacttgtgatcaacgtcagttaggcagagcaagtttatttaatgtaaaagaaaagttgattctgatttatcaggattatcagggtgctttgggttttgattttgttgttgttgttgttttcctttctttctttttttatacacacaataagttagcacatgtttatttgaaacaagcaacmaaacagcaatgaaaacatattgattgtttccagt

SEQ ID NO: 250 - DNA, 3480 bp, Homo sapiens
tttttcttcttcctgtctaatagcccaatagaatcctgccagaatttctacaaagatttcacattacagatcgacatggctttcaacgtgttcttccttctctacttyggcttgcggtttattgcagccaacgataaattgtggttctggctggaagtgaactctgtagtggatttcttcacggtgccccccgtgtttgtgtctgtgtacttaaacagaagttggcttggtttgagatttttaagagctctgagactgatacagttttcagaaattttgcagtttctgaatattcttaaaacaagtaattccatcaagctggtgaatctgctctccatatttatcagcacgtggctgactgcagccgggttcatccatttggtggagaattcaggggacccatgggaaaatttccaaaacaaccaggctctcacctactgggaatgtgtctatttactcatggtcacaatgtccaccgttggttatggggatgtttatgcaaaaaccacacttgggcgcctcttcatggtcttcttcatcctcgggggactggccatgtttgccagctacgtccctgaaatcatagagttaataggaaaccgcaagaaatacgggggctcctatagtgcggttagtggaagaaagcacattgtggtctgcggacacatcactctggagagtgtttccaacttcctgaaggactttctgcacaaggaccgggatgacgtcaatgtggagatcgtttttcttcacaacatctcccccaacctggagcttgaagctctgttcaaacgacattttactcaggtggaattttatcagggttccgtcctcaatccacatgatcttgcaagagtcaagatagagtcagcagatgcatgcctgatccttgccaacaagtactgcgctgacccggatgcggaggatgcctcgaatatcatgagagtaatctccataaagaactaccatccgaagataagaatcatcactcaaatgctgcagtatcacaacaaggcccatctgctaaacatcccgagctggaattggaaagaaggtgatgacgcaatctgcctcgcagagttgaagttgggcttcatagcccagagckgcctggctcaaggcctctccaccatgcttgccaacctcttctccatgaggtcattcataaagattgaggaagacacatggcagaaatactacttggaaggagtctcaaatgaaatgtacacagaatatctctccagtgccttcgtgggtctgtccttccctactgtttgtgagctgtgttttgtgaagctcaagctcctaatgatagccattgagtacaagtctgccaaccgagagagccgtatattaattaatcctggaaaccatcttaagatccaagaaggtactttaggatttttcatcgcaagtgatgccaaagaagttaaaagggcatttttttactgcaaggcctgtcatgatgacatcacagatcccaaaagaataaaaaaatgtggctgcaaacggcttgaagatgagcagccgtcaacactatcaccaaaaaaaaagcaacggaatggaggcatgcggaactcacccaacacctcgcctaagctgatgaggcatgaccccttgttaattcctggcaatgatcagattgacaacatggactccaatgtgaagaagtacgactctactgggatgtttcactggtgtgcacccaaggagatagagaaagtcatcctgactcgaagtgaagctgccatgaccgtcctgagtggccatgtygtggtctgcatctttggcgacgtcagctcagccctgatcggcctccggaacctggtgatgccgctccgtgccagcaactttcattaccatgagctcaagcacattgtgtttgtgggctctattgagtacctcaagcgggaatgggagacgcttcataacttccccaaagtgtccatattgcctggtacgccattaagtcgggctgatttaagggctgtcaacatcaacctctgtgacatgtgcgttatcctgtcagccaatcagaataatattgatgatacttcgctgcaggacaaggaatgcatcttggcgtcactcaacatcaaatctatgcagtttgatgacagcatcggagtcttgcaggctaattcccaagggttcacacctccaggaatggatagatcctctccagataacagcccagtgcacgggatgttacgtcaaccatccatcacaactggggtcaacatccccatcatcactgaactagtgaacgatactaatgttcagtttttggaccaagacgatgatgatgaccctgatacagaactgtacctcacgcagccctttgcctgtgggacagcatttgccgtcagtgtcctggactcactcatgagcgcgacgtacttcaatgacaatatcctcaccctgatacggaccctggtgacyggaggagccacgccggagctggaggctctgattgctgaggaaaacgcccttagaggtggctacagcaccccgcagacactggccaatagggaccgctgccgcgtggcccagttagctctgctcgatgggccatttgcggacttaggggatggtggttgttatggtgatctgttctgcaaagctctgaaaacatataatatgctttgttttggaatttaccggctgagagatgctcacctcagcacccccagtcagtgcacaaagaggtatgtcatcaccaacccgccctatgagtttgagctcgtgccgacggacctgatcttctgcttaatgcagtttgaccacaatgccggccagtcccgggccagcctgtcccattcctcccactcgtcgcagtcctccagcaagaagagctcctctgttcactccatcccatccacagcaaaccgacagaaccggcccaagtccagggagtcccgggacaaacagaagtacgtgcaggaagagcggctttgatatgtgtatccaccgccactgtgtgaaactgtatctgccactcatttccccagttggtgtttccaacaaagtaactttccctgttttcccctgtagtccccccctttttttttacacatatttgcatatgtatgatagtgtgcatgtggttgtcatttttatttcaccaccataaaacccttgagcacaacagcaaataagcagacggrccaaaagttatttatgattctgggggaaaaataacccaaaggcatgctccagacataaatagctcactgcaggaacgagttcacagattagaagggagcacttgtgatcaacgtcagttaggcagagcaagtttatttaatgtaaaagaaaagttgattctgatttatcaggattatcagggtgctttgggttttgattttgttgttgttgttgttttcctttctttctttttttatacacacaataagttagcacatgtttatttgaaacaagcaacmaaacagcaatgaaaacatattgattgtttccagt

SEQ ID NO: 251 - DNA, 3507 bp, Homo sapiens
tttttcttcttcctgtctaatagcccaatagaatcctgccagaatttctacaaagatttcacattacagatcgacatggctttcaacgtgttcttccttctctacttyggcttgcggtttattgcagccaacgataaattgtggttctggctggaagtgaactctgtagtggatttcttcacggtgccccccgtgtttgtgtctgtgtacttaaacagaagttggcttggtttgagatttttaagagctctgagactgatacagttttcagaaattttgcagtttctgaatattcttaaaacaagtaattccatcaagctggtgaatctgctctccatatttatcagcacgtggctgactgcagccgggttcatccatttggtggagaattcaggggacccatgggaaaatttccaaaacaaccaggctctcacctactgggaatgtgtctatttactcatggtcacaatgtccaccgttggttatggggatgtttatgcaaaaaccacacttgggcgcctcttcatggtcttcttcatcctcgggggactggccatgtttgccagctacgtccctgaaatcatagagttaataggaaaccgcaagaaatacgggggctcctatagtgcggttagtggaagaaagcacattgtggtctgcggacacatcactctggagagtgtttccaacttcctgaaggactttctgcacaaggaccgggatgacgtcaatgtggagatcgtttttcttcacaacatctcccccaacctggagcttgaagctctgttcaaacgacattttactcaggtggaattttatcagggttccgtcctcaatccacatgatcttgcaagagtcaagatagagtcagcagatgcatgcctgatccttgccaacaagtactgcgctgacccggatgcggaggatgcctcgaatatcatgagagtaatctccataaagaactaccatccgaagataagaatcatcactcaaatgctgcagtatcacaacaaggcccatctgctaaacatcccgagctggaattggaaagaaggtgatgacgcaatctgcctcgcagagttgaagttgggcttcatagcccagagckgcctggctcaaggcctctccaccatgcttgccaacctcttctccatgaggtcattcataaagattgaggaagacacatggcagaaatactacttggaaggagtctcaaatgaaatgtacacagaatatctctccagtgccttcgtgggtctgtccttccctactgtttgtgagctgtgttttgtgaagctcaagctcctaatgatagccattgagtacaagtctgccaaccgagagagccgtatattaattaatcctggaaaccatcttaagatccaagaaggtactttaggatttttcatcgcaagtgatgccaaagaagttaaaagggcatttttttactgcaaggcctgtcatgatgacatcacagatcccaaaagaataaaaaaatgtggctgcaaacggcttgaagatgagcagccgtcaacactatcaccaaaaaaaaagcaacggaatggaggcatgcggaactcacccaacacctcgcctaagctgatgaggcatgaccccttgttaattcctggcaatgatcagattgacaacatggactccaatgtgaagaagtacgactctactgggatgtttcactggtgtgcacccaaggagatagagaaagtcatcctgactcgaagtgaagctgccatgaccgtcctgagtggccatgtygtggtctgcatctttggcgacgtcagctcagccctgatcggcctccggaacctggtgatgccgctccgtgccagcaactttcattaccatgagctcaagcacattgtgtttgtgggctctattgagtacctcaagcgggaatgggagacgcttcataacttccccaaagtgtccatattgcctggtacgccattaagtcgggctgatttaagggctgtcaacatcaacctctgtgacatgtgcgttatcctgtcagccaatcagaataatattgatgatacttcgctgcaggacaaggaatgcatcttggcgtcactcaacatcaaatctatgcagtttgatgacagcatcggagtcttgcaggctaattcccaagggttcacacctccaggaatggatagatcctctccagataacagcccagtgcacgggatgttacgtcaaccatccatcacaactggggtcaacatccccatcatcactgaactagtgaacgatactaatgttcagtttttggaccaagacgatgatgatgaccctgatacagaactgtacctcacgcagccctttgcctgtgggacagcatttgccgtcagtgtcctggactcactcatgagcgcgacgtacttcaatgacaatatcctcaccctgatacggaccctggtgacyggaggagccacgccggagctggaggctctgattgctgaggaaaacgcccttagaggtggctacagcaccccgcagacactggccaatagggaccgctgccgcgtggcccagttagctctgctcgatgggccatttgcggacttaggggatggtggttgttatggtgatctgttctgcaaagctctgaaaacatataatatgctttgttttggaatttaccggctgagagatgctcacctcagcacccccagtcagtgcacaaagaggtatgtcatcaccaacccgccctatgagtttgagctcgtgccgacggacctgatcttctgcttaatgcagtttgaccacaatgccggccagtcccgggccagcctgtcccattcctcccactcgtcgcagtcctccagcaagaagagctcctctgttcactccatcccatccacagcaaaccgacagaaccggcccaagtccagggagtcccgggacaaacagaaaaaagaaatggtttacagatgaaccggataatgcctatcccagaaacattcaaatcaagcccatgagtacccacatggctaaccagatcaaccaatataaatccacaagcagcttgattccaccaatcagagaagttgaagatgaatgttgactcccaggagaccagaactatttttttaaagcctgacaaacttcataaatggtgatgtgacttttcttcttacatgctgaatcactggtggaaacgttaggataagcaagaattgccagaaaataaagtagacagatctttctctttgtctgccttgaatattgcttccatgtattttggaaaagaaaatgatttcatttataaatgaacatactaaaatagtcatgtatagcctctagcattttaaattatttttatttattagaaagaaaatatattttttcttttcattgtcaaatatcttccctatatctaaacaatgcaaaatctaaatgaataagtggtcagactccttaatgtgtttttctcttctttctctctttttctttgaggagaatgatggtcaccaccacaattaattg

SEQ ID NO: 252 - DNA, 5012 bp, Homo sapiens
ccgggccgctgccgaggggccctgcccacccctgcccagcccggagcccaggcgagccagcgcggcgagcctcctcccctcccgcctgggtcgtcctgagtccgcgcccgctccagttgctgcagctgctgctgctggcggctgcggggagcgcggggcgcgcgccgaagaggcttgggcggcgaggacggggacgaggaggagtcggaggcggcaaggaggaagagcgagcggaggccgaggggctcagcggcgtggcgacaggactagggggtcccgagaacatgggctagcaggcggccacgggccggcggccggacgcggtgaacctgccgcggccgggcgcgcactggcgcggcgagccggagccgagcgcagccgggggaggagggctggcgcaggggcgcccgggcggagggggccgattatccattattaacgagttaccacctaataagcggagagcggctcgttagccgcgcgggaggcgctcggggaagggggtcaccggccgagcgcagcgcacacccgtggcgcacggcgggcggcgcggcgccgaggacacccgggaccgcgcgcggagccggggcgggcccgggggcggcgcagaccccgggcgcgggcggcccgcggcgccccctggctctcggcgctcggggccagcgcagcccggggcgagyggggcgcgggccggggagggggagctgcccgcgcactccatccccctcccccccgggcgggcggcggcggctcgctgtatatatctcggcgcaccccgccaggtcgcgcacagcgccccgagcccaggcgcctccccgcccccctcccgcgctccgcggcggcggcggcggcggcagcagtagcagcaatatggctgttgatgggtgtttggggtggcgctggcggcgggaggagctcccccgagcccctgcgccggctgcccgttgctagctatggcaaatggtggcggcggcggcggcggcagcagcggcggcggcggcggcggcggaggcagcagtcttagaatgagtagcaatatccacgcgaaccatctcagcctagacgcgtcctcctcctcctcctcctcctcttcctcttcttcttcttcctcctcctcttcctcctcgtcctcggtccacgagcccaagatggatgcgctcatcatcccggtgaccatggaggtgccgtgcgacagccggggccaacgcatgtggtgggctttcctggcctcctccatggtgactttcttcgggggcctcttcatcatcttgctctggcggacgctcaagtacctgtggaccgtgtgctgccactgcgggggcaagacgaaggaggcccagaagattaacaatggctcaagccaggcrgatggcactctcaaaccagtggatgaaaaagaggaggcagtggccgccgaggtcggctggatgacctccgtgaaggactgggcgggggtgatgatatccgcccagacactgactggcagagtcctggttgtcttagtctttgctctcagcatcggtgcacttgtaatatacttcatagattcatcaaacccaatagaatcctgccagaatttctacaaagatttcacattacagatcgacatggctttcaacgtgttcttccttctctacttyggcttgcggtttattgcagccaacgataaattgtggttctggctggaagtgaactctgtagtggatttcttcacggtgccccccgtgtttgtgtctgtgtacttaaacagaagttggcttggtttgagatttttaagagctctgagactgatacagttttcagaaattttgcagtttctgaatattcttaaaacaagtaattccatcaagctggtgaatctgctctccatatttatcagcacgtggctgactgcagccgggttcatccatttggtggagaattcaggggacccatgggaaaatttccaaaacaaccaggctctcacctactgggaatgtgtctatttactcatggtcacaatgtccaccgttggttatggggatgtttatgcaaaaaccacacttgggcgcctcttcatggtcttcttcatcctcgggggactggccatgtttgccagctacgtccctgaaatcatagagttaataggaaaccgcaagaaatacgggggctcctatagtgcggttagtggaagaaagcacattgtggtctgcggacacatcactctggagagtgtttccaacttcctgaaggactttctgcacaaggaccgggatgacgtcaatgtggagatcgtttttcttcacaacatctcccccaacctggagcttgaagctctgttcaaacgacattttactcaggtggaattttatcagggttccgtcctcaatccacatgatcttgcaagagtcaagatagagtcagcagatgcatgcctgatccttgccaacaagtactgcgctgacccggatgcggaggatgcctcgaatatcatgagagtaatctccataaagaactaccatccgaagataagaatcatcactcaaatgctgcagtatcacaacaaggcccatctgctaaacatcccgagctggaattggaaagaaggtgatgacgcaatctgcctcgcagagttgaagttgggcttcatagcccagagckgcctggctcaaggcctctccaccatgcttgccaacctcttctccatgaggtcattcataaagattgaggaagacacatggcagaaatactacttggaaggagtctcaaatgaaatgtacacagaatatctctccagtgccttcgtgggtctgtccttccctactgtttgtgagctgtgttttgtgaagctcaagctcctaatgatagccattgagtacaagtctgccaaccgagagagccgtatattaattaatcctggaaaccatcttaagatccaagaaggtactttaggatttttcatcgcaagtgatgccaaagaagttaaaagggcatttttttactgcaaggcctgtcatgatgacatcacagatcccaaaagaataaaaaaatgtggctgcaaacggcttgaagatgagcagccgtcaacactatcaccaaaaaaaaagcaacggaatggaggcatgcggaactcacccaacacctcgcctaagctgatgaggcatgaccccttgttaattcctggcaatgatcagattgacaacatggactccaatgtgaagaagtacgactctactgggatgtttcactggtgtgcacccaaggagatagagaaagtcatcctgactcgaagtgaagctgccatgaccgtcctgagtggccatgtygtggtctgcatctttggcgacgtcagctcagccctgatcggcctccggaacctggtgatgccgctccgtgccagcaactttcattaccatgagctcaagcacattgtgtttgtgggctctattgagtacctcaagcgggaatgggagacgcttcataacttccccaaagtgtccatattgcctggtacgccattaagtcgggctgatttaagggctgtcaacatcaacctctgtgacatgtgcgttatcctgtcagccaatcagaataatattgatgatacttcgctgcaggacaaggaatgcatcttggcgtcactcaacatcaaatctatgcagtttgatgacagcatcggagtcttgcaggctaattcccaagggttcacacctccaggaatggatagatcctctccagataacagcccagtgcacgggatgttacgtcaaccatccatcacaactggggtcaacatccccatcatcactgaactagtgaacgatactaatgttcagtttttggaccaagacgatgatgatgaccctgatacagaactgtacctcacgcagccctttgcctgtgggacagcatttgccgtcagtgtcctggactcactcatgagcgcgacgtacttcaatgacaatatcctcaccctgatacggaccctggtgacyggaggagccacgccggagctggaggctctgattgctgaggaaaacgcccttagaggtggctacagcaccccgcagacactggccaatagggaccgctgccgcgtggcccagttagctctgctcgatgggccatttgcggacttaggggatggtggttgttatggtgatctgttctgcaaagctctgaaaacatataatatgctttgttttggaatttaccggctgagagatgctcacctcagcacccccagtcagtgcacaaagaggtatgtcatcaccaacccgccctatgagtttgagctcgtgccgacggacctgatcttctgcttaatgcagtttgaccacaatgccggccagtcccgggccagcctgtcccattcctcccactcgtcgcagtcctccagcaagaagagctcctctgttcactccatcccatccacagcaaaccgacagaaccggcccaagtccagggagtcccgggacaaacagaagtacgtgcaggaagagcggctttgatatgtgtatccaccgccactgtgtgaaactgtatctgccactcatttccccagttggtgtttccaacaaagtaactttccctgttttcccctgtagtccccccctttttttttacacatatttgcatatgtatgatagtgtgcatgtggttgtcatttttatttcaccaccataaaacccttgagcacaacagcaaataagcagacggrccaaaagttatttatgattctgggggaaaaataacccaaaggcatgctccagacataaatagctcactgcaggaacgagttcacagattagaagggagcacttgtgatcaacgtcagttaggcagagcaagtttatttaatgtaaaagaaaagttgattctgatttatcaggattatcagggtgctttgggttttgattttgttgttgttgttgttttcctttctttctttttttatacacacaataagttagcacatgtttatttgaaacaagcaacmaaacagcaatgaaaacatattgattgtttccagt

SEQ ID NO: 253 - DNA, 3539 bp, Homo sapiens
tttttcttcttcctgtctaatagcccaatagaatcctgccagaatttctacaaagatttcacattacagatcgacatggctttcaacgtgttcttccttctctacttyggcttgcggtttattgcagccaacgataaattgtggttctggctggaagtgaactctgtagtggatttcttcacggtgccccccgtgtttgtgtctgtgtacttaaacagaagttggcttggtttgagatttttaagagctctgagactgatacagttttcagaaattttgcagtttctgaatattcttaaaacaagtaattccatcaagctggtgaatctgctctccatatttatcagcacgtggctgactgcagccgggttcatccatttggtggagaattcaggggacccatgggaaaatttccaaaacaaccaggctctcacctactgggaatgtgtctatttactcatggtcacaatgtccaccgttggttatggggatgtttatgcaaaaaccacacttgggcgcctcttcatggtcttcttcatcctcgggggactggccatgtttgccagctacgtccctgaaatcatagagttaataggaaaccgcaagaaatacgggggctcctatagtgcggttagtggaagaaagcacattgtggtctgcggacacatcactctggagagtgtttccaacttcctgaaggactttctgcacaaggaccgggatgacgtcaatgtggagatcgtttttcttcacaacatctcccccaacctggagcttgaagctctgttcaaacgacattttactcaggtggaattttatcagggttccgtcctcaatccacatgatcttgcaagagtcaagatagagtcagcagatgcatgcctgatccttgccaacaagtactgcgctgacccggatgcggaggatgcctcgaatatcatgagagtaatctccataaagaactaccatccgaagataagaatcatcactcaaatgctgcagtatcacaacaaggcccatctgctaaacatcccgagctggaattggaaagaaggtgatgacgcaatctgcctcgcagagttgaagttgggcttcatagcccagagckgcctggctcaaggcctctccaccatgcttgccaacctcttctccatgaggtcattcataaagattgaggaagacacatggcagaaatactacttggaaggagtctcaaatgaaatgtacacagaatatctctccagtgccttcgtgggtctgtccttccctactgtttgtgagctgtgttttgtgaagctcaagctcctaatgatagccattgagtacaagtctgccaaccgagagagccgtatattaattaatcctggaaaccatcttaagatccaagaaggtactttaggatttttcatcgcaagtgatgccaaagaagttaaaagggcatttttttactgcaaggcctgtcatgatgacatcacagatcccaaaagaataaaaaaatgtggctgcaaacggcttgaagatgagcagccgtcaacactatcaccaaaaaaaaagcaacggaatggaggcatgcggaactcacccaacacctcgcctaagctgatgaggcatgaccccttgttaattcctggcaatgatcagattgacaacatggactccaatgtgaagaagtacgactctactgggatgtttcactggtgtgcacccaaggagatagagaaagtcatcctgactcgaagtgaagctgccatgaccgtcctgagtggccatgtygtggtctgcatctttggcgacgtcagctcagccctgatcggcctccggaacctggtgatgccgctccgtgccagcaactttcattaccatgagctcaagcacattgtgtttgtgggctctattgagtacctcaagcgggaatgggagacgcttcataacttccccaaagtgtccatattgcctggtacgccattaagtcgggctgatttaagggctgtcaacatcaacctctgtgacatgtgcgttatcctgtcagccaatcagaataatattgatgatacttcgctgcaggacaaggaatgcatcttggcgtcactcaacatcaaatctatgcagtttgatgacagcatcggagtcttgcaggctaattcccaagggttcacacctccaggaatggatagatcctctccagataacagcccagtgcacgggatgttacgtcaaccatccatcacaactggggtcaacatccccatcatcactgaactagtgaacgatactaatgttcagtttttggaccaagacgatgatgatgaccctgatacagaactgtacctcacgcagccctttgcctgtgggacagcatttgccgtcagtgtcctggactcactcatgagcgcgacgtacttcaatgacaatatcctcaccctgatacggaccctggtgacyggaggagccacgccggagctggaggctctgattgctgaggaaaacgcccttagaggtggctacagcaccccgcagacactggccaatagggaccgctgccgcgtggcccagttagctctgctcgatgggccatttgcggacttaggggatggtggttgttatggtgatctgttctgcaaagctctgaaaacatataatatgctttgttttggaatttaccggctgagagatgctcacctcagcacccccagtcagtgcacaaagaggtatgtcatcaccaacccgccctatgagtttgagctcgtgccgacggacctgatcttctgcttaatgcagtttgaccacaatgccggccagtcccgggccagcctgtcccattcctcccactcgtcgcagtcctccagcaagaagagctcctctgttcactccatcccatccacagcaaaccgacagaaccggcccaagtccagggagtcccgggacaaacagaatgcaacaaggatgaatagaatgggccaagcagaaaagaaatggtttacagatgaaccggataatgcctatcccagaaacattcaaatcaagcccatgagtacccacatggctaaccagatcaaccaatataaatccacaagcagcttgattccaccaatcagagaagttgaagatgaatgttgactcccaggagaccagaactatttttttaaagcctgacaaacttcataaatggtgatgtgacttttcttcttacatgctgaatcactggtggaaacgttaggataagcaagaattgccagaaaataaagtagacagatctttctctttgtctgccttgaatattgcttccatgtattttggaaaagaaaatgatttcatttataaatgaacatactaaaatagtcatgtatagcctctagcattttaaattatttttatttattagaaagaaaatatattttttcttttcattgtcaaatatcttccctatatctaaacaatgcaaaatctaaatgaataagtggtcagactccttaatgtgtttttctcttctttctctctttttctttgaggagaatgatggtcaccaccacaattaattg

SEQ ID NO: 254 - DNA, 3588 bp, Homo sapiens
tttttcttcttcctgtctaatagcccaatagaatcctgccagaatttctacaaagatttcacattacagatcgacatggctttcaacgtgttcttccttctctacttyggcttgcggtttattgcagccaacgataaattgtggttctggctggaagtgaactctgtagtggatttcttcacggtgccccccgtgtttgtgtctgtgtacttaaacagaagttggcttggtttgagatttttaagagctctgagactgatacagttttcagaaattttgcagtttctgaatattcttaaaacaagtaattccatcaagctggtgaatctgctctccatatttatcagcacgtggctgactgcagccgggttcatccatttggtggagaattcaggggacccatgggaaaatttccaaaacaaccaggctctcacctactgggaatgtgtctatttactcatggtcacaatgtccaccgttggttatggggatgtttatgcaaaaaccacacttgggcgcctcttcatggtcttcttcatcctcgggggactggccatgtttgccagctacgtccctgaaatcatagagttaataggaaaccgcaagaaatacgggggctcctatagtgcggttagtggaagaaagcacattgtggtctgcggacacatcactctggagagtgtttccaacttcctgaaggactttctgcacaaggaccgggatgacgtcaatgtggagatcgtttttcttcacaacatctcccccaacctggagcttgaagctctgttcaaacgacattttactcaggtggaattttatcagggttccgtcctcaatccacatgatcttgcaagagtcaagatagagtcagcagatgcatgcctgatccttgccaacaagtactgcgctgacccggatgcggaggatgcctcgaatatcatgagagtaatctccataaagaactaccatccgaagataagaatcatcactcaaatgctgcagtatcacaacaaggcccatctgctaaacatcccgagctggaattggaaagaaggtgatgacgcaatctgcctcgcagagttgaagttgggcttcatagcccagagckgcctggctcaaggcctctccaccatgcttgccaacctcttctccatgaggtcattcataaagattgaggaagacacatggcagaaatactacttggaaggagtctcaaatgaaatgtacacagaatatctctccagtgccttcgtgggtctgtccttccctactgtttgtgagctgtgttttgtgaagctcaagctcctaatgatagccattgagtacaagtctgccaaccgagagagccgtatattaattaatcctggaaaccatcttaagatccaagaaggtactttaggatttttcatcgcaagtgatgccaaagaagttaaaagggcatttttttactgcaaggcctgtcatgatgacatcacagatcccaaaagaataaaaaaatgtggctgcaaacggcttgaagatgagcagccgtcaacactatcaccaaaaaaaaagcaacggaatggaggcatgcggaactcacccaacacctcgcctaagctgatgaggcatgaccccttgttaattcctggcaatgatcagattgacaacatggactccaatgtgaagaagtacgactctactgggatgtttcactggtgtgcacccaaggagatagagaaagtcatcctgactcgaagtgaagctgccatgaccgtcctgagtggccatgtygtggtctgcatctttggcgacgtcagctcagccctgatcggcctccggaacctggtgatgccgctccgtgccagcaactttcattaccatgagctcaagcacattgtgtttgtgggctctattgagtacctcaagcgggaatgggagacgcttcataacttccccaaagtgtccatattgcctggtacgccattaagtcgggctgatttaagggctgtcaacatcaacctctgtgacatgtgcgttatcctgtcagccaatcagaataatattgatgatacttcgctgcaggacaaggaatgcatcttggcgtcactcaacatcaaatctatgcagtttgatgacagcatcggagtcttgcaggctaattcccaagggttcacacctccaggaatggatagatcctctccagataacagcccagtgcacgggatgttacgtcaaccatccatcacaactggggtcaacatccccatcatcactgaactagctaaaccgggcaagttgcctttggtatcagtcaatcaggaaaaaaacagtgggacgcacattctaatgataactgaactggtgaacgatactaatgttcagtttttggaccaagacgatgatgatgaccctgatacagaactgtacctcacgcagccctttgcctgtgggacagcatttgccgtcagtgtcctggactcactcatgagcgcgacgtacttcaatgacaatatcctcaccctgatacggaccctggtgacyggaggagccacgccggagctggaggctctgattgctgaggaaaacgcccttagaggtggctacagcaccccgcagacactggccaatagggaccgctgccgcgtggcccagttagctctgctcgatgggccatttgcggacttaggggatggtggttgttatggtgatctgttctgcaaagctctgaaaacatataatatgctttgttttggaatttaccggctgagagatgctcacctcagcacccccagtcagtgcacaaagaggtatgtcatcaccaacccgccctatgagtttgagctcgtgccgacggacctgatcttctgcttaatgcagtttgaccacaatgccggccagtcccgggccagcctgtcccattcctcccactcgtcgcagtcctccagcaagaagagctcctctgttcactccatcccatccacagcaaaccgacagaaccggcccaagtccagggagtcccgggacaaacagaaaaaagaaatggtttacagatgaaccggataatgcctatcccagaaacattcaaatcaagcccatgagtacccacatggctaaccagatcaaccaatataaatccacaagcagcttgattccaccaatcagagaagttgaagatgaatgttgactcccaggagaccagaactatttttttaaagcctgacaaacttcataaatggtgatgtgacttttcttcttacatgctgaatcactggtggaaacgttaggataagcaagaattgccagaaaataaagtagacagatctttctctttgtctgccttgaatattgcttccatgtattttggaaaagaaaatgatttcatttataaatgaacatactaaaatagtcatgtatagcctctagcattttaaattatttttatttattagaaagaaaatatattttttcttttcattgtcaaatatcttccctatatctaaacaatgcaaaatctaaatgaataagtggtcagactccttaatgtgtttttctcttctttctctctttttctttgaggagaatgatggtcaccaccacaattaattg

SEQ ID NO: 255 - DNA, 5099 bp, Homo sapiens
ccgggccgctgccgaggggccctgcccacccctgcccagcccggagcccaggcgagccagcgcggcgagcctcctcccctcccgcctgggtcgtcctgagtccgcgcccgctccagttgctgcagctgctgctgctggcggctgcggggagcgcggggcgcgcgccgaagaggcttgggcggcgaggacggggacgaggaggagtcggaggcggcaaggaggaagagcgagcggaggccgaggggctcagcggcgtggcgacaggactagggggtcccgagaacatgggctagcaggcggccacgggccggcggccggacgcggtgaacctgccgcggccgggcgcgcactggcgcggcgagccggagccgagcgcagccgggggaggagggctggcgcaggggcgcccgggcggagggggccgattatccattattaacgagttaccacctaataagcggagagcggctcgttagccgcgcgggaggcgctcggggaagggggtcaccggccgagcgcagcgcacacccgtggcgcacggcgggcggcgcggcgccgaggacacccgggaccgcgcgcggagccggggcgggcccgggggcggcgcagaccccgggcgcgggcggcccgcggcgccccctggctctcggcgctcggggccagcgcagcccggggcgagyggggcgcgggccggggagggggagctgcccgcgcactccatccccctcccccccgggcgggcggcggcggctcgctgtatatatctcggcgcaccccgccaggtcgcgcacagcgccccgagcccaggcgcctccccgcccccctcccgcgctccgcggcggcggcggcggcggcagcagtagcagcaatatggctgttgatgggtgtttggggtggcgctggcggcgggaggagctcccccgagcccctgcgccggctgcccgttgctagctatggcaaatggtggcggcggcggcggcggcagcagcggcggcggcggcggcggcggaggcagcagtcttagaatgagtagcaatatccacgcgaaccatctcagcctagacgcgtcctcctcctcctcctcctcctcttcctcttcttcttcttcctcctcctcttcctcctcgtcctcggtccacgagcccaagatggatgcgctcatcatcccggtgaccatggaggtgccgtgcgacagccggggccaacgcatgtggtgggctttcctggcctcctccatggtgactttcttcgggggcctcttcatcatcttgctctggcggacgctcaagtacctgtggaccgtgtgctgccactgcgggggcaagacgaaggaggcccagaagattaacaatggctcaagccaggcrgatggcactctcaaaccagtggatgaaaaagaggaggcagtggccgccgaggtcggctggatgacctccgtgaaggactgggcgggggtgatgatatccgcccagacactgactggcagagtcctggttgtcttagtctttgctctcagcatcggtgcacttgtaatatacttcatagattcatcaaacccaatagaatcctgccagaatttctacaaagatttcacattacagatcgacatggctttcaacgtgttcttccttctctacttyggcttgcggtttattgcagccaacgataaattgtggttctggctggaagtgaactctgtagtggatttcttcacggtgccccccgtgtttgtgtctgtgtacttaaacagaagttggcttggtttgagatttttaagagctctgagactgatacagttttcagaaattttgcagtttctgaatattcttaaaacaagtaattccatcaagctggtgaatctgctctccatatttatcagcacgtggctgactgcagccgggttcatccatttggtggagaattcaggggacccatgggaaaatttccaaaacaaccaggctctcacctactgggaatgtgtctatttactcatggtcacaatgtccaccgttggttatggggatgtttatgcaaaaaccacacttgggcgcctcttcatggtcttcttcatcctcgggggactggccatgtttgccagctacgtccctgaaatcatagagttaataggaaaccgcaagaaatacgggggctcctatagtgcggttagtggaagaaagcacattgtggtctgcggacacatcactctggagagtgtttccaacttcctgaaggactttctgcacaaggaccgggatgacgtcaatgtggagatcgtttttcttcacaacatctcccccaacctggagcttgaagctctgttcaaacgacattttactcaggtggaattttatcagggttccgtcctcaatccacatgatcttgcaagagtcaagatagagtcagcagatgcatgcctgatccttgccaacaagtactgcgctgacccggatgcggaggatgcctcgaatatcatgagagtaatctccataaagaactaccatccgaagataagaatcatcactcaaatgctgcagtatcacaacaaggcccatctgctaaacatcccgagctggaattggaaagaaggtgatgacgcaatctgcctcgcagagttgaagttgggcttcatagcccagagckgcctggctcaaggcctctccaccatgcttgccaacctcttctccatgaggtcattcataaagattgaggaagacacatggcagaaatactacttggaaggagtctcaaatgaaatgtacacagaatatctctccagtgccttcgtgggtctgtccttccctactgtttgtgagctgtgttttgtgaagctcaagctcctaatgatagccattgagtacaagtctgccaaccgagagagccgtatattaattaatcctggaaaccatcttaagatccaagaaggtactttaggatttttcatcgcaagtgatgccaaagaagttaaaagggcatttttttactgcaaggcctgtcatgatgacatcacagatcccaaaagaataaaaaaatgtggctgcaaacggctcaaggttgcagctagatcacgctattccaaagatccatttgagttcaagaaggagactcccaattctcggcttgtgaccgagccagttgaagatgagcagccgtcaacactatcaccaaaaaaaaagcaacggaatggaggcatgcggaactcacccaacacctcgcctaagctgatgaggcatgaccccttgttaattcctggcaatgatcagattgacaacatggactccaatgtgaagaagtacgactctactgggatgtttcactggtgtgcacccaaggagatagagaaagtcatcctgactcgaagtgaagctgccatgaccgtcctgagtggccatgtygtggtctgcatctttggcgacgtcagctcagccctgatcggcctccggaacctggtgatgccgctccgtgccagcaactttcattaccatgagctcaagcacattgtgtttgtgggctctattgagtacctcaagcgggaatgggagacgcttcataacttccccaaagtgtccatattgcctggtacgccattaagtcgggctgatttaagggctgtcaacatcaacctctgtgacatgtgcgttatcctgtcagccaatcagaataatattgatgatacttcgctgcaggacaaggaatgcatcttggcgtcactcaacatcaaatctatgcagtttgatgacagcatcggagtcttgcaggctaattcccaagggttcacacctccaggaatggatagatcctctccagataacagcccagtgcacgggatgttacgtcaaccatccatcacaactggggtcaacatccccatcatcactgaactagtgaacgatactaatgttcagtttttggaccaagacgatgatgatgaccctgatacagaactgtacctcacgcagccctttgcctgtgggacagcatttgccgtcagtgtcctggactcactcatgagcgcgacgtacttcaatgacaatatcctcaccctgatacggaccctggtgacyggaggagccacgccggagctggaggctctgattgctgaggaaaacgcccttagaggtggctacagcaccccgcagacactggccaatagggaccgctgccgcgtggcccagttagctctgctcgatgggccatttgcggacttaggggatggtggttgttatggtgatctgttctgcaaagctctgaaaacatataatatgctttgttttggaatttaccggctgagagatgctcacctcagcacccccagtcagtgcacaaagaggtatgtcatcaccaacccgccctatgagtttgagctcgtgccgacggacctgatcttctgcttaatgcagtttgaccacaatgccggccagtcccgggccagcctgtcccattcctcccactcgtcgcagtcctccagcaagaagagctcctctgttcactccatcccatccacagcaaaccgacagaaccggcccaagtccagggagtcccgggacaaacagaagtacgtgcaggaagagcggctttgatatgtgtatccaccgccactgtgtgaaactgtatctgccactcatttccccagttggtgtttccaacaaagtaactttccctgttttcccctgtagtccccccctttttttttacacatatttgcatatgtatgatagtgtgcatgtggttgtcatttttatttcaccaccataaaacccttgagcacaacagcaaataagcagacggrccaaaagttatttatgattctgggggaaaaataacccaaaggcatgctccagacataaatagctcactgcaggaacgagttcacagattagaagggagcacttgtgatcaacgtcagttaggcagagcaagtttatttaatgtaaaagaaaagttgattctgatttatcaggattatcagggtgctttgggttttgattttgttgttgttgttgttttcctttctttctttttttatacacacaataagttagcacatgtttatttgaaacaagcaacmaaacagcaatgaaaacatattgattgtttccagt

SEQ ID NO: 256 - DNA, 3681 bp, Homo sapiens
tttttcttcttcctgtctaatagcccaatagaatcctgccagaatttctacaaagatttcacattacagatcgacatggctttcaacgtgttcttccttctctacttyggcttgcggtttattgcagccaacgataaattgtggttctggctggaagtgaactctgtagtggatttcttcacggtgccccccgtgtttgtgtctgtgtacttaaacagaagttggcttggtttgagatttttaagagctctgagactgatacagttttcagaaattttgcagtttctgaatattcttaaaacaagtaattccatcaagctggtgaatctgctctccatatttatcagcacgtggctgactgcagccgggttcatccatttggtggagaattcaggggacccatgggaaaatttccaaaacaaccaggctctcacctactgggaatgtgtctatttactcatggtcacaatgtccaccgttggttatggggatgtttatgcaaaaaccacacttgggcgcctcttcatggtcttcttcatcctcgggggactggccatgtttgccagctacgtccctgaaatcatagagttaataggaaaccgcaagaaatacgggggctcctatagtgcggttagtggaagaaagcacattgtggtctgcggacacatcactctggagagtgtttccaacttcctgaaggactttctgcacaaggaccgggatgacgtcaatgtggagatcgtttttcttcacaacatctcccccaacctggagcttgaagctctgttcaaacgacattttactcaggtggaattttatcagggttccgtcctcaatccacatgatcttgcaagagtcaagatagagtcagcagatgcatgcctgatccttgccaacaagtactgcgctgacccggatgcggaggatgcctcgaatatcatgagagtaatctccataaagaactaccatccgaagataagaatcatcactcaaatgctgcagtatcacaacaaggcccatctgctaaacatcccgagctggaattggaaagaaggtgatgacgcaatctgcctcgcagagttgaagttgggcttcatagcccagagckgcctggctcaaggcctctccaccatgcttgccaacctcttctccatgaggtcattcataaagattgaggaagacacatggcagaaatactacttggaaggagtctcaaatgaaatgtacacagaatatctctccagtgccttcgtgggtctgtccttccctactgtttgtgagctgtgttttgtgaagctcaagctcctaatgatagccattgagtacaagtctgccaaccgagagagccgtatattaattaatcctggaaaccatcttaagatccaagaaggtactttaggatttttcatcgcaagtgatgccaaagaagttaaaagggcatttttttactgcaaggcctgtcatgatgacatcacagatcccaaaagaataaaaaaatgtggctgcaaacggcccaagatgtccatctacaagagaatgagacgggcatgttgttttgattgcggacgttctgagcgtgactgctcatgcatgtcaggccgtgtgcgtggtaacgtggacacccttgagagagccttcccactttcttctgtctctgttaatgattgctccaccagtttccgtgcctttgaagatgagcagccgtcaacactatcaccaaaaaaaaagcaacggaatggaggcatgcggaactcacccaacacctcgcctaagctgatgaggcatgaccccttgttaattcctggcaatgatcagattgacaacatggactccaatgtgaagaagtacgactctactgggatgtttcactggtgtgcacccaaggagatagagaaagtcatcctgactcgaagtgaagctgccatgaccgtcctgagtggccatgtygtggtctgcatctttggcgacgtcagctcagccctgatcggcctccggaacctggtgatgccgctccgtgccagcaactttcattaccatgagctcaagcacattgtgtttgtgggctctattgagtacctcaagcgggaatgggagacgcttcataacttccccaaagtgtccatattgcctggtacgccattaagtcgggctgatttaagggctgtcaacatcaacctctgtgacatgtgcgttatcctgtcagccaatcagaataatattgatgatacttcgctgcaggacaaggaatgcatcttggcgtcactcaacatcaaatctatgcagtttgatgacagcatcggagtcttgcaggctaattcccaagggttcacacctccaggaatggatagatcctctccagataacagcccagtgcacgggatgttacgtcaaccatccatcacaactggggtcaacatccccatcatcactgaactagtgaacgatactaatgttcagtttttggaccaagacgatgatgatgaccctgatacagaactgtacctcacgcagccctttgcctgtgggacagcatttgccgtcagtgtcctggactcactcatgagcgcgacgtacttcaatgacaatatcctcaccctgatacggaccctggtgacyggaggagccacgccggagctggaggctctgattgctgaggaaaacgcccttagaggtggctacagcaccccgcagacactggccaatagggaccgctgccgcgtggcccagttagctctgctcgatgggccatttgcggacttaggggatggtggttgttatggtgatctgttctgcaaagctctgaaaacatataatatgctttgttttggaatttaccggctgagagatgctcacctcagcacccccagtcagtgcacaaagaggtatgtcatcaccaacccgccctatgagtttgagctcgtgccgacggacctgatcttctgcttaatgcagtttgaccacaatgccggccagtcccgggccagcctgtcccattcctcccactcgtcgcagtcctccagcaagaagagctcctctgttcactccatcccatccacagcaaaccgacagaaccggcccaagtccagggagtcccgggacaaacagaaaaaagaaatggtttacagatgaaccggataatgcctatcccagaaacattcaaatcaagcccatgagtacccacatggctaaccagatcaaccaatataaatccacaagcagcttgattccaccaatcagagaagttgaagatgaatgttgactcccaggagaccagaactatttttttaaagcctgacaaacttcataaatggtgatgtgacttttcttcttacatgctgaatcactggtggaaacgttaggataagcaagaattgccagaaaataaagtagacagatctttctctttgtctgccttgaatattgcttccatgtattttggaaaagaaaatgatttcatttataaatgaacatactaaaatagtcatgtatagcctctagcattttaaattatttttatttattagaaagaaaatatattttttcttttcattgtcaaatatcttccctatatctaaacaatgcaaaatctaaatgaataagtggtcagactccttaatgtgtttttctcttctttctctctttttctttgaggagaatgatggtcaccaccacaattaattg

SEQ ID NO: 257 - DNA, 5186 bp, Homo sapiens
ccgggccgctgccgaggggccctgcccacccctgcccagcccggagcccaggcgagccagcgcggcgagcctcctcccctcccgcctgggtcgtcctgagtccgcgcccgctccagttgctgcagctgctgctgctggcggctgcggggagcgcggggcgcgcgccgaagaggcttgggcggcgaggacggggacgaggaggagtcggaggcggcaaggaggaagagcgagcggaggccgaggggctcagcggcgtggcgacaggactagggggtcccgagaacatgggctagcaggcggccacgggccggcggccggacgcggtgaacctgccgcggccgggcgcgcactggcgcggcgagccggagccgagcgcagccgggggaggagggctggcgcaggggcgcccgggcggagggggccgattatccattattaacgagttaccacctaataagcggagagcggctcgttagccgcgcgggaggcgctcggggaagggggtcaccggccgagcgcagcgcacacccgtggcgcacggcgggcggcgcggcgccgaggacacccgggaccgcgcgcggagccggggcgggcccgggggcggcgcagaccccgggcgcgggcggcccgcggcgccccctggctctcggcgctcggggccagcgcagcccggggcgagyggggcgcgggccggggagggggagctgcccgcgcactccatccccctcccccccgggcgggcggcggcggctcgctgtatatatctcggcgcaccccgccaggtcgcgcacagcgccccgagcccaggcgcctccccgcccccctcccgcgctccgcggcggcggcggcggcggcagcagtagcagcaatatggctgttgatgggtgtttggggtggcgctggcggcgggaggagctcccccgagcccctgcgccggctgcccgttgctagctatggcaaatggtggcggcggcggcggcggcagcagcggcggcggcggcggcggcggaggcagcagtcttagaatgagtagcaatatccacgcgaaccatctcagcctagacgcgtcctcctcctcctcctcctcctcttcctcttcttcttcttcctcctcctcttcctcctcgtcctcggtccacgagcccaagatggatgcgctcatcatcccggtgaccatggaggtgccgtgcgacagccggggccaacgcatgtggtgggctttcctggcctcctccatggtgactttcttcgggggcctcttcatcatcttgctctggcggacgctcaagtacctgtggaccgtgtgctgccactgcgggggcaagacgaaggaggcccagaagattaacaatggctcaagccaggcrgatggcactctcaaaccagtggatgaaaaagaggaggcagtggccgccgaggtcggctggatgacctccgtgaaggactgggcgggggtgatgatatccgcccagacactgactggcagagtcctggttgtcttagtctttgctctcagcatcggtgcacttgtaatatacttcatagattcatcaaacccaatagaatcctgccagaatttctacaaagatttcacattacagatcgacatggctttcaacgtgttcttccttctctacttyggcttgcggtttattgcagccaacgataaattgtggttctggctggaagtgaactctgtagtggatttcttcacggtgccccccgtgtttgtgtctgtgtacttaaacagaagttggcttggtttgagatttttaagagctctgagactgatacagttttcagaaattttgcagtttctgaatattcttaaaacaagtaattccatcaagctggtgaatctgctctccatatttatcagcacgtggctgactgcagccgggttcatccatttggtggagaattcaggggacccatgggaaaatttccaaaacaaccaggctctcacctactgggaatgtgtctatttactcatggtcacaatgtccaccgttggttatggggatgtttatgcaaaaaccacacttgggcgcctcttcatggtcttcttcatcctcgggggactggccatgtttgccagctacgtccctgaaatcatagagttaataggaaaccgcaagaaatacgggggctcctatagtgcggttagtggaagaaagcacattgtggtctgcggacacatcactctggagagtgtttccaacttcctgaaggactttctgcacaaggaccgggatgacgtcaatgtggagatcgtttttcttcacaacatctcccccaacctggagcttgaagctctgttcaaacgacattttactcaggtggaattttatcagggttccgtcctcaatccacatgatcttgcaagagtcaagatagagtcagcagatgcatgcctgatccttgccaacaagtactgcgctgacccggatgcggaggatgcctcgaatatcatgagagtaatctccataaagaactaccatccgaagataagaatcatcactcaaatgctgcagtatcacaacaaggcccatctgctaaacatcccgagctggaattggaaagaaggtgatgacgcaatctgcctcgcagagttgaagttgggcttcatagcccagagckgcctggctcaaggcctctccaccatgcttgccaacctcttctccatgaggtcattcataaagattgaggaagacacatggcagaaatactacttggaaggagtctcaaatgaaatgtacacagaatatctctccagtgccttcgtgggtctgtccttccctactgtttgtgagctgtgttttgtgaagctcaagctcctaatgatagccattgagtacaagtctgccaaccgagagagccgtatattaattaatcctggaaaccatcttaagatccaagaaggtactttaggatttttcatcgcaagtgatgccaaagaagttaaaagggcatttttttactgcaaggcctgtcatgatgacatcacagatcccaaaagaataaaaaaatgtggctgcaaacggcccaagatgtccatctacaagagaatgagacgggcatgttgttttgattgcggacgttctgagcgtgactgctcatgcatgtcaggccgtgtgcgtggtaacgtggacacccttgagagagccttcccactttcttctgtctctgttaatgattgctccaccagtttccgtgcctttgaagatgagcagccgtcaacactatcaccaaaaaaaaagcaacggaatggaggcatgcggaactcacccaacacctcgcctaagctgatgaggcatgaccccttgttaattcctggcaatgatcagattgacaacatggactccaatgtgaagaagtacgactctactgggatgtttcactggtgtgcacccaaggagatagagaaagtcatcctgactcgaagtgaagctgccatgaccgtcctgagtggccatgtygtggtctgcatctttggcgacgtcagctcagccctgatcggcctccggaacctggtgatgccgctccgtgccagcaactttcattaccatgagctcaagcacattgtgtttgtgggctctattgagtacctcaagcgggaatgggagacgcttcataacttccccaaagtgtccatattgcctggtacgccattaagtcgggctgatttaagggctgtcaacatcaacctctgtgacatgtgcgttatcctgtcagccaatcagaataatattgatgatacttcgctgcaggacaaggaatgcatcttggcgtcactcaacatcaaatctatgcagtttgatgacagcatcggagtcttgcaggctaattcccaagggttcacacctccaggaatggatagatcctctccagataacagcccagtgcacgggatgttacgtcaaccatccatcacaactggggtcaacatccccatcatcactgaactagtgaacgatactaatgttcagtttttggaccaagacgatgatgatgaccctgatacagaactgtacctcacgcagccctttgcctgtgggacagcatttgccgtcagtgtcctggactcactcatgagcgcgacgtacttcaatgacaatatcctcaccctgatacggaccctggtgacyggaggagccacgccggagctggaggctctgattgctgaggaaaacgcccttagaggtggctacagcaccccgcagacactggccaatagggaccgctgccgcgtggcccagttagctctgctcgatgggccatttgcggacttaggggatggtggttgttatggtgatctgttctgcaaagctctgaaaacatataatatgctttgttttggaatttaccggctgagagatgctcacctcagcacccccagtcagtgcacaaagaggtatgtcatcaccaacccgccctatgagtttgagctcgtgccgacggacctgatcttctgcttaatgcagtttgaccacaatgccggccagtcccgggccagcctgtcccattcctcccactcgtcgcagtcctccagcaagaagagctcctctgttcactccatcccatccacagcaaaccgacagaaccggcccaagtccagggagtcccgggacaaacagaagtacgtgcaggaagagcggctttgatatgtgtatccaccgccactgtgtgaaactgtatctgccactcatttccccagttggtgtttccaacaaagtaactttccctgttttcccctgtagtccccccctttttttttacacatatttgcatatgtatgatagtgtgcatgtggttgtcatttttatttcaccaccataaaacccttgagcacaacagcaaataagcagacggrccaaaagttatttatgattctgggggaaaaataacccaaaggcatgctccagacataaatagctcactgcaggaacgagttcacagattagaagggagcacttgtgatcaacgtcagttaggcagagcaagtttatttaatgtaaaagaaaagttgattctgatttatcaggattatcagggtgctttgggttttgattttgttgttgttgttgttttcctttctttctttttttatacacacaataagttagcacatgtttatttgaaacaagcaacmaaacagcaatgaaaacatattgattgtttccagt

SEQ ID NO: 258 - DNA, 3079 bp, Homo sapiens
tayaggagtattgaatagttgggaattggaacccctccagggggaaccaaacattgtcgttcagaagaagacaaagagagattgaaatgaagctgttgatttcaacacacaaattctggtggtagatgaaagcaaagcaagtaagtttctccgaatccctagtcaactggaggtagagacggactgcgcaggttaactacagctcccagcatgcctgaggggcgggctcagcggctgcgcagactggcgcgcgcggacggtcatgggacttcagcatggcggtgtttgcagatttggacctgcgagcgggttctgacctgaaggctctgcgcggacttgtggagacagccgctcaccttggctattcagttgttgctatcaatcatatcgttgactttaaggaaaagaaacaggaaattgaaaaaccagtagctgtttctgaactcttcacaactttgccaattgtacagggaaaatcaagaccaattaaaattttaactagattaacaattattgtctcggatccatctcactgcaatgttttgagagcaacttcttcaagggcccggctctatgatgttgttgcagtttttccaaagacagaaaagctttttcatattgcttgcacacatttagatgtggatttagtctgcataactgtaacagagaaactaccattttacttcaaaagacctcctattaatgtgrcgattgaccgaggcctggcttttgaacttgtctatagccctgctatcaaagactccacaatgagaaggtatacaatttccagtgccctcaatttgatgcaaatctgcaaaggaaagaatgtaattatatctagtgctgcagaaaggcctttagaaataagagggccatatgacgtggcaaatctaggcttgctgtttgggctctctgaaagtgacgccaaggctgcggtgtccaccaactgccgagcagcgcttctccatggagaaactagaaaaactgcttttggaattatctctacagtgaagaaacctcggccatcagaaggagatgaagattgtcttccagcttccaagaaagccaagtgtgagggctgaaaasaatgccccagtctctgtcagcactcccttcttcccttttatagttcatcagccacaacaaaaataaaacctttgtgtgatttactgttttcatttggagctagaaatcaatagtctataaaaacagttttacttgcaatccattaaaacaacaaacgaaacctagtgaagcatctttttaaaaggctgccagcttaatgaatttagatgtactttaagagagaaagactggttatttctcctttgtgtaagtgataaacaacagcaaatatacttgaataaaatgtttcaggtatttttgtttcattttgtttttgagatagggtctttgttgctcaggctggagtacagtggcataatcacagctcactgcaacctcaatcctgggctcaagtgatcctcccgcttcagcctctcaagcagcgggaactacaggtgtgcactaccacacctggctattttttttttttttttttttttcccttgtagagacatggtctcactatgttgctgaggctggtctcaaactcctaggatcaagccatcctcccgctttggcctcctaaagtgctgggattacatgagccaccacatgcagccagatgtttgaatattttaagagcttctttcgaaagtttcttgttcatactcaaatagtagttattttgaagatattcaaacttatattgaagaagtgactttagttcctcttgttttaagcttctttcatgtattcaaatcagcatttttttctaagaaattgctatagaatttgtggaaggagagaggatacacatgtaaaattacatctggtctcttccttcactgcttcatgcctacgtaaggtctttgaaataggattccttacttttagttagaaacccctaaaacgctaatattgattttcctgatagctgtattaaaaatagcaaagcatcggactgaaccaactttggaaataatttatttttataatgggatcatgttaagtagaagtagctttttatgcaaatacatgcatttatgcaatattaatgtaagggctctaaaacaatggagtagagccagaggtataactgaataagaaatttttttaagcaagagaaagacaactgttctgcgggttggagaaaatacaattttttttttttttttttgagacagtctcgctctgtcccccaggctggagtgcagtggctcgatctctgctcactgcaagctccgcctcctgggttcatgccattctcctgcctcagcctcctgagtagctgggactacaggcgctcgccatgtatttagcagagacggggtttcaccgtgttagccaggatggtctcaatctcctgacctcatattccacccgcctcggcctcccaaagtgctgggattacaggcgttagccactgcgcccggcccgagaaaatacagttttaaaaagagaaagctttataacctcaccaatgaatacaaatgtttaaataaaatattgattaaaaaaacattaaaagtgcatcatgaccaggtgaaatttattctttttttcttcttctttttgagacagggtctcactctgtcacccaggctggagtgcagtggcacaatctcggctcactgcaacctttgcctcttgggctcaagccatcctcccacctcagcctccmaagtaagtgggaccagaagcatgcaccaccacatcccagctaatttttgtatttttttgtagagatggggttttgccatgtccaggctagtctcaaactcctggcagattcaagcagtctgtccgcctcagcatcccaaagtgctgggattacaggcacaggcatgagccaccatacccggccttccagttctttttaatgcagtatcctttatcatattcataggtcaaaagagaaaaatcagaatatttttaatagatgccagaaagacatttaataaagttaaatccactcctgatttttaaaatgacaacaataaaaacccatggcaaa

SEQ ID NO: 259 - DNA, 774 bp, Homo sapiens
caacatttccatcgtgaggccattttcaatagaagcgaaggattccacgggtatcctggcagccgtcagaacaaaaccagctcatggctgtgtaactgcagtctcaggcaaggcctgccttctagccctccagacgccctccaggacaaggcaatgacagaaggtgacatgggagtcaccctagaggcttccacagaagctgatctaaaagttggaaactcctgtctagagcctgtgcccagcagaagaagcaagctgagaaagcccaagyctgtccctctgaggaagaaagcaattgaaggagagttctcagatgccggcactgctgtggaaggcacacctctccccaaggcatcctaccacttcagtcctgaagagstggatgagaacacaagtccttctttgttaggaagtgccgggttccagaagtctcctcctgaycttaaagaaactcccagcactacgaaagcccttccaaggaaacttggcaagaaaccgggtagcaaactgactcacaagatacaaaaagatggtatcagtagatgtatggatgaaggggcagtgatctaccagatttcagacatttctaatagggatgtccacgctaccaatgaggagaaactgacatccaygtcatgtggtcagaaatcaggtgcgggcraggggctgctggagtcctctgcagagaaggcccctgtgttggtgtcctgtggaggtgagagcccccggatgggatctgcctcagcgactcagataagacaaccatgctcacat

SEQ ID NO: 260 - DNA, 2961 bp, Homo sapiens
cgcagcttctgagggcctggggttgcagagcagttagtgagcagcttctggggtggaggctctgcagctggcgccggggcgctgggccgattcctcagcctctgaggcctcacctttggcgtggggaaataaacgcgtgcgctctgcaggagtattgtgagggtggtcatgtactcgggacagtgcccagcatgcagtgttagctggaagagtgttagctgttgcgattattatagtcctttctccactcttataattcccaggagtctctttctctctgggaatgtaagttctaggaggatgaggaccgctagtcgttccagtgagccccctgcatgtcccaggcactggccatgccctccagggcttccgtttggccagggagcagtggcccgagccgccccatgcccagcatattcacacagtgctgtggggaggccaccgctacccaggaagaggggtgcagtcagctcagggagactccacagaagaggcaccggtgcaatgtggtgggaaggatgaggaccttgccaggcctaattcgtccttgtctggagaactgggcgcctcctcactgttccctgggctccctggacagaacctgtcggagctggacaccaagatccaggagaaagccatgaaggtggatatggacatctgccgccgcatcgacatcaccgccaagctctgcgatgtggctcagcagcgcaactgcgaggacatgatccagatgttccagaagaagctggttagtttgatctcacgcaagcttattaatgtcccagtcccagtttctaagctgcctaggcctcctggccctcagtttgggcccgctgggctcttgagcacggatttttttctgccctttcccttttccttgctcttccccctttttctctctatctcttgttctcttgactgcatttctttctctcccttctcccccggctttccagatctggatgtgattcaggttctcttttgtacacattgcacactcatcctccttgcgtcctaaagcttttttttttttagttgagtcatttaatcaaaaagactttttttagaaaaaaatttcctcttgagccatcatgcacatctgactgcagccccagcgagcccttccttccttgtctgactgctcttcttctcgatttcttcttgttctgccttctcggtttgcagccctgacccccgctgtgtgtctggcccttggtgactgtccgtgtttctgttcctgtcattgtaactgtgacttttctctctgtctgcccccccttcctactggttcatgcttctcccccattcccaccctctctgcccggcctcccgctcccgccctttctcctcatgcacccggcctcgtctctgtagtctctgcacttgtctcccattaaggtcccatccatgggggggcggaagcgggagcgcaaggctgccgtcgaggaggacacctccctgtcggagagtgaggggccccgccagcccgatggggatgaggaggagagcacagccctcagcatcaacgaggagatgcagcgcatgctcaaccagctgagggagtatgattttgaggacgactgtgacagcctgacttgggaggagactgaggagaccctgctgctttgggaggatttctcaggctatgccatggcagctgcagaggcccagggagagcaggaagatagcctggagaaggtgattaaagatacggagtccctgttcaaaacccgggagaaggagtatcaggagaccattgaccagatagagctggagttggccacggccaagaacgacatgaaccggcacctgcacgagtacatggagatgtgcagcatgaagcgcggcctggacgtgcagatggagacctgccgccggctcatcacccagtctggagaccgaaagtctcctgctttcactgcggtcccgcttagcgacccgccgccgccgccaagcgaggctgaggactccgatcgcgatgtctcatctgacagctccatgagatagagacctgcctcccccttgcacccgaggccctcgcagcagggagctcagcgaggcagagggtggggctgcacagaggggaacatcagctgcagctctgcaccaggccggyccctggggactggggcgctcctccctcaggctttctccctcagtcttggcttctccagggctctggggtgtctggagctaggcttggccctaccattctggggccatttccaccacagttggggctctcctgccttcacgcgtgggtgtctgctacttccccatctttaaaatgctgccagagcgattgcggcccctcaccttgtccacgtatcaggaatgtgaatgtgggacctttcctccatccctgttgtccggagccagctcactgtcttccacactggtgctaactggcccaggcactggagtggaatagaatgcagctggaggctacgcatggcctctgcagcacacgcagctggagagggcttctgtccctgtcagcggcagagggcgttggggctggccggggcaccttgtccctgctatggtccacrtgctmacgctgtccacctgccaggtggagtgtatgtggctgtggccctccctcgtggaggtgccgtgctttaaagaggccttagtgcccgggatgggcacagtgttttgaagggaggtgggagctcttgctctcctggtcactgcagaatgacagagaaggtgaagctccatgcatgtgtgcgcgggtgtatgtgcgctcagggtctctgtttaagtatcagctaaagatgtgcttcctccgtgtctgtcatacactgagaccaacaggctacagtgtccctgattcttggaaaagcctggagaagctggggagatgcggttcmcaatgcctcggtataggaggctgtgttgagctgacattcaaatggattctttaataataatgaaactggcgagtatttattgtgc

SEQ ID NO: 261 - DNA, 2226 bp, Homo sapiens
ctgctcctgcaccggtctgcatctcccagcagaaggcgcagccatgaatccgttattcggccccaacctcttcctcctgcagcaggagcagcagggcctggccgggccactgggggactcactgggaggcgaccacttcgccgggggaggagacttgcccccggcgcctctctcgccggccggccctgctgcctactcgccgcccgggccgggcccggccccgcctgccgccatggccctccgcaatgacctgggctccaacatcaacgtgctcaagaccctgaacctccggttccgctgcttcctggccaaggtgcatgagctggagcgccggaaccggctgttggagaagcaactgcagcaagcgctggaggagggtaagcagggccggcggggcctgggtcgtcgcgaccaggcagtgcagaccggcttcgtcagccccatccggcccctggggctgcagctgggcgcccggccggccgctgtctgcagcccttcggcgcgcgtgctgggctcgcccgcgcgctccccggccgcccccccttcctactggttcatgcttctcccccattcccaccctctctgcccggcctcccgctcccgccctttctcctcatgcacccggcctcgtctctgtagtctctgcacttgtctcccattaaggtcccatccatgggggggcggaagcgggagcgcaaggctgccgtcgaggaggacacctccctgtcggagagtgaggggccccgccagcccgatggggatgaggaggagagcacagccctcagcatcaacgaggagatgcagcgcatgctcaaccagctgagggagtatgattttgaggacgactgtgacagcctgacttgggaggagactgaggagaccctgctgctttgggaggatttctcaggctatgccatggcagctgcagaggcccagggagagcaggaagatagcctggagaaggtgattaaagatacggagtccctgttcaaaacccgggagaaggagtatcaggagaccattgaccagatagagctggagttggccacggccaagaacgacatgaaccggcacctgcacgagtacatggagatgtgcagcatgaagcgcggcctggacgtgcagatggagacctgccgccggctcatcacccagtctggagaccgaaagtctcctgctttcactgcggtcccgcttagcgacccgccgccgccgccaagcgaggctgaggactccgatcgcgatgtctcatctgacagctccatgagatagagacctgcctcccccttgcacccgaggccctcgcagcagggagctcagcgaggcagagggtggggctgcacagaggggaacatcagctgcagctctgcaccaggccggyccctggggactggggcgctcctccctcaggctttctccctcagtcttggcttctccagggctctggggtgtctggagctaggcttggccctaccattctggggccatttccaccacagttggggctctcctgccttcacgcgtgggtgtctgctacttccccatctttaaaatgctgccagagcgattgcggcccctcaccttgtccacgtatcaggaatgtgaatgtgggacctttcctccatccctgttgtccggagccagctcactgtcttccacactggtgctaactggcccaggcactggagtggaatagaatgcagctggaggctacgcatggcctctgcagcacacgcagctggagagggcttctgtccctgtcagcggcagagggcgttggggctggccggggcaccttgtccctgctatggtccacrtgctmacgctgtccacctgccaggtggagtgtatgtggctgtggccctccctcgtggaggtgccgtgctttaaagaggccttagtgcccgggatgggcacagtgttttgaagggaggtgggagctcttgctctcctggtcactgcagaatgacagagaaggtgaagctccatgcatgtgtgcgcgggtgtatgtgcgctcagggtctctgtttaagtatcagctaaagatgtgcttcctccgtgtctgtcatacactgagaccaacaggctacagtgtccctgattcttggaaaagcctggagaagctggggagatgcggttcmcaatgcctcggtataggaggctgtgttgagctgacattcaaatggattctttaataataatgaaactggcgagtatttattgtgc

SEQ ID NO: 262 - DNA, 2685 bp, Homo sapiens
ttccatccctgctcctgcaccggtctgcatctcccagcagaaggcgcagccatgaatccgttattcggccccaacctcttcctcctgcagcaggagcagcagggcctggccgggccactgggggactcactgggaggcgaccacttcgccgggggaggagacttgcccccggcgcctctctcgccggccggccctgctgcctactcgccgcccgggccgggcccggccccgcctgccgccatggccctccgcaatgacctgggctccaacatcaacgtgctcaagaccctgaacctccggttccgctgcttcctggccaaggtgcatgagctggagcgccggaaccggctgttggagaagcaactgcagcaagcgctggaggagggtaagcagggccggcggggcctgggtcgtcgcgaccaggcagtgcagaccggcttcgtcagccccatccggcccctggggctgcagctgggcgcccggccggccgctgtctgcagcccttcggcgcgcgtgctgggctcgcccgcgcgctccccggccggccccctcgcgccctccgcggccagcctctcgtcgtcctccacctccacctccaccacctattcctcgtcggcccgcttcatgcccggcaccatctggtcgttctcgcacgcccgccggctcgggccgggactggagcccactctggtgcaagggcctggcttgtcgtgggtgcacccggatggggtgggcgtccagatcgacaccatcacgcccgagatccgcgctctctacaacgtgctggccaaagtgaagcgggagcgggacgagtacaagcggaggtgggaagaggagtacacggtgcggatccagctgcaagaccgtgtaaatgagctccaggaggaagcccaggaggctgatgcctgccaggaggagctggcactgaaggtggaacagttgaaggctgagctggtggtcttcaaggggctcatgagtaacaacctgtcggagctggacaccaagatccaggagaaagccatgaaggtggatatggacatctgccgccgcatcgacatcaccgccaagctctgcgatgtggctcagcagcgcaactgcgaggacatgatccagatgttccaggtcccatccatgggggggcggaagcgggagcgcaaggctgccgtcgaggaggacacctccctgtcggagagtgaggggccccgccagcccgatggggatgaggaggagagcacagccctcagcatcaacgaggagatgcagcgcatgctcaaccagctgagggagtatgattttgaggacgactgtgacagcctgacttgggaggagactgaggagaccctgctgctttgggaggatttctcaggctatgccatggcagctgcagaggcccagggagagcaggaagatagcctggagaaggtgattaaagatacggagtccctgttcaaaacccgggagaaggagtatcaggagaccattgaccagatagagctggagttggccacggccaagaacgacatgaaccggcacctgcacgagtacatggagatgtgcagcatgaagcgcggcctggacgtgcagatggagacctgccgccggctcatcacccagtctggagaccgaaagtctcctgctttcactgcggtcccgcttagcgacccgccgccgccgccaagcgaggctgaggactccgatcgcgatgtctcatctgacagctccatgagatagagacctgcctcccccttgcacccgaggccctcgcagcagggagctcagcgaggcagagggtggggctgcacagaggggaacatcagctgcagctctgcaccaggccggyccctggggactggggcgctcctccctcaggctttctccctcagtcttggcttctccagggctctggggtgtctggagctaggcttggccctaccattctggggccatttccaccacagttggggctctcctgccttcacgcgtgggtgtctgctacttccccatctttaaaatgctgccagagcgattgcggcccctcaccttgtccacgtatcaggaatgtgaatgtgggacctttcctccatccctgttgtccggagccagctcactgtcttccacactggtgctaactggcccaggcactggagtggaatagaatgcagctggaggctacgcatggcctctgcagcacacgcagctggagagggcttctgtccctgtcagcggcagagggcgttggggctggccggggcaccttgtccctgctatggtccacrtgctmacgctgtccacctgccaggtggagtgtatgtggctgtggccctccctcgtggaggtgccgtgctttaaagaggccttagtgcccgggatgggcacagtgttttgaagggaggtgggagctcttgctctcctggtcactgcagaatgacagagaaggtgaagctccatgcatgtgtgcgcgggtgtatgtgcgctcagggtctctgtttaagtatcagctaaagatgtgcttcctccgtgtctgtcatacactgagaccaacaggctacagtgtccctgattcttggaaaagcctggagaagctggggagatgcggttcmcaatgcctcggtataggaggctgtgttgagctgacattcaaatggattctttaataataatgaaactggcgagtatttattgtgc

SEQ ID NO: 263 - DNA, 2222 bp, Homo sapiens
aagaagctggttagtttgatctcacgcaagcttattaatgtcccagtcccagtttctaagctgcctaggcctcctggccctcagtttgggcccgctgggctcttgagcacggatttttttctgccctttcccttttccttgctcttccccctttttctctctatctcttgttctcttgactgcatttctttctctcccttctcccccggctttccagatctggatgtgattcaggttctcttttgtacacattgcacactcatcctccttgcgtcctaaagcttttttttttttagttgagtcatttaatcaaaaagactttttttagaaaaaaatttcctcttgagccatcatgcacatctgactgcagccccagcgagcccttccttccttgtctgactgctcttcttctcgatttcttcttgttctgccttctcggtttgcagccctgacccccgctgtgtgtctggcccttggtgactgtccgtgtttctgttcctgtcattgtaactgtgacttttctctctgtctgcccccccttcctactggttcatgcttctcccccattcccaccctctctgcccggcctcccgctcccgccctttctcctcatgcacccggcctcgtctctgtagtctctgcacttgtctcccattaaggtcccatccatgggggggcggaagcgggagcgcaaggctgccgtcgaggaggacacctccctgtcggagagtgaggggccccgccagcccgatggggatgaggaggagagcacagccctcagcatcaacgaggagatgcagcgcatgctcaaccagctgagggagtatgattttgaggacgactgtgacagcctgacttgggaggagactgaggagaccctgctgctttgggaggatttctcaggctatgccatggcagctgcagaggcccagggagagcaggaagatagcctggagaaggtgattaaagatacggagtccctgttcaaaacccgggagaaggagtatcaggagaccattgaccagatagagctggagttggccacggccaagaacgacatgaaccggcacctgcacgagtacatggagatgtgcagcatgaagcgcggcctggacgtgcagatggagacctgccgccggctcatcacccagtctggagaccgaaagtctcctgctttcactgcggtcccgcttagcgacccgccgccgccgccaagcgaggctgaggactccgatcgcgatgtctcatctgacagctccatgagatagagacctgcctcccccttgcacccgaggccctcgcagcagggagctcagcgaggcagagggtggggctgcacagaggggaacatcagctgcagctctgcaccaggccggyccctggggactggggcgctcctccctcaggctttctccctcagtcttggcttctccagggctctggggtgtctggagctaggcttggccctaccattctggggccatttccaccacagttggggctctcctgccttcacgcgtgggtgtctgctacttccccatctttaaaatgctgccagagcgattgcggcccctcaccttgtccacgtatcaggaatgtgaatgtgggacctttcctccatccctgttgtccggagccagctcactgtcttccacactggtgctaactggcccaggcactggagtggaatagaatgcagctggaggctacgcatggcctctgcagcacacgcagctggagagggcttctgtccctgtcagcggcagagggcgttggggctggccggggcaccttgtccctgctatggtccacrtgctmacgctgtccacctgccaggtggagtgtatgtggctgtggccctccctcgtggaggtgccgtgctttaaagaggccttagtgcccgggatgggcacagtgttttgaagggaggtgggagctcttgctctcctggtcactgcagaatgacagagaaggtgaagctccatgcatgtgtgcgcgggtgtatgtgcgctcagggtctctgtttaagtatcagctaaagatgtgcttcctccgtgtctgtcatacactgagaccaacaggctacagtgtccctgattcttggaaaagcctggagaagctggggagatgcggttcmcaatgcctcggtataggaggctgtgttgagctgacattcaaatggattctttaataataatgaaactggcgagtatttattgtgc

SEQ ID NO: 264 - DNA, 2794 bp, Homo sapiens
ttccatccctgctcctgcaccggtctgcatctcccagcagaaggcgcagccatgaatccgttattcggccccaacctcttcctcctgcagcaggagcagcagggcctggccgggccactgggggactcactgggaggcgaccacttcgccgggggaggagacttgcccccggcgcctctctcgccggccggccctgctgcctactcgccgcccgggccgggcccggccccgcctgccgccatggccctccgcaatgacctgggctccaacatcaacgtgctcaagaccctgaacctccggttccgctgcttcctggccaaggtgcatgagctggagcgccggaaccggctgttggagaagcaactgcagcaagcgctggaggagggtaagcagggccggcggggcctgggtcgtcgcgaccaggcagtgcagaccggcttcgtcagccccatccggcccctggggctgcagctgggcgcccggccggccgctgtctgcagcccttcggcgcgcgtgctgggctcgcccgcgcgctccccggccggccccctcgcgccctccgcggccagcctctcgtcgtcctccacctccacctccaccacctattcctcgtcggcccgcttcatgcccggcaccatctggtcgttctcgcacgcccgccggctcgggccgggactggagcccactctggtgcaagggcctggcttgtcgtgggtgcacccggatggggtgggcgtccagatcgacaccatcacgcccgagatccgcgctctctacaacgtgctggccaaagtgaagcgggagcgggacgagtacaagcggagatgcttttacagggttaaatgataccacaagaggcagggcagcgggctcgacgagctctgttctgrtgcgggcaggaggcgggagcccggatctgtgcgactgaaggtgggaagaggagtacacggtgcggatccagctgcaagaccgtgtaaatgagctccaggaggaagcccaggaggctgatgcctgccaggaggagctggcactgaaggtggaacagttgaaggctgagctggtggtcttcaaggggctcatgagtaacaacctgtcggagctggacaccaagatccaggagaaagccatgaaggtggatatggacatctgccgccgcatcgacatcaccgccaagctctgcgatgtggctcagcagcgcaactgcgaggacatgatccagatgttccaggtcccatccatgggggggcggaagcgggagcgcaaggctgccgtcgaggaggacacctccctgtcggagagtgaggggccccgccagcccgatggggatgaggaggagagcacagccctcagcatcaacgaggagatgcagcgcatgctcaaccagctgagggagtatgattttgaggacgactgtgacagcctgacttgggaggagactgaggagaccctgctgctttgggaggatttctcaggctatgccatggcagctgcagaggcccagggagagcagcaggaagatagcctggagaaggtgattaaagatacggagtccctgttcaaaacccgggagaaggagtatcaggagaccattgaccagatagagctggagttggccacggccaagaacgacatgaaccggcacctgcacgagtacatggagatgtgcagcatgaagcgcggcctggacgtgcagatggagacctgccgccggctcatcacccagtctggagaccgaaagtctcctgctttcactgcggtcccgcttagcgacccgccgccgccgccaagcgaggctgaggactccgatcgcgatgtctcatctgacagctccatgagatagagacctgcctcccccttgcacccgaggccctcgcagcagggagctcagcgaggcagagggtggggctgcacagaggggaacatcagctgcagctctgcaccaggccggyccctggggactggggcgctcctccctcaggctttctccctcagtcttggcttctccagggctctggggtgtctggagctaggcttggccctaccattctggggccatttccaccacagttggggctctcctgccttcacgcgtgggtgtctgctacttccccatctttaaaatgctgccagagcgattgcggcccctcaccttgtccacgtatcaggaatgtgaatgtgggacctttcctccatccctgttgtccggagccagctcactgtcttccacactggtgctaactggcccaggcactggagtggaatagaatgcagctggaggctacgcatggcctctgcagcacacgcagctggagagggcttctgtccctgtcagcggcagagggcgttggggctggccggggcaccttgtccctgctatggtccacrtgctmacgctgtccacctgccaggtggagtgtatgtggctgtggccctccctcgtggaggtgccgtgctttaaagaggccttagtgcccgggatgggcacagtgttttgaagggaggtgggagctcttgctctcctggtcactgcagaatgacagagaaggtgaagctccatgcatgtgtgcgcgggtgtatgtgcgctcagggtctctgtttaagtatcagctaaagatgtgcttcctccgtgtctgtcatacactgagaccaacaggctacagtgtccctgattcttggaaaagcctggagaagctggggagatgcggttcmcaatgcctcggtataggaggctgtgttgagctgacattcaaatggattctttaataataatgaaactggcgagtatttattgtgc

SEQ ID NO: 265 - DNA, 2229 bp, Homo sapiens
ctgctcctgcaccggtctgcatctcccagcagaaggcgcagccatgaatccgttattcggccccaacctcttcctcctgcagcaggagcagcagggcctggccgggccactgggggactcactgggaggcgaccacttcgccgggggaggagacttgcccccggcgcctctctcgccggccggccctgctgcctactcgccgcccgggccgggcccggccccgcctgccgccatggccctccgcaatgacctgggctccaacatcaacgtgctcaagaccctgaacctccggttccgctgcttcctggccaaggtgcatgagctggagcgccggaaccggctgttggagaagcaactgcagcaagcgctggaggagggtaagcagggccggcggggcctgggtcgtcgcgaccaggcagtgcagaccggcttcgtcagccccatccggcccctggggctgcagctgggcgcccggccggccgctgtctgcagcccttcggcgcgcgtgctgggctcgcccgcgcgctccccggccgcccccccttcctactggttcatgcttctcccccattcccaccctctctgcccggcctcccgctcccgccctttctcctcatgcacccggcctcgtctctgtagtctctgcacttgtctcccattaaggtcccatccatgggggggcggaagcgggagcgcaaggctgccgtcgaggaggacacctccctgtcggagagtgaggggccccgccagcccgatggggatgaggaggagagcacagccctcagcatcaacgaggagatgcagcgcatgctcaaccagctgagggagtatgattttgaggacgactgtgacagcctgacttgggaggagactgaggagaccctgctgctttgggaggatttctcaggctatgccatggcagctgcagaggcccagggagagcagcaggaagatagcctggagaaggtgattaaagatacggagtccctgttcaaaacccgggagaaggagtatcaggagaccattgaccagatagagctggagttggccacggccaagaacgacatgaaccggcacctgcacgagtacatggagatgtgcagcatgaagcgcggcctggacgtgcagatggagacctgccgccggctcatcacccagtctggagaccgaaagtctcctgctttcactgcggtcccgcttagcgacccgccgccgccgccaagcgaggctgaggactccgatcgcgatgtctcatctgacagctccatgagatagagacctgcctcccccttgcacccgaggccctcgcagcagggagctcagcgaggcagagggtggggctgcacagaggggaacatcagctgcagctctgcaccaggccggyccctggggactggggcgctcctccctcaggctttctccctcagtcttggcttctccagggctctggggtgtctggagctaggcttggccctaccattctggggccatttccaccacagttggggctctcctgccttcacgcgtgggtgtctgctacttccccatctttaaaatgctgccagagcgattgcggcccctcaccttgtccacgtatcaggaatgtgaatgtgggacctttcctccatccctgttgtccggagccagctcactgtcttccacactggtgctaactggcccaggcactggagtggaatagaatgcagctggaggctacgcatggcctctgcagcacacgcagctggagagggcttctgtccctgtcagcggcagagggcgttggggctggccggggcaccttgtccctgctatggtccacrtgctmacgctgtccacctgccaggtggagtgtatgtggctgtggccctccctcgtggaggtgccgtgctttaaagaggccttagtgcccgggatgggcacagtgttttgaagggaggtgggagctcttgctctcctggtcactgcagaatgacagagaaggtgaagctccatgcatgtgtgcgcgggtgtatgtgcgctcagggtctctgtttaagtatcagctaaagatgtgcttcctccgtgtctgtcatacactgagaccaacaggctacagtgtccctgattcttggaaaagcctggagaagctggggagatgcggttcmcaatgcctcggtataggaggctgtgttgagctgacattcaaatggattctttaataataatgaaactggcgagtatttattgtgc

SEQ ID NO: 266 - DNA, 6440 bp, Homo sapiens
ccggtctataggtgcataccaccacaccaggctaatttttttttttttgagacggagtctcactctgtcacccaggctggagtgcaatggygcgatctttgctcactgcaacctctgccacccgggttcaagcaattctcctgcctcagctcctgagtagctgggattacaggcgcccgccaccacgcccggctaatttttgtatttttagtagagacgaggtttcaccatcttggccaggctggtcttgaactcctgaccttgtgatctacctgccagggccttccaaagtgctgggattacggacgtgagccaccacgcctggcccaggctaattttttgaaattttaatagaggcagggtcttgctgtattgcccaggttgctctcacattcctagccttaagccatcctcctatctcggcctcacaaagtgctgggattacaggtgtaagccactgtgcctggttttgggcaagtttcttgtcctgactgtgtcttgggttctcacctgttgattggggatacccttgttgcctacctccaagtaattttatgaggatgaaactcatagcttgtcagtgggaagtgcttaggtaatgagctactagtggtggcagtggctgtgatggtggtattaataccactcctactggatggtctctaatactatctccttccttccctaccagcaacatgtcatggtttagtggcctcctggtccctaaagtggatgaacggaaaacagcctggggtgaacgcaatgggcagaagcgttcgcggcgccgtggcactcgggcmggtggcttctgcacgccccgctatatgagctgcctccgggatgcagagccacccagccccacccctgcgggcccccctcggtgcccctggcaggatgacgccttcatccggaggggcggcccaggcaagggcaaggagctggggctgcgggcagtggccctgggcttcgaggataccgaggtgacaacgacagcgggcgggacggctgaggtggcgcccgacgcggtgcccaggagtgggmgatcctgctggcgccgtctggtgcaggtgttccagtcgaagcagttccgttcggccaagctggagcgcctgtaccagcggtacttcttccagatgaaccagagcagcctgacgctgctgatggcggtgctggtgctgctcacagcggtgctgctggctttccacgccgcacccgcccgccctcagcctgcctatgtggcactgttggcctgtgccgccgccctgttcgtggggctcatggtggtgtgtaaccggcatagcttccgccaggactccatgtgggtggtgagytacgtggtgctgggcatcctggcggcagtgcaggtcgggggcgctctcgcagcagacccgcgcagcccctctgcgggcctctggtgccctgtgttctttgtctacatcgcctacacgctcctccccatccgcatgcgggctgccgtcctcagcggcctgggcctctccaccttgcatttgatcttggcctggcaacttaaccgtggtgatgccttcctctggaagcagctcggtgccaatgtgctgctgttcctctgcaccaacgtcattggcatctgcacacactatccagcagaggtgtctcagcgccaggcctttcaggagacccgcggttacatccaggcccggctccacctgcagcatgagaatcggcagcaggagcggctgctgctgtcggtattgccccagcacgttgccatggagatgaaagaagacatcaacacaaaaaaagaagacatgatgttccacaagatctacatacagaagcatgacaatgtcagcatcctgtttgcagacattgagggcttcaccagcctggcatcccagtgcactgcgcaggagctggtcatgaccctgaatgagctctttgcccggtttgacaagctggctgcggagaatcactgcctgaggatcaagatcttgggggactgttactactgtgtgtcagggctgccggaggcccgggccgaccatgcccactgctgtgtggagatgggggtagacatgattgaggccatctcgctggtacgtgaggtgacaggtgtgaatgtgaayatgcgcgtgggcatccacagcgggcgcgtgcactgcggcgtccttggcttgcggaaatggcagttcgatgtgtggtccaatgatgtgaccctggccaaccacatggaggcaggaggccgggctggccgcatccacatcactcgggcaacactgcagtacctgaacggggactacgaggtggagccaggccgtggtggcgagcgcaacgcgtacctcaaggagcagcacattgagactttcctcatcctgggcgcmagccagaaacggaaagaggagaaggccatgctggccaagctgcagcggactcgggccaactccatggaagggctgatgccgcgctgggttcctgatcgtgccttctcccggaccaaggactccaaggccttccgccagatgggcattgatgattccagcaaagacaarcggggcacccaagatgccctgaaccctgaggatgaggtggatgagttcctgagccgtgccatcgatgcccgcagcattgatcagctgcggaaggaccatgtgcgccggtttctgctcaccttccagagagaggatcttgagaagaagtactcccggaaggtggatccccgcttcggrgcctacgttkcctgtgccmtgttggtcttctgcttcatctgcttcatccagcttctcatcttcccacactccaccctgatgcttgggatctatgccagcatcttcctgctgctgctaatcaccgtgctgatctgtgctgtgtactcctgtggttctctgttccctaaggccctgcaacgtctgtcccgcagcattgtccgctcacgggcacatagcaccgcagttggcatcttttccgtcctgcttgtgtttacttctgccattgccaacatgtacttcatcgggaacatgctgctgagtctcttggccagctctgtcttcctgcacatcagcagcatcgggaagttggccatgatctttgtcttggggctcatctatttggtgctgcttctgctgggtcccccagccaccatctttgacaactatgacctactgcttggcgtccatggcttggcttcttccaatgagacctttgatgggctggactgtccagctgcagggagggtggccctcaaatatatgacccctgtgattctgctggtgtttgcgctggcgctgtatctgcatgctcagcaggtggagtcgactgcccgcctagacttcctctggaaactacaggcaacaggggagaaggaggagatggaggagctacaggcatacaaccggaggctgctgcataacattctgcccaaggacgtggcggcccacttcctggcccgggagcgccgcaatgatgaactctactatcagtcgtgtgagtgtgtggctgttatgtttgcctccattgccaacttctctgagttctatgtggagctggaggcaaacaatgagggtgtcgagtgcctgcggctgctcaacgagatcatcgctgactttgatgagattatcagcgaggagcggttccggcagctggaaaagatcaagacgattggtagcacytacatggctgcctcagggctgaacgccagcacctacgatcaggtgggccgctcccacatcactgccctggctgactacgccatgcggctcatggagcagatgaagcacatcaatgagcactccttcaacaatttccagatgaagattgggctgaacatgggcccagtcgtggcaggtgtcatcggggctcggaagccacagtatgacatctgggggaacacagtgaatgtctctagtcgtatggacagcacgggggtccccgaccgaatccaggtgaccacggacctgtaccaggttctagctgccaagggctaccagctggagtgtcgaggggtggtcaaggtgaagggcaagggggagatgaccacctacttcctcaatgggggccccagcagttaacagggcccagccacaaattcagctgaagggaccaaggtgggcattgagtggactctgtgctcactgggtggrgctgtggcagggggcactgagcctccagaccctgctaaccacaaaaggsaacatcccagcaggctgtgcttggatcatgctcgtctgccctcaagctggaaaacaaggggctacctaccgagaggattatgcaagtgactttctttcttacttggggtagggctgttccctctccaatcttccagcctttgggagcaggggaggggtcagtagcagaagcagagggaggcctcttgcctgagggattaaaatggcagcttgccatgcctacccttccctgtctgtctgggcagcaggttcagggctgagcccttcttttccctcttttttcctgggaatattttgtacaatattttgtacaaagacaggcatgaggagtgcctattccatgcttgcctttgcaatacctgcatccccagcactggtcctgggcacttccccaccccagccaggtgtccctcctatgcacagagcagaggagggagaagctctggggagccagctttggccatatttcaggagaatgtttccatgtgccaaatcttagtcccatgatctgtccccaaaggggaacaaagggacctctgacagcttagatttagccccagttcctgcacgctccagggaacggggtgtctggcctcactggtactgtgaaaaatgctcagagagcaagcctgtgtgtggggatgtcaggtcaggagctggaagttcacctgcaggtgccaaagagcaggccggccagggctggggcagtgccagactctgatctgaggaccccgtcggggtccagatcaggtcactctgccccagtgctctcttgctgtctgctgacaagggggcatggagcatctcttcctcttctgttgccaaatagaaaagggtcagggcatggagaaaggtgaccctgatcccaaacctgccctcccaagtctctggtgttggggagggcccgtgtgtttgtgtaactgtgtgtgcatgttggtctttgtgtgcatatctgttttccaggtctatgtgagtccttgtgctcctgctcctcagctctccaccccaggttgcctctctcctgtgggcctctgtcttctgggaataaagcagggtttcctacttcaggggatgtagagagatgcccaggttgcacaggagtgggatggggtgtggtagcaaaaggagggagaggagtcctttttgtgccaaatccctaagtgccgttcgggggccatgtgtgcagcatgactctccctgtctgtggcagggacccaagcgcttgcttaagccccagtgctccatgccagcacttgaactgtctggggtttgatggacagaggctgaggaatttcctggcttccccagatagtgtcctgggacatggtatgctttggggctggggtagcatggaatccctytgaggacctggatactggtactacggggtggggaagaggaaccttaaacttggctttccccagccttcagcctgagtctagcatgtttctagctccccagtcccttgtgaagccttgagggctggcagaagggttaggaggttgaactctagattcccttcctgtctttgccttccttttacccctttccctgcaacctccttgactctggcctgaatttgttggtgcctcagtttctctgtctgtacctatttaagccaaaggcactagcctgaattttgcttgaagatcactttgtcttggaaatgactagagaggcagaggagaagggtttccagagttgctaggtttgggagtggaaggggcaggcagtgcacttgcccctcctcatgccccttctgacaccagctccctgtggaggcctggtttctgggtaatgcctcccttgggcatcttcatgcatcaaccaaatgggccatcaggtacttcattagtcatggcagaaggaggggaaaagacttgttttccagacagaaaatctactcccctgtccccagccatatccctggataggaagggataggaagagactacttggtgccatggggtaggggtgagggtataagtagatcagagtgggaagacctcagccttgggtggcttgtctctgcttcttgccaggtgggagggcctgtccacaccctggatccccgtaccacagtgccagccatgcccttcccctgggctaccattgtccctttcctcacccagttggtagaggagtcaggaggtgggaggccgtgggctttggttttataatgtaaccactgtgggggtgggggaggatggtgaaccatgtatttcagtgaaatatttaatatatttaaatatcaataaaatcaaactctttgtaaaa

SEQ ID NO: 267 - DNA, 6599 bp, Homo sapiens
ccggtctataggtgcataccaccacaccaggctaatttttttttttttgagacggagtctcactctgtcacccaggctggagtgcaatggygcgatctttgctcactgcaacctctgccacccgggttcaagcaattctcctgcctcagctcctgagtagctgggattacaggcgcccgccaccacgcccggctaatttttgtatttttagtagagacgaggtttcaccatcttggccaggctggtcttgaactcctgaccttgtgatctacctgccagggccttccaaagtgctgggattacggacgtgagccaccacgcctggcccaggctaattttttgaaattttaatagaggcagggtcttgctgtattgcccaggttgctctcacattcctagccttaagccatcctcctatctcggcctcacaaagtgctgggattacaggtgtaagccactgtgcctggttttgggcaagtttcttgtcctgactgtgtcttgggttctcacctgttgattggggatacccttgttgcctacctccaagtaattttatgaggatgaaactcatagcttgtcagtgggaagtgcttaggtaatgagctactagtggtggcagtggctgtgatggtggtattaataccactcctactggatggtctctaatactatctccttccttccctaccagcaacatgtcatggtttagtggcctcctggtccctaaagtggatgaacggaaaacagcctggggtgaacgcaatgggcagaagcgttcgcggcgccgtggcactcgggcmggtggcttctgcacgccccgctatatgagctgcctccgggatgcagagccacccagccccacccctgcgggcccccctcggtgcccctggcaggatgacgccttcatccggaggggcggcccaggcaagggcaaggagctggggctgcgggcagtggccctgggcttcgaggataccgaggtgacaacgacagcgggcgggacggctgaggtggcgcccgacgcggtgcccaggagtgggmgatcctgctggcgccgtctggtgcaggtgttccagtcgaagcagttccgttcggccaagctggagcgcctgtaccagcggtacttcttccagatgaaccagagcagcctgacgctgctgatggcggtgctggtgctgctcacagcggtgctgctggctttccacgccgcacccgcccgccctcagcctgcctatgtggcactgttggcctgtgccgccgccctgttcgtggggctcatggtggtgtgtaaccggcatagcttccgccaggactccatgtgggtggtgagytacgtggtgctgggcatcctggcggcagtgcaggtcgggggcgctctcgcagcagacccgcgcagcccctctgcgggcctctggtgccctgtgttctttgtctacatcgcctacacgctcctccccatccgcatgcgggctgccgtcctcagcggcctgggcctctccaccttgcatttgatcttggcctggcaacttaaccgtggtgatgccttcctctggaagcagctcggtgccaatgtgctgctgttcctctgcaccaacgtcattggcatctgcacacactatccagcagaggtgtctcagcgccaggcctttcaggagacccgcggttacatccaggcccggctccacctgcagcatgagaatcggcagcaggagcggctgctgctgtcggtattgccccagcacgttgccatggagatgaaagaagacatcaacacaaaaaaagaagacatgatgttccacaagatctacatacagaagcatgacaatgtcagcatcctgtttgcagacattgagggcttcaccagcctggcatcccagtgcactgcgcaggagctggtcatgaccctgaatgagctctttgcccggtttgacaagctggctgcggagaatcactgcctgaggatcaagatcttgggggactgttactactgtgtgtcagggctgccggaggcccgggccgaccatgcccactgctgtgtggagatgggggtagacatgattgaggccatctcgctggtacgtgaggtgacaggtgtgaatgtgaayatgcgcgtgggcatccacagcgggcgcgtgcactgcggcgtccttggcttgcggaaatggcagttcgatgtgtggtccaatgatgtgaccctggccaaccacatggaggcaggaggccgggctggccgcatccacatcactcgggcaacactgcagtacctgaacggggactacgaggtggagccaggccgtggtggcgagcgcaacgcgtacctcaaggagcagcacattgagactttcctcatcctgggcgcmagccagaaacggaaagaggagaaggccatgctggccaagctgcagcggactcgggccaactccatggaagggctgatgccgcgctgggttcctgatcgtgccttctcccggaccaaggactccaaggccttccgccagatgggcattgatgattccagcaaagacaarcggggcacccaagatgccctgaaccctgaggatgaggtggatgagttcctgagccgtgccatcgatgcccgcagcattgatcagctgcggaaggaccatgtgcgccggtttctgctcaccttccagagagaggatcttgagaagaagtactcccggaaggtggatccccgcttcggrgcctacgttkcctgtgccmtgttggtcttctgcttcatctgcttcatccagcttctcatcttcccacactccaccctgatgcttgggatctatgccagcatcttcctgctgctgctaatcaccgtgctgatctgtgctgtgtactcctgtggttctctgttccctaaggccctgcaacgtctgtcccgcagcattgtccgctcacgggcacatagcaccgcagttggcatcttttccgtcctgcttgtgtttacttctgccattgccaacatgttcacctgtaaccacacccccatacggagctgtgcagcccggatgctgaatttaacacctgctgacatcactgcctgccacctgcagcagctcaattactctctgggcctggatgctcccctgtgtgagggcaccatgcccacctgcagctttcctgagtacttcatcgggaacatgctgctgagtctcttggccagctctgtcttcctgcacatcagcagcatcgggaagttggccatgatctttgtcttggggctcatctatttggtgctgcttctgctgggtcccccagccaccatctttgacaactatgacctactgcttggcgtccatggcttggcttcttccaatgagacctttgatgggctggactgtccagctgcagggagggtggccctcaaatatatgacccctgtgattctgctggtgtttgcgctggcgctgtatctgcatgctcagcaggtggagtcgactgcccgcctagacttcctctggaaactacaggcaacaggggagaaggaggagatggaggagctacaggcatacaaccggaggctgctgcataacattctgcccaaggacgtggcggcccacttcctggcccgggagcgccgcaatgatgaactctactatcagtcgtgtgagtgtgtggctgttatgtttgcctccattgccaacttctctgagttctatgtggagctggaggcaaacaatgagggtgtcgagtgcctgcggctgctcaacgagatcatcgctgactttgatgagattatcagcgaggagcggttccggcagctggaaaagatcaagacgattggtagcacytacatggctgcctcagggctgaacgccagcacctacgatcaggtgggccgctcccacatcactgccctggctgactacgccatgcggctcatggagcagatgaagcacatcaatgagcactccttcaacaatttccagatgaagattgggctgaacatgggcccagtcgtggcaggtgtcatcggggctcggaagccacagtatgacatctgggggaacacagtgaatgtctctagtcgtatggacagcacgggggtccccgaccgaatccaggtgaccacggacctgtaccaggttctagctgccaagggctaccagctggagtgtcgaggggtggtcaaggtgaagggcaagggggagatgaccacctacttcctcaatgggggccccagcagttaacagggcccagccacaaattcagctgaagggaccaaggtgggcattgagtggactctgtgctcactgggtggrgctgtggcagggggcactgagcctccagaccctgctaaccacaaaaggsaacatcccagcaggctgtgcttggatcatgctcgtctgccctcaagctggaaaacaaggggctacctaccgagaggattatgcaagtgactttctttcttacttggggtagggctgttccctctccaatcttccagcctttgggagcaggggaggggtcagtagcagaagcagagggaggcctcttgcctgagggattaaaatggcagcttgccatgcctacccttccctgtctgtctgggcagcaggttcagggctgagcccttcttttccctcttttttcctgggaatattttgtacaatattttgtacaaagacaggcatgaggagtgcctattccatgcttgcctttgcaatacctgcatccccagcactggtcctgggcacttccccaccccagccaggtgtccctcctatgcacagagcagaggagggagaagctctggggagccagctttggccatatttcaggagaatgtttccatgtgccaaatcttagtcccatgatctgtccccaaaggggaacaaagggacctctgacagcttagatttagccccagttcctgcacgctccagggaacggggtgtctggcctcactggtactgtgaaaaatgctcagagagcaagcctgtgtgtggggatgtcaggtcaggagctggaagttcacctgcaggtgccaaagagcaggccggccagggctggggcagtgccagactctgatctgaggaccccgtcggggtccagatcaggtcactctgccccagtgctctcttgctgtctgctgacaagggggcatggagcatctcttcctcttctgttgccaaatagaaaagggtcagggcatggagaaaggtgaccctgatcccaaacctgccctcccaagtctctggtgttggggagggcccgtgtgtttgtgtaactgtgtgtgcatgttggtctttgtgtgcatatctgttttccaggtctatgtgagtccttgtgctcctgctcctcagctctccaccccaggttgcctctctcctgtgggcctctgtcttctgggaataaagcagggtttcctacttcaggggatgtagagagatgcccaggttgcacaggagtgggatggggtgtggtagcaaaaggagggagaggagtcctttttgtgccaaatccctaagtgccgttcgggggccatgtgtgcagcatgactctccctgtctgtggcagggacccaagcgcttgcttaagccccagtgctccatgccagcacttgaactgtctggggtttgatggacagaggctgaggaatttcctggcttccccagatagtgtcctgggacatggtatgctttggggctggggtagcatggaatccctytgaggacctggatactggtactacggggtggggaagaggaaccttaaacttggctttccccagccttcagcctgagtctagcatgtttctagctccccagtcccttgtgaagccttgagggctggcagaagggttaggaggttgaactctagattcccttcctgtctttgccttccttttacccctttccctgcaacctccttgactctggcctgaatttgttggtgcctcagtttctctgtctgtacctatttaagccaaaggcactagcctgaattttgcttgaagatcactttgtcttggaaatgactagagaggcagaggagaagggtttccagagttgctaggtttgggagtggaaggggcaggcagtgcacttgcccctcctcatgccccttctgacaccagctccctgtggaggcctggtttctgggtaatgcctcccttgggcatcttcatgcatcaaccaaatgggccatcaggtacttcattagtcatggcagaaggaggggaaaagacttgttttccagacagaaaatctactcccctgtccccagccatatccctggataggaagggataggaagagactacttggtgccatggggtaggggtgagggtataagtagatcagagtgggaagacctcagccttgggtggcttgtctctgcttcttgccaggtgggagggcctgtccacaccctggatccccgtaccacagtgccagccatgcccttcccctgggctaccattgtccctttcctcacccagttggtagaggagtcaggaggtgggaggccgtgggctttggttttataatgtaaccactgtgggggtgggggaggatggtgaaccatgtatttcagtgaaatatttaatatatttaaatatcaataaaatcaaactctttgtaaaa

SEQ ID NO: 268 - DNA, 2966 bp, Homo sapiens
gatgctgctggcaaggtgctggaccgctgggccatcatgtctcgagaagaggaaatcatcacccttcagcagtttctgcggtttggagaaaccaaatccattgtggagctgatggcaattcaggagaaagaagggcaggccgtggctgtaccatcttcaaagacagactcagatataaggactttcattgagagcaataatcgcaccaggagtcccagcctccttgctcacttagagaacagcaatccttccagcattcatcacttcgaaaacatcccaaacagccttgcatttctgcttccattccagtacataaaccctgtctcagcaccactgctagggttgcctccaaatgggctactgttagagcaaccagggttgaggctgcgggaacccagcctttcaactcagaatgaatataatgagagcagcgaatccgaagtttctcccacaccttataagaatgatcaaacacccaatagaaatgccctgaccagcattactaatgtggagcccaaaaccgagccagcctgtgtctctcccattcagaattctgccccagtcagtgatctaaccaaaactgaacacccaaaaagctcattccggattcatcggatgagaaggatggggtcagcctctaggaaaggaagagtgttctgtaatgcatgtgggaagacattctatgacaaaggtactctcaaaattcattacaatgctgttcacctgaagatcaaacatcgatgcaccattgaaggttgcaacatggtctttagctccctccgaagtcgtaatcgccacagtgcaaaccccaatcctcgccttcacatgcctatgctaaggaataaccgagataaagatttaattcgggccacctcaggagctgccacccctgtcatagcaagtacaaaatcaaatctggcactcacaagccctggccgacccccaatgggttttaccactccccctctagaccctgtcktgcaaaatcctctccctagccagctagtattttctgggctaaagactgtacaaccagttcctccattttatagaagtttactcactccaggggaaatggtgagtcctccaacctccctcccaaccagtcccatcattccaaccagtggtaccatagagcagcaccccccgccaccctctgagccagtagtgccagcagtgatgatggccacccatgagcccagtgctgacctggcacccaagaaaaagcccaggaagtcaagcatgcctgtgaagattgagaaggaaattattgataccgccgatgagtttgatgatgaagatgatgaccccaatgatggtggagctgtggtcaatgacatgagccatgacaatcattgtcactcccaagaggagatgagcccaggcatgtctgtgaaggacttttctaagcataacaggacccggtgcatttcaaggactgaaataaggagggccgacagcatgacttctgaagaccaagaacctgagcgggactatgagaacgagtctgagtcttcggagcccaaactgggcgaggaatccatggaaggggatgagcacattcacagcgaagtgagtgaaaaagtcctgatgaatagtgagaggcctgatgagaaccacagtgagccctctcaccaggacgtcatcaaggtgaaggaagaatttacagaccccrcttacgacatgttttacatgagccagtatggactgtacaatggtgggggtgccagcatggccgccttgcatgagagctttacatcgtctctgaattatggcagccctcaaaagttctccccagaaggtgacctrtgttctagcccagaccccaaaatctgttatgtgtgcaagaagagtttcaaaagctcctacagtgtgaaacttcactacaggaacgttcacttgaaagagatgcacgtctgcacagtggctggttgcaatgctgcattcccctctcgccgaagccgagacagacacagtgccaacataaacctacatcgtaaactgttgaccaaagaactcgatgacatgggcctggactcgtcgcagccctcccttagcaaggacctccgcgatgaatttttggtgaagatatatgrtgcccagcaccccatggggctcgatgtcagggaagacgcctcctctcccgcagggactgaagactcccacctgaacgggtatgggagaggcatggcagaggactacatggtccttgacttgagcaccacctccagcctccagtccagcagcagtrtccattcctccagagaatccgacgcaggcagcgatgaggggattcttctcgatgacattgacggggcgagtgacagtggggagtcggcacacaaggccgaggcccctgccctccctggcagcctaggggctgaagtttcaggatctcttatgttcagcagcttgtctgggagcaatggtgggatcatgtgcaacatttgccacaaaatgtacagcaacaaggggaccctgagagtgcactacaaaactgtgcatttgagagaaatgcacaagtgcaaagtcccaggttgcaatatgatgttttcctctgtacgaagccgaaatcggcacagtcagaaccctaatctccacaaaaacattcccttcacttcagtagattagtctcagaatggacactacaaatgccagctctcaccagatggcctacgtgtttgaactgccatagtcagtgtgcgcttatgtacttggggtgtgtgtgtgtgtgtgtgtgtgtgtgtgtgtgtgcatttatgtatgctctgtggctacatatacacacacgtatttccttgagataaacaagataaacactaggtgcttttgaatttttttcacttccctttatagttttgggaaaggaacacacacacacagtgtgcaactagccccagttttgacagaataattcttggtcttccccaaagagacaatttgttgtacccatgactgttgcctgc

SEQ ID NO: 269 - DNA, 3049 bp, Homo sapiens
gatgctgctggcaaggtgctggaccgctgggccatcatgtctcgagaagaggaaatcatcacccttcagcagtttctgcggtttggagaaaccaaatccattgtggagctgatggcaattcaggagaaagaagggcaggccgtggctgtaccatcttcaaagacagactcagatataaggactttcattgagagcaataatcgcaccaggagtcccagcctccttgctcacttagagaacagcaatccttccagcattcatcacttcgaaaacatcccaaacagccttgcatttctgcttccattccagtacataaaccctgtctcagcaccactgctagggttgcctccaaatgggctactgttagagcaaccagggttgaggctgcgggaacccagcctttcaactcagaatgaatataatgagagcagcgaatccgaagtttctcccacaccttataagaatgatcaaacacccaatagaaatgccctgaccagcattactaatgtggagcccaaaaccgagccagcctgtgtctctcccattcagaattctgccccagtcagtgatctaaccaaaactgaacacccaaaaagctcattccggattcatcggatgagaaggatggggtcagcctctaggaaaggaagagtgttctgtaatgcatgtgggaagacattctatgacaaaggtactctcaaaattcattacaatgctgttcacctgaagatcaaacatcgatgcaccattgaaggttgcaacatggtctttagctccctccgaagtcgtaatcgccacagtgcaaaccccaatcctcgccttcacatgcctatgctaaggaataaccgagataaagatttaattcgggccacctcaggagctgccacccctgtcatagcaagtacaaaatcaaatctggcactcacaagccctggccgacccccaatgggttttaccactccccctctagaccctgtcktgcaaaatcctctccctagccagctagtattttctgggctaaagactgtacaaccagttcctccattttatagaagtttactcactccaggggaaatggtgagtcctccaacctccctcccaaccagtcccatcattccaaccagtggtaccatagagcagcaccccccgccaccctctgagccagtagtgccagcagtgatgatggccacccatgagcccagtgctgacctggcacccaagaaaaagcccaggaagtcaagcatgcctgtgaagattgagaaggaaattattgataccgccgatgagtttgatgatgaagatgatgaccccaatgatggtggagctgtggtcaatgacatgagccatgacaatcattgtcactcccaagaggagatgagcccaggcatgtctgtgaaggacttttctaagcataacaggacccggtgcatttcaaggactgaaataaggagggccgacagcatgacttctgaagaccaagaacctgagcgggactatgagaacgagtctgagtcttcggagcccaaactgggcgaggaatccatggaaggggatgagcacattcacagcgaagtgagtgaaaaagtcctgatgaatagtgagaggcctgatgagaaccacagtgagccctctcaccaggacgtcatcaaggtgaaggaagaatttacagaccccrcttacgacatgttttacatgagccagtatggactgtacaatggtgggggtgccagcatggccgccttgcatgagagctttacatcgtctctgaattatggcagccctcaaaagttctccccagaaggtgacctrtgttctagcccagaccccaaaatctgttatgtgtgcaagaagagtttcaaaagctcctacagtgtgaaacttcactacaggaacgttcacttgaaagagatgcacgtctgcacagtggctggttgcaatgctgcattcccctctcgccgaagccgagacagacacagtgccaacataaacctacatcgtaaactgttgaccaaagaactcgatgacatgggcctggactcgtcgcagccctcccttagcaaggacctccgcgatgaatttttggtgaagatatatgrtgcccagcaccccatggggctcgatgtcagggaagacgcctcctctcccgcagggactgaagactcccacctgaacgggtatgggagaggcatggcagaggactacatggtccttgacttgagcaccacctccagcctccagtccagcagcagtrtccattcctccagagaatccgacgcaggcagcgatgaggggattcttctcgatgacattgacggggcgagtgacagtggggagtcggcacacaaggccgaggcccctgccctccctggcagcctaggggctgaagtttcaggatctcttatgttcagcagcttgtctgggagcaatggtgggatcatgtgcaacatttgccacaaaatgtacagcaacaaggggaccctgagagtgcactacaaaactgtgcatttgagagaaatgcacaagtgcaaagtcccaggttgcaatatgatgttttcctctgtacgaagccgaaatcggcacagtcagaaccctaatctccacaaaaacattcccttcacttcagtagattagtctcagaatggacactacaaatgccagctctcaccagatggcctacgtgtttgaactgccatagtcagtgtgcgcttatgtacttggggtgtgtgtgtgtgtgtgtgtgtgtgtgtgtgtgtgcatttatgtatgctctgtggctacatatacacacacgtatttccttgagataaacaagataaacactaggtgcttttgaatttttttcacttccctttatagttttgggaaaggagtgggatctttgatttcagggtgaaaacagagtacccctttaaacacacacacacacacatgcacatacacacacacacacacacacacacacacagtgtgcaactagccccagttttgacagaataattcttggtcttccccaaagagacaatttgttgtacccatgactgttgcctgc

SEQ ID NO: 270 - DNA, 1815 bp, Homo sapiens
accctctgagccagtagtgccagcagtgatgatggccacccatgagcccagtgctgacctggcacccaagaaaaagcccaggaagtcaagcatgcctgtgaagattgagaaggaaattattgataccgccgatgagtttgatgatgaagatgatgaccccaatgatggtggagctgtggtcaatgacatgagccatgacaatcattgtcactcccaagaggagatgagcccaggcatgtctgtgaaggacttttctaagcataacaggacccggtgcatttcaaggactgaaataaggagggccgacagcatgacttctgaagaccaagaacctgagcgggactatgagaacgagtctgagtcttcggagcccaaactgggcgaggaatccatggaaggggatgagcacattcacagcgaagtgagtgaaaaagtcctgatgaatagtgagaggcctgatgagaaccacagtgagccctctcaccaggacgtcatcaaggtgaaggaagaatttacagaccccrcttacgacatgttttacatgagccagtatggactgtacaatggtgggggtgccagcatggccgccttgcatgagagctttacatcgtctctgaattatggcagccctcaaaagttctccccagaaggtgacctrtgttctagcccagaccccaaaatctgttatgtgtgcaagaagagtttcaaaagctcctacagtgtgaaacttcactacaggaacgttcacttgaaagagatgcacgtctgcacagtggctggttgcaatgctgcattcccctctcgccgaagccgagacagacacagtgccaacataaacctacatcgtaaactgttgaccaaagaactcgatgacatgggcctggactcgtcgcagccctcccttagcaaggacctccgcgatgaatttttggtgaagatatatgrtgcccagcaccccatggggctcgatgtcagggaagacgcctcctctcccgcagggactgaagactcccacctgaacgggtatgggagaggcatggcagaggactacatggtccttgacttgagcaccacctccagcctccagtccagcagcagtrtccattcctccagagaatccgacgcaggcagcgatgaggggattcttctcgatgacattgacggggcgagtgacagtggggagtcggcacacaaggccgaggcccctgccctccctggcagcctaggggctgaagtttcaggatctcttatgttcagcagcttgtctgggagcaatggtgggatcatgtgcaacatttgccacaaaatgtacagcaacaaggggaccctgagagtgcactacaaaactgtgcatttgagagaaatgcacaagtgcaaagtcccaggttgcaatatgatgttttcctctgtacgaagccgaaatcggcacagtcagaaccctaatctccacaaaaacattcccttcacttcagtagattagtctcagaatggacactacaaatgccagctctcaccagatggcctacgtgtttgaactgccatagtcagtgtgcgcttatgtacttggggtgtgtgtgtgtgtgtgtgtgtgtgtgtgtgtgtgcatttatgtatgctctgtggctacatatacacacacgtatttccttgagataaacaagataaacactaggtgcttttgaatttttttcacttccctttatagttttgggaaaggaacacacacacacagtgtgcaactagccccagttttgacagaataattcttggtcttccccaaagagacaatttgttgtacccatgactgttgcctgc

SEQ ID NO: 271 - DNA, 1505 bp, Homo sapiens
cgtggccctgtggcagccgagccatggtttctaaactgagcyagctgcagacggagcwcctggcggccctgctsgagtcarggctgagcaaagaggcactgmtccaggcactggrtgagccggggccctacctcctggctggagaaggccccctggacaaggrgragtcctgcggcggcggtcgaggggagctggctgagctgcccaatgggctgggggagactcggggctccgaggacgagacggacgacgatggggaagacttcacgccacccatcctcaaagagctggagaacctyagccctgaggaggcggyccaccagaaagccgtggtggagacccttctgcaggaggacccgtggcgtgtggcgaagatggtcaagtcctrcctgcagcagcacaacawcmcacagyrgragrtggtcgataccactggcctcaaccagtycyacctgtcccaacacctcaacaagggcactcccatgaagacgcagaakyrggccrccctgtacacctggtacgtccgcaagcagygagaggtggcgcagcagttcacccatgcagggcagggagggctgattgaagagcccacagrtgatgagctaccaaccaagaaggggbrgaggaacyrtttcmagtggggcccagcatcccagcagatcctgttccaggcctrtgagaggcagaagaaccctagcaaggaggagcgagagacgctagtgkaggagtgcaatagggcggaabgcatccagagaggggtgtccccatcacaggcacaggggmtgggcwccaacctcgwcayggaggtgygtgtctacaactggtttgccaacbrgyrcaaagaagaagccttccggcacaagctggccatggacacgtacagcggscsccccccagggccaggcccgggacctgcgctgcccgctcacagctcccctggcctgcctccacctgccctctcccccagtaaggtccacrgtgtgcgctatggacagcctgcgaccagtgagactgcagaagtaccctcaagcagcggcggtcccttagtgacagtgtctacacccctccaccaagtgtcccccaygggcctggagcccagccacagcctgctgagtacagaagccaagctggtctcagcagctgggggccccctcccccctgtcagcaccctgacagcactgcacagcttggagcagacatccccaggcctcaaccagcagccccagaacctcatcatggcctcacttcctggggtcatgaccatcsggcctggtgagcctgcctccctgggtcctacgttcaccaacacaggtgcctscaycctggtcatcggtaagctggtggggatgggtgggcacctgggtgggaggctcatggggcaaccgcagaatccaggagctggaagagccactgggactcattcattcattcattcattcatacaacatgtatttatccagtgcctactctggaccagtcactgtgctacatcagtgatacctggg

SEQ ID NO: 272 - DNA, 1649 bp, Homo sapiens
  misc_feature (1)...(1649): n = A,T,C or G, or insertion/deletion polymorphism (see Tables 1-2)
cgtggccctgtggcagccgagccatggtttctaaactgagcyagctgcagacggagcwcctggcggccctgctsgagtcarggctgagcaaagaggcactgmtccaggcactggrtgagccggggccctacctcctggctggagaaggccccctggacaaggrgragtcctgcggcggcggtcgaggggagctggctgagctgcccaatgggctgggggagactcggggctccgaggacgagacggacgacgatggggaagacttcacgccacccatcctcaaagagctggagaacctyagccctgaggaggcggyccaccagaaagccgtggtggagacccttctgcaggaggacccgtggcgtgtggcgaagatggtcaagtcctrcctgcagcagcacaacawcmcacagyrgragrtggtcgataccactggcctcaaccagtycyacctgtcccaacacctcaacaagggcactcccatgaagacgcagaakyrggccrccctgtacacctggtacgtccgcaagcagygagaggtggcgcagcagttcacccatgcagggcagggagggctgattgaagagcccacagrtgatgagctaccaaccaagaaggggbrgaggaacyrtttcmagtggggcccagcatcccagcagatcctgttccaggcctrtgagaggcagaagaaccctagcaaggaggagcgagagacgctagtgkaggagtgcaatagggcggaabgcatccagagaggggtgtccccatcacaggcacaggggmtgggcwccaacctcgwcayggaggtgygtgtctacaactggtttgccaacbrgyrcaaagaagaagccttccggcacaagctggccatggacacgtacagcggscsccccccagggccaggcccgggacctgcgctgcccgctcacagctcccctggcctgcctccacctgccctctcccccagtaaggtccacrgtgtgcgctatggacagcctgcgaccagtgagactgcagaagtaccctcaagcagcggcggtcccttagtgacagtgtctacacccctccaccaagtgtcccccaygggcctggagcccagccacagcctgctgagtacagaagccaagctggtctcagcagctgggggccccctcccccctgtcagcaccctgacagcactgcacagcttggagcagacatccccaggcctcaaccagcagccccagaacctcatcatggcctcacttcctggggtcatgaccatcsggcctggtgagcctgcctccctgggtcctacgttcaccaacacaggtgcctscaycctggtcatcggcctggcctccacgcaggcacagagtgtgccggtcatcaacagcatgggcagcagcctgaccaccytgcagcccgtccagttctccyagccgctgcacccctcctaccagcagccgctcatgccacctgtgcagagccatgtgaccyaganccccttcatggccaccatggctcagctgcagagcccccacggtgagcrccctgtgccccacacagcaggagatgatgatagaggttggctgtcaatggatgcaggggaaaggggtgcctggcaggcattgcagtctgcatgtgtctctgggacaagtgtktttccg

SEQ ID NO: 273 - DNA, 3591 bp, Homo sapiens
  misc_feature (1)...(3591): n = A,T,C or G, or insertion/deletion polymorphism (see Tables 1-2)
cgtggccctgtggcagccgagccatggtttctaaactgagcyagctgcagacggagcwcctggcggccctgctsgagtcarggctgagcaaagaggcactgmtccaggcactggrtgagccggggccctacctcctggctggagaaggccccctggacaaggrgragtcctgcggcggcggtcgaggggagctggctgagctgcccaatgggctgggggagactcggggctccgaggacgagacggacgacgatggggaagacttcacgccacccatcctcaaagagctggagaacctyagccctgaggaggcggyccaccagaaagccgtggtggagacccttctgcaggaggacccgtggcgtgtggcgaagatggtcaagtcctrcctgcagcagcacaacawcmcacagyrgragrtggtcgataccactggcctcaaccagtycyacctgtcccaacacctcaacaagggcactcccatgaagacgcagaakyrggccrccctgtacacctggtacgtccgcaagcagygagaggtggcgcagcagttcacccatgcagggcagggagggctgattgaagagcccacagrtgatgagctaccaaccaagaaggggbrgaggaacyrtttcmagtggggcccagcatcccagcagatcctgttccaggcctrtgagaggcagaagaaccctagcaaggaggagcgagagacgctagtgkaggagtgcaatagggcggaabgcatccagagaggggtgtccccatcacaggcacaggggmtgggcwccaacctcgwcayggaggtgygtgtctacaactggtttgccaacbrgyrcaaagaagaagccttccggcacaagctggccatggacacgtacagcggscsccccccagggccaggcccgggacctgcgctgcccgctcacagctcccctggcctgcctccacctgccctctcccccagtaaggtccacrgtgtgcgctatggacagcctgcgaccagtgagactgcagaagtaccctcaagcagcggcggtcccttagtgacagtgtctacacccctccaccaagtgtcccccaygggcctggagcccagccacagcctgctgagtacagaagccaagctggtctcagcagctgggggccccctcccccctgtcagcaccctgacagcactgcacagcttggagcagacatccccaggcctcaaccagcagccccagaacctcatcatggcctcacttcctggggtcatgaccatcsggcctggtgagcctgcctccctgggtcctacgttcaccaacacaggtgcctscaycctggtcatcggcctggcctccacgcaggcacagagtgtgccggtcatcaacagcatgggcagcagcctgaccaccytgcagcccgtccagttctccyagccgctgcacccctcctaccagcagccgctcatgccacctgtgcagagccatgtgaccyaganccccttcatggccaccatggctcagctgcagagcccccacgccctctacagccacaagcccgaggtggcccagtacacccrcacgggcctgctccygcagaytrtgctcatcaccgacaccaccaacctgagcgccctggccagcctcasgcccaccaagcaggtcttcacctcagacactgaggcctccagtgagtccgggcttcacacgccggcatctcaggccaccaccctccacrtccccagccaggaccctgccrgcatccagcacctgcagccggcccacsrgctcagcgccagccccacagtgtcctccagcakcctggtgctgtaccagagctcagactccagcaatggccagagccacctgctgccatccaaccacagcrtcatsragaycttcatctccacccagatggcctcttcctcccagtaaccacggcacctgggccctggggcctgtactgcctgcttggggggtgatgagggcagcagccagccctgcctggaggacctgagcctgccgagcaaccgtggcccttcctggacagctgtgcctcgctccccactctgctctgatgcatcagaaagggagggctctgaggcgccccaacccgtggaggctgctcgggktgcacaggagggggtcgtggagagctaggagcaaagcctgttcatggcagatgtaggagggactgtcgctgcttcgtgggatacagtcttcttacttggaactgaagggggcggcctatgacttgggcacccccagcctgggcctatggagagccctgggaccgctacaccactctggcagccacacttctcaggacacaggcctgtgtagctgtgacctgctgagctctgagaggccctrgatcagcgtggccttgttctgtcaccaatgtacccaccgggccactccttcctgccccaactccttccagctagtgacccacatgccatttgtactgaccccatcacctactcacacaggmatttcctgggtggctactctgtgccagagcctggggctctaacgcctgagcccagggaggccgaagctaacagggaaggcaggcagggctctcctggcttcccatccccagcgattccctctcccaggccccatgacctccagctttcctgtatttgttcccaagagcatcatgcctctgaggccagcctggcctcctgcctctactgggaaggctacttcggggctgggaagtcgtccttactcctgtgggagcctcgcaacccgtgccaagtccaggtcctggtggggcagctcctctgtctcgagcgccctgcagaccctgcccttgtttggggcaggagtagctgagctcacaaggcagcaaggcccgagcagctgagcagggccggggaactggccaagctgaggtgcccaggagaagaaagaggtgaccccagggcacaggagctacctgtgtggacaggactaacactcagaagcctgggggcctggctggctgagggcagttcgcagccaccctgaggagtctgaggtcctgagcactgccaggagggacaaaggagcctgtgaacccaggacaagcatggtcccacatccctgggcctgctgctgagaacctggccttcagtgtaccgcgtctaccctgggattcaggaaaaggcctggggtgacccggcaccccctgcagcttgtagccagccggggcgagtggcacgtttatttaacttttagtaaagtcaaggagaaatgcggtggaaacttcttgcttgtccacaaatcattcagatggggtttgggcaggtagcgggaggctggggcaggccagaggcctgcgaagaggagacaggctccagcacccacgctctcacaccccacatctctgcttttcttgctctgctgagactctaatgacaaagccagatttcatcttaacctcaagcttctactttttaaaaaaattttgttttggagacagggtctcactgtcacccaggctggactgcagtggcattatacagctcactgcagccttgaactcctggactaaagggatcctcccacctcagcctcacaagcagcctcacaggcgctcactaccatgcccaactaa

SEQ ID NO: 274 - DNA, 3191 bp, Homo sapiens
acaatcctttgcggtggttcaagatggcggcgcccagtggcacwgtgagcgattcggaaagtagtaacagcagtagcgatgcggaggagctggagcggtgccgcgaggcggcaatgccggcttggggcttggagcaacgcccgcacgtggcarggaagccaagagccggtgctgcaaatagccagttgtcaacctcccaaccgagcctcaggcataaggtgaatgagcatgaacaagatggcaacgagcttcagaccacccctgaattccgagcccacgtagccaagaagctgggagccctgctggacagcttcattaccatctcagaagcagcaaaggagccagcaaaagctaaggtacagaaagtcgctttggaggatgatggtttccgccttttcttcacatctgtccctggaggccgtgagaaggaagagtctccccaaccccsccgaaagcgacagccctccagctccagtgaggacagtgacgaggagtggcggcggtgccgggaggcagctgtgtcggcgtccgacatcctacaggagtcagccatycacagccctggaacwgtggagaaggaggcaaagaagaaaaggaagttgaaaaagaaagccaagaaggtggccagtgtcgactcggctgtcgctgccaccacccccaccagcatggccacagtccagaagcagaagtcaggtgagctcaayggggaccaggtgtcgcttgggaccaaaaagaagaaaaaggcaaagaaggccagcgagacctctccattcccaccagcaaagagtgctacagctatacctgcaaactgaacccagccatgggcacagggctcagccagctccaaggacaaggtgtcccccccaccctggggacaaggcatttccaagccccmcctccctctccaagttcaaggactgggctggcaaacccagactgcccatgagaccctgatggtgatgaaggcttgctcgagagttgggccaaaaaagcccctctgtgctcccacggagggctggcgggggcgctgtggttccagaacatttcatgacctcaggaaaaaaggaaccttccagttatttgagactagtggccaagtggtgaaacctccatctccctagaactgtctgaggtgggcaggggaagggagaccttccccaccacctccttagcctggtgtgagaaacagtttttagaaaatgagagaagggatccccaagaggccaaggcccagagaaacttttgttcttctctccttagcccacawagacttmacagaatcgtctgagaaaggrgagctttttcacccctggctttctagaattttctttgtctgcatttgtgaatataccacacatgatggtgtctctgagccgaccagattatggaaactcaattgtcagaggacccaaaacaaaacttagagtgatttggatattgcctctctgtcaatgctgaaccttaagacattttaagtaaacatcctcctcctctctacacccccaggatttgtgcgttcaccccacccaagacttcaggaagtgtcatagcactcgtggactaggtttcatgggacaaaggcattctgcaagaagtagaagcttgtggccgggtgcagtggctcatgcctgtaatccaagcattttgagaggccaaggaggtggatcaattgaggccaggagtttgagaccagcctggccaacatggcgagaccccatctctactaaaaatacaaaaattagctgagcatgttgacacacgcccgtaatcccagctactcaggaggctgaggtgggagaatcgcttgaacccaggaggtgcaggttgcagtgagccgagattgcgccactgcactctagcctaagcaatggagcaagaccctatctcaaaaaaaaaaaaaaaaaagaaaaagaaaagaagtagaagctcatggccagggatggtggctcacacctgtaatcccagcactttgggaggccgaggcaggtggatcacttgagccragttccagaccagcctaggcaacatggtgaaacctcgtctctataaaaaaaagaatacaaaaattagttgggcatggtagtgagcgcctgtgaggctgcttgtgaggctgaggtgggaggatccctttagtccaggagttcaaggctgcagtgagctgtataatgccactgcagtccagcctgggtgacagtgagaccctgtctccaaaacaaaatttttttaaaaagtagaagcttgaggttaagatgaaatctggctttgtcattagagtctcagcagagcaagaaaagcagagatgtggggtgtgagagcgtgggtgctggagcctgtctcctcttcgcaggcctctggcctgccccagcctcccgctacctgcccaaaccccatctgaatgatttgtggacaagcaagaagtttccaccgcatttctccttgactttactaaaagttaaataaacgtgccactcgccccggctggctacaagctgcagggggtgccgggtcaccccaggccttttcctgaatcccagggtagacgcggtacactgaaggccaggttctcagcagcaggcccagggatgtgggaccatgcttgtcctgggttcacaggctcctttgtccctcctggcagtgctcaggacctcagactcctcagggtggctgcgaactgccctcagccagccaggcccccaggcttctgagtgttagtcctgtccacacaggtagctcctgtgccctggggtcacctctttcttctcctgggcacctcagcttggccagttccccggccctgctcagctgctcgggccttgctgccttgtgagctcagctactcctgccccaaacaagggcagggtctgcagggcgctcgagacagaggagctgccccaccaggacctggacttggcacgggttgcgaggctcccacaggagtaaggacgacttcccagccccgaagtagccttcccagtagaggcaggaggccaggctggcctcagaggcatgatgctcttgggaacaaatacaggaaagctggaggtcatggggcctgggagagggaatcgctggggatgggaagccaggagagccctgcctgccttccctgttagcttcggcctccctgggctcaggcgttagagccccaggctctggcacagagtagccacccaggaaatkcctgtgtgagt

SEQ ID NO: 275 - DNA, 5350 bp, Homo sapiens
tctgccattgcacagtggccctagtgtcctcgagaccccgggactagaaatttcaatggattggaagacactacttcactctgagccaggcaggggctgggcgctgagatgtgcagatgtcagatgtgatcttgcccggctcaatctgggaacacagagagatgtggggagtcccagtctcctccgctaggcaggggcagcgctgcttctttagagcttcctacagaggtgtgggagcagaggggggcattatcccaaccaggggtgccgggagcctgtgtggtgaggtgcgctttaaagacatgggggcctgggcattgttgggtcttgtgtgctctgtctctcatgggcagcacaagctgtccctcaggactccactcccttgcccattctcatcccccatcgcctcagcttccacacgtccgcgatgggccccccagcttctcttcaccacagctgccccaacacctgccccatcttctcctcctgtcccagttccatcacagaaattcaggagacacagacaagttcttccacgatgtcgtacagacgagaactagagaaataccgtgacctggatgaagatgaaatccttggagccctaacagaggaagagctgaggaccctggaaaatgagctggatgagctggaccctgataatgcactgctgcctgcaggcctgaggcagaaggatcagaccaccaaggcgcccacgggcccctttaaaagagaggagctcttggatcacttggaaaagcaagcaaaggagtttaaggaccgagaagatctggtcccctacacaggggaaaaacgaggaaaggtctgggttcctaagcagaagccactggatcctgtgctggaaagtgtgacgctggaaccggagctggaggaagccttggcaaatgcttcagatgcagaactctgtgacattgcagcgatcctgggcatgcacacgctcatgagtaaccagcagtactaccaggccctgagcagcagctccatcatgaacaaggaggggctcaacagcgtgattaaacccacacaatacaagcctgtgcccgacgaagaaccaaattcaacagacgtagaggaaacgctggaacggataaagaacaacgacccaaaacttgaagaagttaacctcaataatatccggaatatccccatccccaccctcaaggcatatgcagaagccctgaaagaaaactcatatgtgaagaagttcagcatcgtggggacacggagtaatgaccccgtggcgtatgcccttgctgagatgctcaaggagaacaaggtgttgaagacactgaatgtggaatccaacttcatttctggagctgggattctgcgcctggtagaagccctcccatacaacacttctctggtggaaatgaaaattgacaaccagagccagcccctgggcaacaaagtggaaatggagattgtgagcatgttggaaaaaaacgcaacacttctcaaattyggctaccactttacccagcaaggaccccggcttcgggcatccaacgcaatgatgaacaacaatgaccttgtgaggaagaggaggcttgcggacctgactgggcccatcattcccaagtgccggagtggtgtctagtgtgtggcggtggagtccatgcctttgaactggatgtgttctattgatgacctgtgctctgcaggggaaaccagaaggcaaaatgctggcagcatgaaacccttttgtggttcagttctttatgcactaaggttttaggttgactagtggttgtagttgaaaattttataaaataccgttaatgtgaagtttttctttagtcacagaagttgaatctggttattatttaaaaactagaagcccccaaaccagcagatcttactgaagatgatgttccagcagcagcgacttagccccaggagcccagtttcaatggccttgctgtgtggtgtttcaagtgcatttaaaatgtgtgacacagaaacggcacactcttccacatgcttttgaagtattataaaamactttattacaaatttgtcttagctattagcaaataaaactgattatcattctttattaaccctccttggaattttgaaaacctcgattaaagttgccaaattgattactggatccagaacacaattttcccctcagaacagatagacagactgaagccactgaactctgccaggagtcaacatgagattccttttgctggatatgcagaaatgayaggaaaaaaaccaatggtgaaatttcaagtttcaaaaaccaacctttcattaccaatcccaggcaacaaacatgtccctgagtgttctttaagaacatttgggatttatgtacaatttaatactggagttagaactttttccttattgaatgccaaccttatgatggatgtgaaaatctacggccaaatacttttgaaaacacctttctatattgcacagtgggcaaatggcttatgtgaggtaagacactagagggataaatttccagatcaacatggctatggtatttagtaatggcccagcttagagacttcagctactgatctcatcacttattagacaaattgctgctgaccttacgcctgtatattaagcctccgcaggatgccggacaatggtgaagaaactccagatatcaaggaattgggaaatcctggccaaaccaccccaagatgattacactgaaatgtagtattagtactgctgccagatctctttttaacatcatgtgcgtctcttgggatccagcaaaagtgttaagccacaatgcccttgtgccttttaatataccacagtgccagttaaactaatatttttgtttgttgcttttgggagttattttcattagtgatttcagcaaatctcatgataaaggacaaggtcaagaactccagagcactgagcagagaggctggtgatgaaaaggtgaaggcctgcgcactgaactgtaaggcagtgggcagtacagggtaactggaggcggggccagggcctcagcgctatggaagagtgtccactgaggctgcacatggcccaggagtggcaccatgttgcagggacaaccatccccatttggcttctccttaaaacacaattgcagctgcattctgcatcgctgaaaactgcaatataatattaaatctgttggtctatgcatggctgcgtatgtgtttcttggaacctgtgtgacagggayatgtgcctggcacactggccagaagactgggcagccaccatggcagtgctggatgacctcagtaagaatgtgtcatgtattccaggtgctgatctaaaaactgtggctcaaatgtcaccgagcttatatgaagctcccagagagaacatttaaaagctcagagagtaagtgctggggaaagcagagctatcagaggaaatctctcatagaaacgaaaccaaaccaacagaaaatgaagaaggccacatctttaaggccacctctgcctctatcagatgagctgctggtctagatcaggggctggcaaacttttctgtaaaaggccagacagtaaaaatttccgattttgcaggccacatagtgtctgttgcaactattcaactctgccatagatcatgtgtaaaggaatgggtgtggctgttcaataaactatacagttgacccttgaacaatatgggtttgaactgcatggctgcacttatatatggatttttttcaaccatacaggttgaaaatacagtattggcagggggcgaaacctgcgtacatggagggctgatttatcacatacgtgggttctgtagggcccactgtgggacttgagtatgcattgggtttttgtatactcaggcgttctggaactatcctccatgtataccaaaggatggttatttctacaaaagcaggaggtaagcccaatgcacagcttgcagattcccctcaggcgagagacagaggttaagggtagatggcagatgacctaagtggcttgttttaggaggccactcccagggccacasctttcatgtgtttgccaccagggtagaaggtctgctgacaagggcaatgactactaacagccccagctgcatggmacagaaagggcatatgctgtggccaccaggctcaggctctatccctcagcagctttgggatcccatgcagctcacctattttctgtgctctagcatcatccaaatcagaatgtctcaggtaagtggtagacaacgtgactcctcccctcccgctgtgaagtgtagacggctgccacggtggcagcggccagaactgaagttcccgatttctctgtttctgcagtcttgccatgctttctctgtatagtcaccccaaacctacttttaccgagggcctgggaaaatgccaaaggtgctgctcacataagcactggcccatcctcatcagcatcaggccctggctctgggctcacaggctgtcgcacatgctgcaagagttccctaggtatgcgtggccgtcgggctgtgcactcgcattcctctttaaagctgtcttgcatagggcctgaaactttcctgctccccttgtcttgacatgtgacacaacaggctgtgaatccttgtccttgacaggcagggcaggtcaaaacgagctggcggcactggggagtagagcagagtttatactggtcccagcgggctccacagtatgaacactctggggaggaaggaaaagccatcattataaacacatrcattcacacacacgtggacaggcattgctccctttgctgactagaatctcgtagatcctgtggaacccggggaaggtttccaaatagtaagtcttctgtcttctagcaacaacaactaaccaccacccccaccacccagcttatttttttgtgggggtgacttctggtaactgtctgcttccagtatttactgactttttttttctttttcccatctagagaacaggtggtaactagatggtaatgaaagtttctctctctcaccagctattccaaagctggccaactacctcccaacccccttgttaagtggtcttttcctctttgattgttcccttttccagkggggacaacacacctaaatacaggcgataacccacctacagkgaacatgcgcagtccacacccctctccccgaggcctgtgtctctcctgctgttgctagggcacttgaccatctgattcctaaaactcacaccatcttcttcacctgtttttccctgatgacctcctgttactattgataacatcattcttcctcacttttccttaccttgcttatctaagctacctctgagccttccctctctccttcatactcacacgcaggtacccatcgagtccag

SEQ ID NO: 276 - DNA, 5031 bp, Homo sapiens
gcccacagctcccgcccgcccgcggccgcccgggagctcgtccagccccgcgctgcgctcgcccgcccgctgcccgccggagcaccgcggcctccgcccgcgtccatctgcccgccgcccgcgcctgttccgcagcccgcgtccgcgccggccccacagctctgcgtccgggtattactmagcacagaaattcaggagacacagacaagttcttccacgatgtcgtacagacgagaactagagaaataccgtgacctggatgaagatgaaatccttggagccctaacagaggaagagctgaggaccctggaaaatgagctggatgagctggaccctgataatgcactgctgcctgcaggcctgaggcagaaggatcagaccaccaaggcgcccacgggcccctttaaaagagaggagctcttggatcacttggaaaagcaagcaaaggagtttaaggaccgagaagatctggtcccctacacaggggaaaaacgaggaaaggtctgggttcctaagcagaagccactggatcctgtgctggaaagtgtgacgctggaaccggagctggaggaagccttggcaaatgcttcagatgcagaactctgtgacattgcagcgatcctgggcatgcacacgctcatgagtaaccagcagtactaccaggccctgagcagcagctccatcatgaacaaggaggggctcaacagcgtgattaaacccacacaatacaagcctgtgcccgacgaagaaccaaattcaacagacgtagaggaaacgctggaacggataaagaacaacgacccaaaacttgaagaagttaacctcaataatatccggaatatccccatccccaccctcaaggcatatgcagaagccctgaaagaaaactcatatgtgaagaagttcagcatcgtggggacacggagtaatgaccccgtggcgtatgcccttgctgagatgctcaaggagaacaaggtgttgaagacactgaatgtggaatccaacttcatttctggagctgggattctgcgcctggtagaagccctcccatacaacacttctctggtggaaatgaaaattgacaaccagagccagcccctgggcaacaaagtggaaatggagattgtgagcatgttggaaaaaaacgcaacacttctcaaattyggctaccactttacccagcaaggaccccggcttcgggcatccaacgcaatgatgaacaacaatgaccttgtgaggaagaggaggcttgcggacctgactgggcccatcattcccaagtgccggagtggtgtctagtgtgtggcggtggagtccatgcctttgaactggatgtgttctattgatgacctgtgctctgcaggggaaaccagaaggcaaaatgctggcagcatgaaacccttttgtggttcagttctttatgcactaaggttttaggttgactagtggttgtagttgaaaattttataaaataccgttaatgtgaagtttttctttagtcacagaagttgaatctggttattatttaaaaactagaagcccccaaaccagcagatcttactgaagatgatgttccagcagcagcgacttagccccaggagcccagtttcaatggccttgctgtgtggtgtttcaagtgcatttaaaatgtgtgacacagaaacggcacactcttccacatgcttttgaagtattataaaamactttattacaaatttgtcttagctattagcaaataaaactgattatcattctttattaaccctccttggaattttgaaaacctcgattaaagttgccaaattgattactggatccagaacacaattttcccctcagaacagatagacagactgaagccactgaactctgccaggagtcaacatgagattccttttgctggatatgcagaaatgayaggaaaaaaaccaatggtgaaatttcaagtttcaaaaaccaacctttcattaccaatcccaggcaacaaacatgtccctgagtgttctttaagaacatttgggatttatgtacaatttaatactggagttagaactttttccttattgaatgccaaccttatgatggatgtgaaaatctacggccaaatacttttgaaaacacctttctatattgcacagtgggcaaatggcttatgtgaggtaagacactagagggataaatttccagatcaacatggctatggtatttagtaatggcccagcttagagacttcagctactgatctcatcacttattagacaaattgctgctgaccttacgcctgtatattaagcctccgcaggatgccggacaatggtgaagaaactccagatatcaaggaattgggaaatcctggccaaaccaccccaagatgattacactgaaatgtagtattagtactgctgccagatctctttttaacatcatgtgcgtctcttgggatccagcaaaagtgttaagccacaatgcccttgtgccttttaatataccacagtgccagttaaactaatatttttgtttgttgcttttgggagttattttcattagtgatttcagcaaatctcatgataaaggacaaggtcaagaactccagagcactgagcagagaggctggtgatgaaaaggtgaaggcctgcgcactgaactgtaaggcagtgggcagtacagggtaactggaggcggggccagggcctcagcgctatggaagagtgtccactgaggctgcacatggcccaggagtggcaccatgttgcagggacaaccatccccatttggcttctccttaaaacacaattgcagctgcattctgcatcgctgaaaactgcaatataatattaaatctgttggtctatgcatggctgcgtatgtgtttcttggaacctgtgtgacagggayatgtgcctggcacactggccagaagactgggcagccaccatggcagtgctggatgacctcagtaagaatgtgtcatgtattccaggtgctgatctaaaaactgtggctcaaatgtcaccgagcttatatgaagctcccagagagaacatttaaaagctcagagagtaagtgctggggaaagcagagctatcagaggaaatctctcatagaaacgaaaccaaaccaacagaaaatgaagaaggccacatctttaaggccacctctgcctctatcagatgagctgctggtctagatcaggggctggcaaacttttctgtaaaaggccagacagtaaaaatttccgattttgcaggccacatagtgtctgttgcaactattcaactctgccatagatcatgtgtaaaggaatgggtgtggctgttcaataaactatacagttgacccttgaacaatatgggtttgaactgcatggctgcacttatatatggatttttttcaaccatacaggttgaaaatacagtattggcagggggcgaaacctgcgtacatggagggctgatttatcacatacgtgggttctgtagggcccactgtgggacttgagtatgcattgggtttttgtatactcaggcgttctggaactatcctccatgtataccaaaggatggttatttctacaaaagcaggaggtaagcccaatgcacagcttgcagattcccctcaggcgagagacagaggttaagggtagatggcagatgacctaagtggcttgttttaggaggccactcccagggccacasctttcatgtgtttgccaccagggtagaaggtctgctgacaagggcaatgactactaacagccccagctgcatggmacagaaagggcatatgctgtggccaccaggctcaggctctatccctcagcagctttgggatcccatgcagctcacctattttctgtgctctagcatcatccaaatcagaatgtctcaggtaagtggtagacaacgtgactcctcccctcccgctgtgaagtgtagacggctgccacggtggcagcggccagaactgaagttcccgatttctctgtttctgcagtcttgccatgctttctctgtatagtcaccccaaacctacttttaccgagggcctgggaaaatgccaaaggtgctgctcacataagcactggcccatcctcatcagcatcaggccctggctctgggctcacaggctgtcgcacatgctgcaagagttccctaggtatgcgtggccgtcgggctgtgcactcgcattcctctttaaagctgtcttgcatagggcctgaaactttcctgctccccttgtcttgacatgtgacacaacaggctgtgaatccttgtccttgacaggcagggcaggtcaaaacgagctggcggcactggggagtagagcagagtttatactggtcccagcgggctccacagtatgaacactctggggaggaaggaaaagccatcattataaacacatrcattcacacacacgtggacaggcattgctccctttgctgactagaatctcgtagatcctgtggaacccggggaaggtttccaaatagtaagtcttctgtcttctagcaacaacaactaaccaccacccccaccacccagcttatttttttgtgggggtgacttctggtaactgtctgcttccagtatttactgactttttttttctttttcccatctagagaacaggtggtaactagatggtaatgaaagtttctctctctcaccagctattccaaagctggccaactacctcccaacccccttgttaagtggtcttttcctctttgattgttcccttttccagkggggacaacacacctaaatacaggcgataacccacctacagkgaacatgcgcagtccacacccctctccccgaggcctgtgtctctcctgctgttgctagggcacttgaccatctgattcctaaaactcacaccatcttcttcacctgtttttccctgatgacctcctgttactattgataacatcattcttcctcacttttccttaccttgcttatctaagctacctctgagccttccctctctccttcatactcacacgcaggtacccatcgagtccag

SEQ ID NO: 277 - DNA, 4860 bp, Homo sapiens
gtattactmagcacagaaattcaggagacacagacaagttcttccacgatgtcgtacagacgagaactagagaaataccgtgacctggatgaagatgaaatccttggagccctaacagaggaagagctgaggaccctggaaaatgagctggatgagctggaccctgataatgcactgctgcctgcaggcctgaggcagaaggatcagaccaccaaggcgcccacgggcccctttaaaagagaggagctcttggatcacttggaaaagcaagcaaaggagtttaaggaccgagaagatctggtcccctacacaggggaaaaacgaggaaaggtctgggttcctaagcagaagccactggatcctgtgctggaaagtgtgacgctggaaccggagctggaggaagccttggcaaatgcttcagatgcagaactctgtgacattgcagcgatcctgggcatgcacacgctcatgagtaaccagcagtactaccaggccctgagcagcagctccatcatgaacaaggaggggctcaacagcgtgattaaacccacacaatacaagcctgtgcccgacgaagaaccaaattcaacagacgtagaggaaacgctggaacggataaagaacaacgacccaaaacttgaagaagttaacctcaataatatccggaatatccccatccccaccctcaaggcatatgcagaagccctgaaagaaaactcatatgtgaagaagttcagcatcgtggggacacggagtaatgaccccgtggcgtatgcccttgctgagatgctcaaggagaacaaggtgttgaagacactgaatgtggaatccaacttcatttctggagctgggattctgcgcctggtagaagccctcccatacaacacttctctggtggaaatgaaaattgacaaccagagccagcccctgggcaacaaagtggaaatggagattgtgagcatgttggaaaaaaacgcaacacttctcaaattyggctaccactttacccagcaaggaccccggcttcgggcatccaacgcaatgatgaacaacaatgaccttgtgaggaagaggaggcttgcggacctgactgggcccatcattcccaagtgccggagtggtgtctagtgtgtggcggtggagtccatgcctttgaactggatgtgttctattgatgacctgtgctctgcaggggaaaccagaaggcaaaatgctggcagcatgaaacccttttgtggttcagttctttatgcactaaggttttaggttgactagtggttgtagttgaaaattttataaaataccgttaatgtgaagtttttctttagtcacagaagttgaatctggttattatttaaaaactagaagcccccaaaccagcagatcttactgaagatgatgttccagcagcagcgacttagccccaggagcccagtttcaatggccttgctgtgtggtgtttcaagtgcatttaaaatgtgtgacacagaaacggcacactcttccacatgcttttgaagtattataaaamactttattacaaatttgtcttagctattagcaaataaaactgattatcattctttattaaccctccttggaattttgaaaacctcgattaaagttgccaaattgattactggatccagaacacaattttcccctcagaacagatagacagactgaagccactgaactctgccaggagtcaacatgagattccttttgctggatatgcagaaatgayaggaaaaaaaccaatggtgaaatttcaagtttcaaaaaccaacctttcattaccaatcccaggcaacaaacatgtccctgagtgttctttaagaacatttgggatttatgtacaatttaatactggagttagaactttttccttattgaatgccaaccttatgatggatgtgaaaatctacggccaaatacttttgaaaacacctttctatattgcacagtgggcaaatggcttatgtgaggtaagacactagagggataaatttccagatcaacatggctatggtatttagtaatggcccagcttagagacttcagctactgatctcatcacttattagacaaattgctgctgaccttacgcctgtatattaagcctccgcaggatgccggacaatggtgaagaaactccagatatcaaggaattgggaaatcctggccaaaccaccccaagatgattacactgaaatgtagtattagtactgctgccagatctctttttaacatcatgtgcgtctcttgggatccagcaaaagtgttaagccacaatgcccttgtgccttttaatataccacagtgccagttaaactaatatttttgtttgttgcttttgggagttattttcattagtgatttcagcaaatctcatgataaaggacaaggtcaagaactccagagcactgagcagagaggctggtgatgaaaaggtgaaggcctgcgcactgaactgtaaggcagtgggcagtacagggtaactggaggcggggccagggcctcagcgctatggaagagtgtccactgaggctgcacatggcccaggagtggcaccatgttgcagggacaaccatccccatttggcttctccttaaaacacaattgcagctgcattctgcatcgctgaaaactgcaatataatattaaatctgttggtctatgcatggctgcgtatgtgtttcttggaacctgtgtgacagggayatgtgcctggcacactggccagaagactgggcagccaccatggcagtgctggatgacctcagtaagaatgtgtcatgtattccaggtgctgatctaaaaactgtggctcaaatgtcaccgagcttatatgaagctcccagagagaacatttaaaagctcagagagtaagtgctggggaaagcagagctatcagaggaaatctctcatagaaacgaaaccaaaccaacagaaaatgaagaaggccacatctttaaggccacctctgcctctatcagatgagctgctggtctagatcaggggctggcaaacttttctgtaaaaggccagacagtaaaaatttccgattttgcaggccacatagtgtctgttgcaactattcaactctgccatagatcatgtgtaaaggaatgggtgtggctgttcaataaactatacagttgacccttgaacaatatgggtttgaactgcatggctgcacttatatatggatttttttcaaccatacaggttgaaaatacagtattggcagggggcgaaacctgcgtacatggagggctgatttatcacatacgtgggttctgtagggcccactgtgggacttgagtatgcattgggtttttgtatactcaggcgttctggaactatcctccatgtataccaaaggatggttatttctacaaaagcaggaggtaagcccaatgcacagcttgcagattcccctcaggcgagagacagaggttaagggtagatggcagatgacctaagtggcttgttttaggaggccactcccagggccacasctttcatgtgtttgccaccagggtagaaggtctgctgacaagggcaatgactactaacagccccagctgcatggmacagaaagggcatatgctgtggccaccaggctcaggctctatccctcagcagctttgggatcccatgcagctcacctattttctgtgctctagcatcatccaaatcagaatgtctcaggtaagtggtagacaacgtgactcctcccctcccgctgtgaagtgtagacggctgccacggtggcagcggccagaactgaagttcccgatttctctgtttctgcagtcttgccatgctttctctgtatagtcaccccaaacctacttttaccgagggcctgggaaaatgccaaaggtgctgctcacataagcactggcccatcctcatcagcatcaggccctggctctgggctcacaggctgtcgcacatgctgcaagagttccctaggtatgcgtggccgtcgggctgtgcactcgcattcctctttaaagctgtcttgcatagggcctgaaactttcctgctccccttgtcttgacatgtgacacaacaggctgtgaatccttgtccttgacaggcagggcaggtcaaaacgagctggcggcactggggagtagagcagagtttatactggtcccagcgggctccacagtatgaacactctggggaggaaggaaaagccatcattataaacacatrcattcacacacacgtggacaggcattgctccctttgctgactagaatctcgtagatcctgtggaacccggggaaggtttccaaatagtaagtcttctgtcttctagcaacaacaactaaccaccacccccaccacccagcttatttttttgtgggggtgacttctggtaactgtctgcttccagtatttactgactttttttttctttttcccatctagagaacaggtggtaactagatggtaatgaaagtttctctctctcaccagctattccaaagctggccaactacctcccaacccccttgttaagtggtcttttcctctttgattgttcccttttccagkggggacaacacacctaaatacaggcgataacccacctacagkgaacatgcgcagtccacacccctctccccgaggcctgtgtctctcctgctgttgctagggcacttgaccatctgattcctaaaactcacaccatcttcttcacctgtttttccctgatgacctcctgttactattgataacatcattcttcctcacttttccttaccttgcttatctaagctacctctgagccttccctctctccttcatactcacacgcaggtacccatcgagtccag

SEQ ID NO: 278 - DNA, 1054 bp, Homo sapiens
tgcctctagccccgcctctcgcctcgccgcctcgccgtcccgccgccttgccgccctgccaccctgccgccctgccgccctgccgccctgccgccctgccgccctgccgccctgccgccggtggtcgctgcccgtggtgctccgtcgcccccgccacctcacgtcctcccgtgcgtcgggagcgtctcggctacaacatgttgggcatgatcaagaactcgctgttcggaagcgtagagacgtggccttggcaggtcctaagcaaaggggacaaggaagaagttgcctatgaagaaagggcctgtgaaggcggcamatttgccacagtagaagtgacagataagcctgtggatgaggctctacgggaagcaatgcccaaggtcgcaaagtatgcggggggcaccaatgacaagggaattgggatggggatgacagtccctatttcctttgctgtgttccccaatgaagatggctctctgcagaagaaattaaaagtctggttccggattccaaaccaatttcaaagcgacccaccagctcccagtgacaaaagcgttaagattgaggaacgggaaggcatcactgtctattccatgcagtttggtggttatgccaaggaagcagactacgtagcacaagccacccgtctgcgtgctgccctggagggcacagccacctaccggggggacatctacttctgcacgggttatgaccctcccatgaagccctacggacggcgcaatgasatctggctgttgaagacatgagtgacccactgaaccaagaacttactggaagtgtgcctctgtgtctccttcytcgggggaaataatacagccaagatatgcagcatccttctcattgatgtagaaaattctgcgatagaccagaaaaatcctggcagcttttctccaggcatctgggtcactaaaaactgattttctaaaattattggatttgtattttgttattaagggggaaaatgtgatttgtgcctgatctttcatctgtgattcttataagagctttgtcttcagaaaaactaaaaataaaa

SEQ ID NO: 279 - DNA, 1211 bp, Homo sapiens
tgcctctagccccgcctctcgcctcgccgcctcgccgtcccgccgccttgccgccctgccaccctgccgccctgccgccctgccgccctgccgccctgccgccctgccgccctgccgccggtggtcgctgcccgtggtgctccgtcgcccccgccacctcacgtcctcccgtgcgtcgggagcgtctcggctacaacatgttgggcatgatcaagaactcgctgttcggaagcgtagagacgtggccttggcaggtcctaagcaaaggggacaaggaagaagttgcctatgaagaaagggcctgtgaaggcggcamatttgccacagtagaagtgacagataagcctgtggatgaggctctacgggaagcaatgcccaaggtcgcaaagtatgcggggggcaccaatgacaagggaattgggatggggatgacagtccctatttcctttgctgtgttccccaatgaagatggctctctgcagaagaaattaaaagtctggttccggattccaaaccaatttcaaagcgacccaccagctcccagtgacaaaagcgttaagattgaggaacgggaaggcatcactgtctattccatgcagtttggtggttatgccaaggaagcagactacgtagcacaagccacccgtctgcgtgctgccctggagggcacagccacctaccggggggacatctacttctgcacgggttatgaccctcccatgaagccctacggacggcgcaatgasatctggctgttgaagacatgagtgacccactgaaccaagaacttactggaagtgtgcctctgtgtctccttcytcgggggtaaggaggggacagtgcttcccaagttccagctgcaagtccaacttaaccaactttccttcaaagtcagttactgccaattttctgaaaaaagcatgttccatatactaagtctcttttctcacrgtaggaaataatacagccaagatatgcagcatccttctcattgatgtagaaaattctgcgatagaccagaaaaatcctggcagcttttctccaggcatctgggtcactaaaaactgattttctaaaattattggatttgtattttgttattaagggggaaaatgtgatttgtgcctgatctttcatctgtgattcttataagagctttgtcttcagaaaaactaaaaataaaaggcattgacttaaacagctgagacaaa

SEQ ID NO: 280 - DNA, 4183 bp, Homo sapiens
atgatattgctgataggatgaggatggatgctggagaagtgactttagtgaaccacaactccgtattcaaaacccacctcctgccacaaacaggttttccagaggaccagctttcgctttctgaccagcagattttatcttccaggcaaggacatttggaccgatcttttacatgttccacaagaagtgcagcttataatccaagctattactcagataatccttcctcagacagttttcttggctcaggcgatttaagaacctttggccagagtgcaaatggccaatggagaaattctaccccatcgtcaagctcatctttacaaaaatcaagaaacagccgaagtctttacctcgaaacccgaaagacctcaagtggattatcaaacagttttgcgggaaagtcaaaccatcactgccatgtatctgcatatgaaaaatcttttcctattaaacctgttccaagtccatcttggagtggttcatgtcgtcgaagtctyttgagccccaagaaaactcagaggcgacatgttagtacagcagaagagacagttcaagaagaagaaagagagatttacagacagctgctacagatggtcacagggaaacagtttactatagccaaacccaccacacattttcctttacacctgtctcgatgtcttagttccagtaaaaatactttgaaagactcactgtttaaaaatggaaactcttgtgcatctcagatcattggctctgatacttcatcatctggatctgccagcattttaactaaccaggaacagctgtcccacagtgtatattccctatcttcttataccccagatgttrcatttggatccaaagattctggtactcttcatcatccccatcatcaccaytctgttccacatcagccagataacttagcagcttcaaatacacaatctgaaggatcagactctgtgattttactgaaagtgaaagattcccagactccaactcccagttctactttcttccaggcagagctgtggatcaaagaattaactagtgtttatgattctcgagcacgagaaagattgcgccagattgaagaacagaaggcattggccttacagcttcaaaaccagagattgcaggagcgggaacattcagtacatgattcagtagaactacatcttcgtgtacctcttgaaaaggagattcctgttactgttgtccaagaaacacaaaaaaaaggtcataaattaactgatagtgaagatgaatttcctgaaattacagaggaaatggagaaagaaataaagaatgtatttcgtaatgggaatcaggatgaagttctcagtgaagcatttcgcctgaccattacacgcaaagatattcaaactctaaaccatctgaattggctcaatgatgagatcatcaatttctacatgaatatgctgatggagcgaagtaaagaraagggcttgccaagtgtgcatgcatttaatacctttttcttcactaaattaaaaacggctggttatcaggcagtgaaacgttggacaaagaaagtagatgtattttctgttgacattcttttggtgcccattcacctgggagtacactggtgtctagctgttgtggactttagaaagaagaatattacctattaygactccatgggtgggataaacaatgaagcctgcagaatactcttgcaatacctaaagcaagaaagcattgacaagaaaaggaaagagtttgacaccaatggctggcagcttttcagcaagaaaagccagattcctcagcagatgaatggaagtgaytgtgggatgtttgcctgcaaatatgctgactgtattaccaaagacagaccaatcaacttcacacagcaacacatgccatacttccggaagcggatggtctgggagatcctccaccgaaaactcttgtgaagactgtctcacttagcagaccttgaccatgtgggggaccagctctttgttgtctacagccagagaccttggaaacagctgctcccagccctctgctgttgtaacacccttgatcctggaccaggccctggcgagatgcattcacaagcacatctgcctttccttttgtatctcagatactatttttgcaaagaaactttggtgctgtgaaaggggtgagggacatccctaagctgaagagagagactgcttttcacttcttcagttctgccatcttgttttcaaagggctccagcctcactcagtccctaattatgggactgagaaaagcttggaaagaatcttggtttcatataaattcttgttgttaggccttactaagaagtaggaaagggcatgggcaaaaggtagggataaaaaccaccagcatatacatggacatacacacacacccacacacacaaacacacacacacacacaattttcacgatgtatggtcaggaatgtgactgtaaactggactttggggcccaggcataagtcccttcctccaggacctttcctatttatatgtccctatacaaaatccatctgcttttatacgtagctgttttatcatctgtagcttcatcctatccggaggcacagcacatgagccctggacaggtcccaaagttccaagcagtcctttccgtgaaagcaggggtttgcatgtgctaccaacacatgatacggggaagacccacccagggagcggtttcagtggcgcaacaaagcaccacttttactgttgcctacttctgaccaagaagaaaaaggaccttagtatttagcataaaattccagcgctggatgaatgcagatctagtttggtctgtggctagtttaaatatgtttctaaccacagagaatttcatatatatatmcatatatatatacacatacatatatatatatatatatgtatgtataaaatttcacagggatatgcttttttttttaaagactgaatgtgttcaccatttagcctgtagatttatttccattttccaaattccagcacacagagatcccagcccctatgagtagggtgtttgtggactacctaatggaatatttttgaggcctggatgaactttgccatatgggtagaggttacagagggaggtgatattttcagctaaaaaaaaaaacgggtggagtttggactgatcaacttgagatttaaaaactgctattccttttgttctttctagcatctctccccaccctctgagagctcctcaggcttagatagtgaagtgatcaaatgccagtgtcattttgtacttaagttccaaagtaggaacattttatacttttttctgtattgtaataggtagttttgtatgaaatcttttctcctctcccgttgtaccgcattctttccagcattgtgctttttccctgggcttatttgaaaattttactgttttatacaagctcgtttagtacatttttctatgttttaccacaagttacaatttgaaaagaaaactattttttttaaatattccattgttaactgaatgttactgtttccactccagcaactacatgtcctcccttcaactgcctgccttttggggaaagaccaccttttgtgtgtttgttttttctctctctttctttccctttctctttctatctctctttatttttctttctttttctttgtttttgagttttctataggaaataaatagctttctatatatgagttgctggggaccttcacattctcttttagaaagctgtggcatgcagtctcattgcaggactcctggaatattgtctggttcttggtatttactgtatgtaagcaacaacttgaaaggtggcaatatggtgtcgatttggactatgaatcaaaagacctttttcaggttctttcactattgtctgggggactcagaacaagattgttctctgtatttattgtttgtccatttaggtaacatctgtcttaccttcctcacagactttgtacagaccaaagcaacaaatatttattgccatgtatagcagaaaatgaaacatgcaacaaaagcactttgaaaaatatataaggaattgttgagcctgtctgaatttgggccccctttctgactaatgcagttttgcacaaggtagaagttagtgaccctgagaccatcttaccaccctggacctggtccaaatacagacttacacagtggaccattctttcctgagc

SEQ ID NO: 281 - DNA, 4686 bp, Homo sapiens
tgctgtccggtggccgcgctgtggccgccggtggccgttaggctacctgaggccgttccttctggtctctctctcctgggccgcggagagaccgtctccctgccgttacagcaggccccatcccagcgcccagccgtacttggggaaaggccggttgcgattccggggctttcccgccagagctgggtsttctctggggagagctgttttcaccgggaagctcggctttctgtggtacyggcttcatctcccgccttccttgagacccgagtgatatttcttgactacttctgcgtctcacgtaaacatttctccaactctcctactctgtggtatctccctgagatgtgatatcgctagtgccaccatcagaaagaaacgtctggaccctcctgctcaggttatgaaaatccccttaactgccacaatttgcttacctggcwcatcgcctcctggactttgtatctttgctaaagtcagtgatgtgaaaagacttgaaatggatgatattgctgataggatgaggatggatgctggagaagtgactttagtgaaccacaactccgtattcaaaacccacctcctgccacaaacaggttttccagaggaccagctttcgctttctgaccagcagattttatcttccaggcaaggacatttggaccgatcttttacatgttccacaagaagtgcagcttataatccaagctattactcagataatccttcctcagacagttttcttggctcaggcgatttaagaacctttggccagagtgcaaatggccaatggagaaattctaccccatcgtcaagctcatctttacaaaaatcaagaaacagccgaagtctttacctcgaaacccgaaagacctcaagtggattatcaaacagttttgcgggaaagtcaaaccatcactgccatgtatctgcatatgaaaaatcttttcctattaaacctgttccaagtccatcttggagtggttcatgtcgtcgaagtctyttgagccccaagaaaactcagaggcgacatgttagtacagcagaagagacagttcaagaagaagaaagagagatttacagacagctgctacagatggtcacagggaaacagtttactatagccaaacccaccacacattttcctttacacctgtctcgatgtcttagttccagtaaaaatactttgaaagactcactgtttaaaaatggaaactcttgtgcatctcagatcattggctctgatacttcatcatctggatctgccagcattttaactaaccaggaacagctgtcccacagtgtatattccctatcttcttataccccagatgttrcatttggatccaaagattctggtactcttcatcatccccatcatcaccaytctgttccacatcagccagataacttagcagcttcaaatacacaatctgaaggatcagactctgtgattttactgaaagtgaaagattcccagactccaactcccagttctactttcttccaggcagagctgtggatcaaagaattaactagtgtttatgattctcgagcacgagaaagattgcgccagattgaagaacagaaggcattggccttacagcttcaaaaccagagattgcaggagcgggaacattcagtacatgattcagtagaactacatcttcgtgtacctcttgaaaaggagattcctgttactgttgtccaagaaacacaaaaaaaaggtcataaattaactgatagtgaagatgaatttcctgaaattacagaggaaatggagaaagaaataaagaatgtatttcgtaatgggaatcaggatgaagttctcagtgaagcatttcgcctgaccattacacgcaaagatattcaaactctaaaccatctgaattggctcaatgatgagatcatcaatttctacatgaatatgctgatggagcgaagtaaagaraagggcttgccaagtgtgcatgcatttaatacctttttcttcactaaattaaaaacggctggttatcaggcagtgaaacgttggacaaagaaagtagatgtattttctgttgacattcttttggtgcccattcacctgggagtacactggtgtctagctgttgtggactttagaaagaagaatattacctattaygactccatgggtgggataaacaatgaagcctgcagaatactcttgcaatacctaaagcaagaaagcattgacaagaaaaggaaagagtttgacaccaatggctggcagcttttcagcaagaaaagccagattcctcagcagatgaatggaagtgaytgtgggatgtttgcctgcaaatatgctgactgtattaccaaagacagaccaatcaacttcacacagcaacacatgccatacttccggaagcggatggtctgggagatcctccaccgaaaactcttgtgaagactgtctcacttagcagaccttgaccatgtgggggaccagctctttgttgtctacagccagagaccttggaaacagctgctcccagccctctgctgttgtaacacccttgatcctggaccaggccctggcgagatgcattcacaagcacatctgcctttccttttgtatctcagatactatttttgcaaagaaactttggtgctgtgaaaggggtgagggacatccctaagctgaagagagagactgcttttcacttcttcagttctgccatcttgttttcaaagggctccagcctcactcagtccctaattatgggactgagaaaagcttggaaagaatcttggtttcatataaattcttgttgttaggccttactaagaagtaggaaagggcatgggcaaaaggtagggataaaaaccaccagcatatacatggacatacacacacacccacacacacaaacacacacacacacacaattttcacgatgtatggtcaggaatgtgactgtaaactggactttggggcccaggcataagtcccttcctccaggacctttcctatttatatgtccctatacaaaatccatctgcttttatacgtagctgttttatcatctgtagcttcatcctatccggaggcacagcacatgagccctggacaggtcccaaagttccaagcagtcctttccgtgaaagcaggggtttgcatgtgctaccaacacatgatacggggaagacccacccagggagcggtttcagtggcgcaacaaagcaccacttttactgttgcctacttctgaccaagaagaaaaaggaccttagtatttagcataaaattccagcgctggatgaatgcagatctagtttggtctgtggctagtttaaatatgtttctaaccacagagaatttcatatatatatmcatatatatatacacatacatatatatatatatatatgtatgtataaaatttcacagggatatgcttttttttttaaagactgaatgtgttcaccatttagcctgtagatttatttccattttccaaattccagcacacagagatcccagcccctatgagtagggtgtttgtggactacctaatggaatatttttgaggcctggatgaactttgccatatgggtagaggttacagagggaggtgatattttcagctaaaaaaaaaaacgggtggagtttggactgatcaacttgagatttaaaaactgctattccttttgttctttctagcatctctccccaccctctgagagctcctcaggcttagatagtgaagtgatcaaatgccagtgtcattttgtacttaagttccaaagtaggaacattttatacttttttctgtattgtaataggtagttttgtatgaaatcttttctcctctcccgttgtaccgcattctttccagcattgtgctttttccctgggcttatttgaaaattttactgttttatacaagctcgtttagtacatttttctatgttttaccacaagttacaatttgaaaagaaaactattttttttaaatattccattgttaactgaatgttactgtttccactccagcaactacatgtcctcccttcaactgcctgccttttggggaaagaccaccttttgtgtgtttgttttttctctctctttctttccctttctctttctatctctctttatttttctttctttttctttgtttttgagttttctataggaaataaatagctttctatatatgagttgctggggaccttcacattctcttttagaaagctgtggcatgcagtctcattgcaggactcctggaatattgtctggttcttggtatttactgtatgtaagcaacaacttgaaaggtggcaatatggtgtcgatttggactatgaatcaaaagacctttttcaggttctttcactattgtctgggggactcagaacaagattgttctctgtatttattgtttgtccatttaggtaacatctgtcttaccttcctcacagactttgtacagaccaaagcaacaaatatttattgccatgtatagcagaaaatgaaacatgcaacaaaagcactttgaaaaatatataaggaattgttgagcctgtctgaatttgggccccctttctgactaatgcagttttgcacaaggtagaagttagtgaccctgagaccatcttaccaccctggacctggtccaaatacagacttacacagtggaccattctttcctgagc

SEQ ID NO: 282 - DNA, 2633 bp, Homo sapiens
tgctgtccggtggccgcgctgtggccgccggtggccgttaggctacctgaggccgttccttctggtctctctctcctgggccgcggagagaccgtctccctgccgttacagcaggccccatcccagcgcccagccgtacttggggaaaggccggttgcgattccggggctttcccgccagagctgggtsttctctggggagagctgttttcaccgggaagctcggctttctgtggtacyggcttcatctcccgccttccttgagacccgagtgatatttcttgactacttctgcgtctcacgtaaacatttctccaactctcctactctgtggtatctccctgagatgtgatatcgctagtgccaccatcagaaagaaacgtctggaccctcctgctcaggttatgaaaatccccttaactgccacaatttgcttacctggcwcatcgcctcctggactttgtatctttgctaaagtcagtgatgtgaaaagacttgaaatggatgatattgctgataggatgaggatggatgctggagaagtgactttagtgaaccacaactccgtattcaaaacccacctcctgccacaaacaggttttccagaggaccagctttcgctttctgaccagcagattttatcttccaggcaaggacatttggaccgatcttttacatgttccacaagaagtgcagcttataatccaagctattactcagataatccttcctcagacagttttcttggctcaggcgatttaagaacctttggccagagtgcaaatggccaatggagaaattctaccccatcgtcaagctcatctttacaaaaatcaagaaacagccgaagtctttacctcgaaacccgaaagacctcaagtggattatcaaacagttttgcgggaaagtcaaaccatcactgccatgtatctgcatatgaaaaatcttttcctattaaacctgttccaagtccatcttggagtggttcatgtcgtcgaagtctyttgagccccaagaaaactcagaggcgacatgttagtacagcagaagagacagttcaagaagaagaaagagagatttacagacagctgctacagatggtcacagggaaacagtttactatagccaaacccaccacacattttcctttacacctgtctcgatgtcttagttccagtaaaaatactttgaaagactcactgtttaaaaatggaaactcttgtgcatctcagatcattggctctgatacttcatcatctggatctgccagcattttaactaaccaggaacagctgtcccacagtgtatattccctatcttcttataccccagatgttrcatttggatccaaagattctggtactcttcatcatccccatcatcaccaytctgttccacatcagccagataacttagcagcttcaaatacacaatctgaaggatcagactctgtgattttactgaaagtgaaagattcccagactccaactcccagttctactttcttccaggcagagctgtggatcaaagaattaactagtgtttatgattctcgagcacgagaaagattgcgccagattgaagaacagaaggcattggccttacagcttcaaaaccagagattgcaggagcgggaacattcagtacatgattcagtagaactacatcttcgtgtacctcttgaaaaggagattcctgttactgttgtccaagaaacacaaaaaaaaggtcataaattaactgatagtgaagatgaatttcctgaaattacagaggaaatggagaaagaaataaagaatgtatttcgtaatgggaatcaggatgaagttctcagtgaagcatttcgcctgaccattacacgcaaagatattcaaactctaaaccatctgaattggctcaatgatgagatcatcaatttctacatgaatatgctgatggagcgaagtaaagaraagggcttgccaagtgtgcatgcatttaatacctttttcttcactaaattaaaaacggctggttatcaggcagtgaaacgttggacaaagaaagtagatgtattttctgttgacattcttttggtgcccattcacctgggagtacactggtgtctagctgttgtggactttagaaagaagaatattacctattaygactccatgggtgggataaacaatgaagcctgcagaatactcttgcaatacctaaagcaagaaagcattgacaagaaaaggaaagagtttgacaccaatggctggcagcttttcagcaagaaaagccaggagattcctcagcagatgaatggaagtgaytgtgggatgtttgcctgcaaatatgctgactgtattaccaaagacagaccaatcaacttcacacagcaacacatgccatacttccggaagcggatggtctgggagatcctccaccgaaaactcttgtgaagactgtctcacttagcagaccttgaccatgtgggggaccagctctttgttgtctacagccagagaccttggaaacagctgctcccagccctctgctgttgtaacacccttgatcctggaccaggccctggcgagatgcattcacaagcacatctgcctttccttttgtatctcagatactatttttgcaaagaaactt

SEQ ID NO: 283 - DNA, 1932 bp, Homo sapiens
atggatgatattgctgataggatgaggatggatgctggagaagtgactttagtgaaccacaactccgtattcaaaacccacctcctgccacaaacaggttttccagaggaccagctttcgctttctgaccagcagattttatcttccaggcaaggacatttggaccgatcttttacatgttccacaagaagtgcagcttataatccaagctattactcagataatccttcctcagacagttttcttggctcaggcgatttaagaacctttggccagagtgcaaatggccaatggagaaattctaccccatcgtcaagctcatctttacaaaaatcaagaaacagccgaagtctttacctcgaaacccgaaagacctcaagtggattatcaaacagttttgcgggaaagtcaaaccatcactgccatgtatctgcatatgaaaaatcttttcctattaaacctgttccaagtccatcttggagtggttcatgtcgtcgaagtctyttgagccccaagaaaactcagaggcgacatgttagtacagcagaagagacagttcaagaagaagaaagagagatttacagacagctgctacagatggtcacagggaaacagtttactatagccaaacccaccacacattttcctttacacctgtctcgatgtcttagttccagtaaaaatactttgaaagactcactgtttaaaaatggaaactcttgtgcatctcagatcattggctctgatacttcatcatctggatctgccagcattttaactaaccaggaacagctgtcccacagtgtatattccctatcttcttataccccagatgttrcatttggatccaaagattctggtactcttcatcatccccatcatcaccaytctgttccacatcagccagataacttagcagcttcaaatacacaatctgaaggatcagactctgtgattttactgaaagtgaaagattcccagactccaactcccagttctactttcttccaggcagagctgtggatcaaagaattaactagtgtttatgattctcgagcacgagaaagattgcgccagattgaagaacagaaggcattggccttacagcttcaaaaccagagattgcaggagcgggaacattcagtacatgattcagtagaactacatcttcgtgtacctcttgaaaaggagattcctgttactgttgtccaagaaacacaaaaaaaaggtcataaattaactgatagtgaagatgaatttcctgaaattacagaggaaatggagaaagaaataaagaatgtatttcgtaatgggaatcaggatgaagttctcagtgaagcatttcgcctgaccattacacgcaaagatattcaaactctaaaccatctgaattggctcaatgatgagatcatcaatttctacatgaatatgctgatggagcgaagtaaagaraagggcttgccaagtgtgcatgcatttaatacctttttcttcactaaattaaaaacggctggttatcaggcagtgaaacgttggacaaagaaagtagatgtattttctgttgacattcttttggtgcccattcacctgggagtacactggtgtctagctgttgtggactttagaaagaagaatattacctattaygactccatgggtgggataaacaatgaagcctgcagaatactcttgcaatacctaaagcaagaaagcattgacaagaaaaggaaagagtttgacaccaatggctggcagcttttcagcaagaaaagccagattcctcagcagatgaatggaagtgaytgtgggatgtttgcctgcaaatatgctgactgtattaccaaagacagaccaatcaacttcacacagcaacacatgccatacttccggaagcggatggtctgggagatcctccaccgaaaactcttgtga

SEQ ID NO: 284 - DNA, 2747 bp, Homo sapiens
agtggatcatgacccatgaagagcaccatgcagccaaaaccctggggattggcaaagccattgctgtcttaacctctggtggagatgcccaaggtatgaatgctgctgtcagggctgtggttcgagttggtatcttcaccggtgcccgtgtcttctttgtccatgagggttatcaaggcctggtggatggtggagatcacatcaaggaagccacctgggagagcgtttcgatgatgcttcagctgggaggcacrgtgattggaagtgcccggtgcaaggactttcgggaaygagaaggacgactccragctgcctacaacctggtgaagcgtgggatcaccaatctctgtgtcattgggggtgatggcagcctcactggggctgacaccttccgttctgagtggagtgacttgttgagtgacctccagaaagcaggtaagatcacagatgaggaggctacgaagtccagctacctgaacattgtgggcctggttgggtcaattgacaatgacttctgtggcacygatatgaccattggcactgactctgccctgcatcggatcatggaaattgtagatgccatcactaccactgcccagagccaccagaggacatttgtgttagaagtaatgggccgccactgtggatacctggcccttgtcacctctctgtcctgtggggccgactgggtttttattcctgaatgtccaccagatgacgactgggaggaacacctttgtcgccgactcagcgagacaaggacccgtggttctcgtctcaacatcatcattgtggctgagggtgcaattgacaagaatggaaaaccaatcacctcagaagacatcaagaatctggtggttaagcgtctgggatatgacacccgggttactgtcttggggcatgtgcagaggggtgggacgccatcagcctttgacagaattctgggcagcaggatgggtgtggaagcagtgatggcacttttggaggggaccccagataccccagcctgtgtagtgagcctctctggtaaccaggctgtgcgcctgcccctcatggaatgtgtccaggtgaccaaagatgtgaccaaggccatggatgagaagaaatttgacgaagccctgaagctgagaggccrgagcttcatgaacaactgggaggtgtacaagcttctagctcatgtcagacccccggtatctaagagtggttcgcacacagtggctgtgatgaacgtgggggctccggctgcaggcatgaatgctgctgttcgctccactgtgaggattggccttatccagggcaaccgagtgctcgttgtccatgatggtttcgagggcctggccaaggggcagatagaggaagctggctggagctatgttgggggctggactggccaaggtggctctaaacttgggactaaaaggactctacccaagaagagctttgaacagatcagtgccaatataactaagtttaacattcagggccttgtcatcattgggggctttgaggcttacacagggggcctggaactgatggagggcaggaagcagtttgatgagctctgcatcccatttgtggtcattcctgctacagtctccaacaatgtccctggctcagacttcagcgttggggctgacacagcactcaatactatctgcacaacctgtgaccgcatcaagcagtcagcagctggcaccaagcgtcgggtgtttatcattgagactatgggtggctactgtggctacctggctaccatggctggactggcagctggggccgatgctgcctacatttttgaggagcccttcaccattcgagacctgcaggcaaatgttgaacatctggtgcaaaagatgaaaacaactgtgaaaaggggcttggtgttaaggaatgaaaagtgcaatgagaactataccactgacttcattttcaacctgtactctgaggaggggaagggcatcttcgacagcaggaagaatgtgcttggtcacatgcagcagggtgggagcccaaccccatttgataggaattttgccactaagatgggcgccaaggctatgaactggatgtctgggaaaatcaaagagagttaccrtaatgrgcggatctttgccaatactccagattcgggctgtgttctggggatgcgtaagagggctctggtcttccaaccagtggctgagctgaaggaccagacagattttgagcatcgaatccccaaggaacagtggtggctgaaactgaggcccatcctcaaaatcctagccaagtacgagattgacttggacacttcagaccatgcccacctggagcacatcacccggaagcggtccggggaagckgccgtctaaacctctctggagtgaggggaatagattacctgatcatggtcagctcacaccctaataagtccacatcttctcagtgttttagctgtttttttcattaggtttccttttattctgtaccttgcagccatgaccagttctggccaggagctggaggagcaggcagtgggtgggagcyccttttaggtagaatttaacatgacttctgccccagctttatctgtcacacaaggctgggcacctctagtgctactgmtagatatcacttactcagttagaattttyctaaaaataagctttatttatttctttgtgataacaaaragtcttggttcctctactacttttactacagtgacaaattgtaactacactaataaatgccaactggtcactgtg

SEQ ID NO: 285 - DNA, 2834 bp, Homo sapiens
gagaaacgaggcatakatccagagatcacgttagggtacaccaagaaagagacggttcaagggaattaccaggaggcgatgwgccagagtggatcatgacccatgaagagcaccatgcagccaaaaccctggggattggcaaagccattgctgtcttaacctctggtggagatgcccaaggtatgaatgctgctgtcagggctgtggttcgagttggtatcttcaccggtgcccgtgtcttctttgtccatgagggttatcaaggcctggtggatggtggagatcacatcaaggaagccacctgggagagcgtttcgatgatgcttcagctgggaggcacrgtgattggaagtgcccggtgcaaggactttcgggaaygagaaggacgactccragctgcctacaacctggtgaagcgtgggatcaccaatctctgtgtcattgggggtgatggcagcctcactggggctgacaccttccgttctgagtggagtgacttgttgagtgacctccagaaagcaggtaagatcacagatgaggaggctacgaagtccagctacctgaacattgtgggcctggttgggtcaattgacaatgacttctgtggcacygatatgaccattggcactgactctgccctgcatcggatcatggaaattgtagatgccatcactaccactgcccagagccaccagaggacatttgtgttagaagtaatgggccgccactgtggatacctggcccttgtcacctctctgtcctgtggggccgactgggtttttattcctgaatgtccaccagatgacgactgggaggaacacctttgtcgccgactcagcgagacaaggacccgtggttctcgtctcaacatcatcattgtggctgagggtgcaattgacaagaatggaaaaccaatcacctcagaagacatcaagaatctggtggttaagcgtctgggatatgacacccgggttactgtcttggggcatgtgcagaggggtgggacgccatcagcctttgacagaattctgggcagcaggatgggtgtggaagcagtgatggcacttttggaggggaccccagataccccagcctgtgtagtgagcctctctggtaaccaggctgtgcgcctgcccctcatggaatgtgtccaggtgaccaaagatgtgaccaaggccatggatgagaagaaatttgacgaagccctgaagctgagaggccrgagcttcatgaacaactgggaggtgtacaagcttctagctcatgtcagacccccggtatctaagagtggttcgcacacagtggctgtgatgaacgtgggggctccggctgcaggcatgaatgctgctgttcgctccactgtgaggattggccttatccagggcaaccgagtgctcgttgtccatgatggtttcgagggcctggccaaggggcagatagaggaagctggctggagctatgttgggggctggactggccaaggtggctctaaacttgggactaaaaggactctacccaagaagagctttgaacagatcagtgccaatataactaagtttaacattcagggccttgtcatcattgggggctttgaggcttacacagggggcctggaactgatggagggcaggaagcagtttgatgagctctgcatcccatttgtggtcattcctgctacagtctccaacaatgtccctggctcagacttcagcgttggggctgacacagcactcaatactatctgcacaacctgtgaccgcatcaagcagtcagcagctggcaccaagcgtcgggtgtttatcattgagactatgggtggctactgtggctacctggctaccatggctggactggcagctggggccgatgctgcctacatttttgaggagcccttcaccattcgagacctgcaggcaaatgttgaacatctggtgcaaaagatgaaaacaactgtgaaaaggggcttggtgttaaggaatgaaaagtgcaatgagaactataccactgacttcattttcaacctgtactctgaggaggggaagggcatcttcgacagcaggaagaatgtgcttggtcacatgcagcagggtgggagcccaaccccatttgataggaattttgccactaagatgggcgccaaggctatgaactggatgtctgggaaaatcaaagagagttaccrtaatgrgcggatctttgccaatactccagattcgggctgtgttctggggatgcgtaagagggctctggtcttccaaccagtggctgagctgaaggaccagacagattttgagcatcgaatccccaaggaacagtggtggctgaaactgaggcccatcctcaaaatcctagccaagtacgagattgacttggacacttcagaccatgcccacctggagcacatcacccggaagcggtccggggaagckgccgtctaaacctctctggagtgaggggaatagattacctgatcatggtcagctcacaccctaataagtccacatcttctcagtgttttagctgtttttttcattaggtttccttttattctgtaccttgcagccatgaccagttctggccaggagctggaggagcaggcagtgggtgggagcyccttttaggtagaatttaacatgacttctgccccagctttatctgtcacacaaggctgggcacctctagtgctactgmtagatatcacttactcagttagaattttyctaaaaataagctttatttatttctttgtgataacaaaragtcttggttcctctactacttttactacagtgacaaattgtaactacactaataaatgccaactggtcactgtg

SEQ ID NO: 286 - DNA, 2741 bp, Homo sapiens
gagaaacgaggcatakatccagagatcacgttagggtacaccaagaaagagacggttcaagggaattaccaggaggcgatgwgccagagtggatcatgacccatgaagagcaccatgcagccaaaaccctggggattggcaaagccattgctgtcttaacctctggtggagatgcccaaggtatgaatgctgctgtcagggctgtggttcgagttggtatcttcaccggtgcccgtgtcttctttgtccatgagggttatcaaggcctggtggatggtggagatcacatcaaggaagccacctgggagagcgtttcgatgatgcttcagctgggaggcacrgtgattggaagtgcccggtgcaaggactttcgggaaygagaaggacgactccragctgcctacaacctggtgaagcgtgggatcaccaatctctgtgtcattgggggtgatggcagcctcactggggctgacaccttccgttctgagtggagtgacttgttgagtgacctccagaaagcaggtaagatcacagatgaggaggctacgaagtccagctacctgaacattgtgggcctggttgggtcaattgacaatgacttctgtggcacygatatgaccattggcactgactctgccctgcatcggatcatggaaattgtagatgccatcactaccactgcccagagccaccagaggacatttgtgttagaagtaatgggccgccactgtggatacctggcccttgtcacctctctgtcctgtggggccgactgggtttttattcctgaatgtccaccagatgacgactgggaggaacacctttgtcgccgactcagcgagacaaggacccgtggttctcgtctcaacatcatcattgtggctgagggtgcaattgacaagaatggaaaaccaatcacctcagaagacatcaagaatggcagcaggatgggtgtggaagcagtgatggcacttttggaggggaccccagataccccagcctgtgtagtgagcctctctggtaaccaggctgtgcgcctgcccctcatggaatgtgtccaggtgaccaaagatgtgaccaaggccatggatgagaagaaatttgacgaagccctgaagctgagaggccrgagcttcatgaacaactgggaggtgtacaagcttctagctcatgtcagacccccggtatctaagagtggttcgcacacagtggctgtgatgaacgtgggggctccggctgcaggcatgaatgctgctgttcgctccactgtgaggattggccttatccagggcaaccgagtgctcgttgtccatgatggtttcgagggcctggccaaggggcagatagaggaagctggctggagctatgttgggggctggactggccaaggtggctctaaacttgggactaaaaggactctacccaagaagagctttgaacagatcagtgccaatataactaagtttaacattcagggccttgtcatcattgggggctttgaggcttacacagggggcctggaactgatggagggcaggaagcagtttgatgagctctgcatcccatttgtggtcattcctgctacagtctccaacaatgtccctggctcagacttcagcgttggggctgacacagcactcaatactatctgcacaacctgtgaccgcatcaagcagtcagcagctggcaccaagcgtcgggtgtttatcattgagactatgggtggctactgtggctacctggctaccatggctggactggcagctggggccgatgctgcctacatttttgaggagcccttcaccattcgagacctgcaggcaaatgttgaacatctggtgcaaaagatgaaaacaactgtgaaaaggggcttggtgttaaggaatgaaaagtgcaatgagaactataccactgacttcattttcaacctgtactctgaggaggggaagggcatcttcgacagcaggaagaatgtgcttggtcacatgcagcagggtgggagcccaaccccatttgataggaattttgccactaagatgggcgccaaggctatgaactggatgtctgggaaaatcaaagagagttaccrtaatgrgcggatctttgccaatactccagattcgggctgtgttctggggatgcgtaagagggctctggtcttccaaccagtggctgagctgaaggaccagacagattttgagcatcgaatccccaaggaacagtggtggctgaaactgaggcccatcctcaaaatcctagccaagtacgagattgacttggacacttcagaccatgcccacctggagcacatcacccggaagcggtccggggaagckgccgtctaaacctctctggagtgaggggaatagattacctgatcatggtcagctcacaccctaataagtccacatcttctcagtgttttagctgtttttttcattaggtttccttttattctgtaccttgcagccatgaccagttctggccaggagctggaggagcaggcagtgggtgggagcyccttttaggtagaatttaacatgacttctgccccagctttatctgtcacacaaggctgggcacctctagtgctactgmtagatatcacttactcagttagaattttyctaaaaataagctttatttatttctttgtgataacaaaragtcttggttcctctactacttttactacagtgacaaattgtaactacactaataaatgccaactggtcactgtg

SEQ ID NO: 287 - DNA, 2880 bp, Homo sapiens
gggaagcctctcctccttccccctccctckttgcctccacctggctcctccccatgttcgtccatcacccctcccccctttcccaaggacaatctgcaagaaagcagcggcggaggagagctaagactaaaagagtggatcatgacccatgaagagcaccatgcagccaaaaccctggggattggcaaagccattgctgtcttaacctctggtggagatgcccaaggtatgaatgctgctgtcagggctgtggttcgagttggtatcttcaccggtgcccgtgtcttctttgtccatgagggttatcaaggcctggtggatggtggagatcacatcaaggaagccacctgggagagcgtttcgatgatgcttcagctgggaggcacrgtgattggaagtgcccggtgcaaggactttcgggaaygagaaggacgactccragctgcctacaacctggtgaagcgtgggatcaccaatctctgtgtcattgggggtgatggcagcctcactggggctgacaccttccgttctgagtggagtgacttgttgagtgacctccagaaagcaggtaagatcacagatgaggaggctacgaagtccagctacctgaacattgtgggcctggttgggtcaattgacaatgacttctgtggcacygatatgaccattggcactgactctgccctgcatcggatcatggaaattgtagatgccatcactaccactgcccagagccaccagaggacatttgtgttagaagtaatgggccgccactgtggatacctggcccttgtcacctctctgtcctgtggggccgactgggtttttattcctgaatgtccaccagatgacgactgggaggaacacctttgtcgccgactcagcgagacaaggacccgtggttctcgtctcaacatcatcattgtggctgagggtgcaattgacaagaatggaaaaccaatcacctcagaagacatcaagaatctggtggttaagcgtctgggatatgacacccgggttactgtcttggggcatgtgcagaggggtgggacgccatcagcctttgacagaattctgggcagcaggatgggtgtggaagcagtgatggcacttttggaggggaccccagataccccagcctgtgtagtgagcctctctggtaaccaggctgtgcgcctgcccctcatggaatgtgtccaggtgaccaaagatgtgaccaaggccatggatgagaagaaatttgacgaagccctgaagctgagaggccrgagcttcatgaacaactgggaggtgtacaagcttctagctcatgtcagacccccggtatctaagagtggttcgcacacagtggctgtgatgaacgtgggggctccggctgcaggcatgaatgctgctgttcgctccactgtgaggattggccttatccagggcaaccgagtgctcgttgtccatgatggtttcgagggcctggccaaggggcagatagaggaagctggctggagctatgttgggggctggactggccaaggtggctctaaacttgggactaaaaggactctacccaagaagagctttgaacagatcagtgccaatataactaagtttaacattcagggccttgtcatcattgggggctttgaggcttacacagggggcctggaactgatggagggcaggaagcagtttgatgagctctgcatcccatttgtggtcattcctgctacagtctccaacaatgtccctggctcagacttcagcgttggggctgacacagcactcaatactatctgcacaacctgtgaccgcatcaagcagtcagcagctggcaccaagcgtcgggtgtttatcattgagactatgggtggctactgtggctacctggctaccatggctggactggcagctggggccgatgctgcctacatttttgaggagcccttcaccattcgagacctgcaggcaaatgttgaacatctggtgcaaaagatgaaaacaactgtgaaaaggggcttggtgttaaggaatgaaaagtgcaatgagaactataccactgacttcattttcaacctgtactctgaggaggggaagggcatcttcgacagcaggaagaatgtgcttggtcacatgcagcagggtgggagcccaaccccatttgataggaattttgccactaagatgggcgccaaggctatgaactggatgtctgggaaaatcaaagagagttaccrtaatgrgcggatctttgccaatactccagattcgggctgtgttctggggatgcgtaagagggctctggtcttccaaccagtggctgagctgaaggaccagacagattttgagcatcgaatccccaaggaacagtggtggctgaaactgaggcccatcctcaaaatcctagccaagtacgagattgacttggacacttcagaccatgcccacctggagcacatcacccggaagcggtccggggaagckgccgtctaaacctctctggagtgaggggaatagattacctgatcatggtcagctcacaccctaataagtccacatcttctcagtgttttagctgtttttttcattaggtttccttttattctgtaccttgcagccatgaccagttctggccaggagctggaggagcaggcagtgggtgggagcyccttttaggtagaatttaacatgacttctgccccagctttatctgtcacacaaggctgggcacctctagtgctactgmtagatatcacttactcagttagaattttyctaaaaataagctttatttatttctttgtgataacaaaragtcttggttcctctactacttttactacagtgacaaattgtaactacactaataaatgccaactggtcactgtg

SEQ ID NO: 288 - DNA, 2888 bp, Homo sapiens
cccagctctggcgggaaagccccggaatcgcaaccggcctttccccaagtacggctgggcgctgggatggggcctgctgtaacggcagggagacggtctctccgcggcccaggagagagagaccagaaggaacggcctcagagtggatcatgacccatgaagagcaccatgcagccaaaaccctggggattggcaaagccattgctgtcttaacctctggtggagatgcccaaggtatgaatgctgctgtcagggctgtggttcgagttggtatcttcaccggtgcccgtgtcttctttgtccatgagggttatcaaggcctggtggatggtggagatcacatcaaggaagccacctgggagagcgtttcgatgatgcttcagctgggaggcacrgtgattggaagtgcccggtgcaaggactttcgggaaygagaaggacgactccragctgcctacaacctggtgaagcgtgggatcaccaatctctgtgtcattgggggtgatggcagcctcactggggctgacaccttccgttctgagtggagtgacttgttgagtgacctccagaaagcaggtaagatcacagatgaggaggctacgaagtccagctacctgaacattgtgggcctggttgggtcaattgacaatgacttctgtggcacygatatgaccattggcactgactctgccctgcatcggatcatggaaattgtagatgccatcactaccactgcccagagccaccagaggacatttgtgttagaagtaatgggccgccactgtggatacctggcccttgtcacctctctgtcctgtggggccgactgggtttttattcctgaatgtccaccagatgacgactgggaggaacacctttgtcgccgactcagcgagacaaggacccgtggttctcgtctcaacatcatcattgtggctgagggtgcaattgacaagaatggaaaaccaatcacctcagaagacatcaagaatctggtggttaagcgtctgggatatgacacccgggttactgtcttggggcatgtgcagaggggtgggacgccatcagcctttgacagaattctgggcagcaggatgggtgtggaagcagtgatggcacttttggaggggaccccagataccccagcctgtgtagtgagcctctctggtaaccaggctgtgcgcctgcccctcatggaatgtgtccaggtgaccaaagatgtgaccaaggccatggatgagaagaaatttgacgaagccctgaagctgagaggccrgagcttcatgaacaactgggaggtgtacaagcttctagctcatgtcagacccccggtatctaagagtggttcgcacacagtggctgtgatgaacgtgggggctccggctgcaggcatgaatgctgctgttcgctccactgtgaggattggccttatccagggcaaccgagtgctcgttgtccatgatggtttcgagggcctggccaaggggcagatagaggaagctggctggagctatgttgggggctggactggccaaggtggctctaaacttgggactaaaaggactctacccaagaagagctttgaacagatcagtgccaatataactaagtttaacattcagggccttgtcatcattgggggctttgaggcttacacagggggcctggaactgatggagggcaggaagcagtttgatgagctctgcatcccatttgtggtcattcctgctacagtctccaacaatgtccctggctcagacttcagcgttggggctgacacagcactcaatactatctgcacaacctgtgaccgcatcaagcagtcagcagctggcaccaagcgtcgggtgtttatcattgagactatgggtggctactgtggctacctggctaccatggctggactggcagctggggccgatgctgcctacatttttgaggagcccttcaccattcgagacctgcaggcaaatgttgaacatctggtgcaaaagatgaaaacaactgtgaaaaggggcttggtgttaaggaatgaaaagtgcaatgagaactataccactgacttcattttcaacctgtactctgaggaggggaagggcatcttcgacagcaggaagaatgtgcttggtcacatgcagcagggtgggagcccaaccccatttgataggaattttgccactaagatgggcgccaaggctatgaactggatgtctgggaaaatcaaagagagttaccrtaatgrgcggatctttgccaatactccagattcgggctgtgttctggggatgcgtaagagggctctggtcttccaaccagtggctgagctgaaggaccagacagattttgagcatcgaatccccaaggaacagtggtggctgaaactgaggcccatcctcaaaatcctagccaagtacgagattgacttggacacttcagaccatgcccacctggagcacatcacccggaagcggtccggggaagckgccgtctaaacctctctggagtgaggggaatagattacctgatcatggtcagctcacaccctaataagtccacatcttctcagtgttttagctgtttttttcattaggtttccttttattctgtaccttgcagccatgaccagttctggccaggagctggaggagcaggcagtgggtgggagcyccttttaggtagaatttaacatgacttctgccccagctttatctgtcacacaaggctgggcacctctagtgctactgmtagatatcacttactcagttagaattttyctaaaaataagctttatttatttctttgtgataacaaaragtcttggttcctctactacttttactacagtgacaaattgtaactacactaataaatgccaactggtcactgtg

SEQ ID NO: 289 - DNA, 1664 bp, Homo sapiens
tggagagctgctgtggcggcggcaacatggcggacgtgataaatgtcagtgtgaacctggaggccttttcccaggccattagtgccatccaggcgctgcgctccagcgtgagcagggtgttcgactgcctgaaggatgggatgcggaacaaggagacgctggagggccgggagaaggcctttattgcgcacttccaggacaacttacattcggtcaaccgggacctcaatgagctggaacgtctgagcaatctggtaggcaagccatctgagaaccatcctcttcataacagtgggctgttaagcctggatcctgtgcaggacaaaactcctctctatagtcaactccttcaagcatataagtggtcaaacaaggttcatgggatacgggttacttgtgtgtttggtgtgctcgttcatgggagcatctcagaatatcccagagtggagcagcagcccccagggactttagtggaaaattaccttgcaaaggttctgcagacagcattcgcctcttgtgacacaccacagatccccgaaggccgattttgcccgtgcatgagaccggccttattccctgacttcagcacctcctccgggtatgctgggttcccggatgctctgtattctcttgctagagttggcaaaggtaatgtacacatgattaattgggaagagactgaggcccctggtggctggcagcagctttgtttagtgctgggcagcccatatgcggggactgatgctgagcacgacaagttgcagtaccatgcaggactagcatctggccttttaaatcagcagtcattgaagcgttccgctaatcagatgggagtatctgccaaacgtagaccaaaggctcagcccacaactcttgtcctaccacctcaatatgttgatgatgtgatcagccgcattgacaggatgtttcctgaaatgtccatccacttatccagacccaatggaacatcagcaatgcttctggtgaccttgggaaaggtgttgaaagtgatcgtcgtcatgcggagcctgttcattgatcgaacaatagtaaagggatataacgagaatgtctacacagaagatggcaagcttgatatatggtccaaatccaactatcaagtattccagaaggtgacagaccatgccaccactgccctgctccactatcagctgccccagatgccggatgtcgtggtccgatccttcatgacctggttaagaagttacataaagctgttccaggccccgtgccagcgctgcgggaagtttctgcaggacggccttcccccgacatggagggatttccgaaccctcgaagccttccatgacacctgccggcagtagcccccacgctggccccagcctcagaccccacccagcaccttcccagactccctctgtggctgatgggactaattattcccactagccagcggactgaaggcaaagaagacctttctagaacctggtagaaggaagctgtgcagcatgctcctcgtccatgtgtgtcggcagtgctggtgtctgtcgtctccgcgagctgttactggaatgagcccttgtgttcatgggtrtcgtcatgcggggttcttgtgttttgtggggcttgggttttggtaacttatttttataagcaataaaccttttgtatcctggataagg

SEQ ID NO: 290 - DNA, 1280 bp, Homo sapiens
tggagagctgctgtggcggcggcaacatggcggacgtgataaatgtcagtgtgaacctggaggccttttcccaggccattagtgccatccaggcgctgcgctccagcgtgagcagggtgttcgactgcctgaaggatgggatgcggaacaaggagacgctggagggccgggagaaggcctttattgcgcacttccaggacaacttacattcggtcaaccgggacctcaatgagctggaacgtctgagcaatctggtaggcaagccatctgagaaccatcctcttcataacagtgggctgttaagcctggatcctgtgcaggacaaaactcctctctatagtcaactccttcaagcatataagtggtcaaacaagttgcagtaccatgcaggactagcatctggccttttaaatcagcagtcattgaagcgttccgctaatcagatgggagtatctgccaaacgtagaccaaaggctcagcccacaactcttgtcctaccacctcaatatgttgatgatgtgatcagccgcattgacaggatgtttcctgaaatgtccatccacttatccagacccaatggaacatcagcaatgcttctggtgaccttgggaaaggtgttgaaagtgatcgtcgtcatgcggagcctgttcattgatcgaacaatagtaaagggatataacgagaatgtctacacagaagatggcaagcttgatatatggtccaaatccaactatcaagtattccagaaggtgacagaccatgccaccactgccctgctccactatcagctgccccagatgccggatgtcgtggtccgatccttcatgacctggttaagaagttacataaagctgttccaggccccgtgccagcgctgcgggaagtttctgcaggacggccttcccccgacatggagggatttccgaaccctcgaagccttccatgacacctgccggcagtagcccccacgctggccccagcctcagaccccacccagcaccttcccagactccctctgtggctgatgggactaattattcccactagccagcggactgaaggcaaagaagacctttctagaacctggtagaaggaagctgtgcagcatgctcctcgtccatgtgtgtcggcagtgctggtgtctgtcgtctccgcgagctgttactggaatgagcccttgtgttcatgggtrtcgtcatgcggggttcttgtgttttgtggggcttgggttttggtaacttatttttataagcaataaaccttttgtatcctggataagg

SEQ ID NO: 291 - DNA, 1283 bp, Homo sapiens
tggagagctgctgtggcggcggcaacatggcggacgtgataaatgtcagtgtgaacctggaggccttttcccaggccattagtgccatccaggcgctgcgctccagcgtgagcagggtgttcgactgcctgaaggatgggatgcggaacaaggagacgctggagggccgggagaaggcctttattgcgcacttccaggacaacttacattcggtcaaccgggacctcaatgagctggaacgtctgagcaatctggtaggcaagccatctgagaaccatcctcttcataacagtgggctgttaagcctggatcctgtgcaggacaaaactcctctctatagtcaactccttcaagcatataagtggtcaaacaagttgcagtaccatgcaggactagcatctggccttttaaatcagcagtcattgaagcgttccgctaatcagatgggagtatctgccaaacgtagaccaaaggctcagcccacaactcttgtcctaccacctcaatatgttgatgatgtgatcagccgcattgacaggatgtttcctgaaatgtccatccacttatccagacccaatggaacatcagcaatgcttctggtagtgaccttgggaaaggtgttgaaagtgatcgtcgtcatgcggagcctgttcattgatcgaacaatagtaaagggatataacgagaatgtctacacagaagatggcaagcttgatatatggtccaaatccaactatcaagtattccagaaggtgacagaccatgccaccactgccctgctccactatcagctgccccagatgccggatgtcgtggtccgatccttcatgacctggttaagaagttacataaagctgttccaggccccgtgccagcgctgcgggaagtttctgcaggacggccttcccccgacatggagggatttccgaaccctcgaagccttccatgacacctgccggcagtagcccccacgctggccccagcctcagaccccacccagcaccttcccagactccctctgtggctgatgggactaattattcccactagccagcggactgaaggcaaagaagacctttctagaacctggtagaaggaagctgtgcagcatgctcctcgtccatgtgtgtcggcagtgctggtgtctgtcgtctccgcgagctgttactggaatgagcccttgtgttcatgggtrtcgtcatgcggggttcttgtgttttgtggggcttgggttttggtaacttatttttataagcaataaaccttttgtatcctggataagg

SEQ ID NO: 292 - DNA, 1393 bp, Homo sapiens
tggagagctgctgtggcggcggcaacatggcggacgtgataaatgtcagtgtgaacctggaggccttttcccaggccattagtgccatccaggcgctgcgctccagcgtgagcagggtgttcgactgcctgaaggatgggatgcggaacaaggagacgctggagggccgggagaaggcctttattgcgcacttccaggacaacttacattcggtcaaccgggacctcaatgagctggaacgtctgagcaatctggtaggcaagccatctgagaaccatcctcttcataacagtgggctgttaagcctggatcctgtgcaggacaaaactcctctctatagtcaactccttcaagcatataagtggtcaaacaagttgcagtaccatgcaggactagcatctggccttttaaatcagcagtcattgaagcgttccgctaatcagatgggagtatctgccaaacgtagaccaaaggctcagcccacaactcttgtcctaccacctcaatatgttgatgatgtgatcagccgcattgacaggatgtttcctgaaatgtccatccacttatccagacccaatggaacatcagcaatgcttctggtgaccttgggaaaggtgttgaaagtgatcgtcgtcatgcggagcctgttcattgatcgaacaatagtaaagggatataacgagaatgtctacacagaagatggcaagcttgatatatggtccaaatccaactatcaagtattccagaaggtgacagaccatgccaccactgccctgctccactatcagctgccccagatgccggatgtcgtggtccgatccttcatgacctggttaagaagttacataaagctgttccaggccccgtgccagcgctgcgggaagtttctgcaggacggccttcccccgacatggagggatttccgaaccctcgaagccttccatgacacctgccggcagtagcccccacgctggccccagcctcagaccccacccagcaccttcccagacacgcaggaagcccacagaaggctcagctggttcctcactgcccagatgtgtacagctgctcctccctttcataaagcagcgccatgtgtgcagaggccactcttgaagagcagactccctctgtggctgatgggactaattattcccactagccagcggactgaaggcaaagaagacctttctagaacctggtagaaggaagctgtgcagcatgctcctcgtccatgtgtgtcggcagtgctggtgtctgtcgtctccgcgagctgttactggaatgagcccttgtgttcatgggtrtcgtcatgcggggttcttgtgttttgtggggcttgggttttggtaacttatttttataagcaataaaccttttgtatcctggataa

SEQ ID NO: 293 - DNA, 3796 bp, Homo sapiens
tgagcacatacccgccagtcctgatcctttctaaggtctctcttccctgcactgtctccgcctagcaattgtcactgctcaccgccctcgagcctattccmccgccgcgtatttgggtagaaaagctcgctcgtgacgtcaccaagctccggaagtctcctggcgtcggcgcaagggccgccgggaaaaccattgagaggccaccgggaaaccattgagaagccccggaggaccggcctgagcggaggcggrgactagagcggccgccggcacgacccgccttcaggcgtacgacgaccgcggccsgggggctctgagtggccaaagcggcggcactttctgcgtggccccggaaggacatagagcggaaggcgggagaaagaagtagccggcaggcggaggcagcccgaggrggcggttgcatgtgtgccagacgttcgtagcccactgagcttcctcacgccggctgtcgcagcgcctagccccacccggcggcctctcctgcgcttccggggccgtggcgagctagtgcgcctgcstgccggcccatccgcgcrccttgcagctgtccttgcgtcggccagcggccagacagttcctgcagcgcttaccgcctggcctctcggttccgcggcgcaccggagggcagcatgtcgcggcggcggcacagcgacgagaacgacggtgggcagcctcacaaaaggagaaagacctctgatgcaaatgaaactgaagatcatttggaatctttaatatgtaaagtaggagaaaagagtgcctgctctttggagagcaacctagaaggcttggctggtgttttggaagctgatcttcctaactacaagagcaagatcttaaggcttctttgtacagttgcacgcctattacctgagaagctgacaatttatacaacattagttggactactgaatgccaggaattacaattttggtggagaatttgtagaagccatgattcgtcaacttaaagaatcattgaaagcaaacaattataaygaagccgtgtatttggtccgttttttatctgatcttgtgaattgtcatgtgattgccgccccatcaatggttgctatgtttgaaaattttgtaagcgtaactcaggaagaagatgtacctcaggtgcgacgagattggtatgtgtatgcatttctgtcatctttgccctgggttggaaaggagttgtacgaaaagaaagatgcagagatggaccgcatctttgccaacactgaaagctatcttaaaagacgccaaaagactcatgtacccatgttacaggtatggactgctgataaaccacatccacaagaagagtatttagattgcctgtgggcccagattcagaaattgaaaaaggatcgctggcaggaacggcacatcctaagaccttatcttgcctttgacagcatcctgtgtgaagcactgcagcacaatctgcctccttttacaccacctcctcacactgaagattcagtgtacccaatgccaagggtcatcttcagaatgtttgattacacagatgatcccgagggtcctgtcatgccagggagtcattcagtggaaagatttgtaatagaagagaatcttcactgcatcattaagtcccactggaaggaaaggaagacttgtgctgcacagttagtgagctatccagggaagaacaagatccccttgaactaccacatagttgaggtgatctttgcagagctgtttcaacttccagcaccccctcacattgatgtgatgtacacaacactcctcattgaactgtgcaaacttcaacctggctctctaccccaagttcttgcacaggcaactgaaatgctatacatgcgtttggacacaatgaacactacctgtgtagacaggtttattaattggttttctcatcatctaagtaacttccagttccgttggagctgggaagattggtcagattgtcttagtcaagatcctgaaagtcccaaaccgaagtttgtaagagaagttctagaaaaatgtatgaggttgtcttaccatcagcgtatattagatattgttcctcctaccttctcagctctrtgtcctgcaaacccaacctgcatttacaagtatggagatgaaagtagcaattctcttcctggacattcygttgccctctgtttagctgttgcctttaaaagtaaggcaaccaatgatgaaatcttcagcattctgaaagatgtaccaaatcctaaccaggatgatgacgacgatgaaggattcagttttaacccattgaaaatagaagtctttgtacagactctgctacacttggcagccaaatcattcagccactccttcagtgctcttgcaaagtttcatgaagtcttcaaaaccctagctgaaagtgatgaaggaaagttacatgtgctaagagttatgtttgaggtctggaggaaccatccacagatgattgctgtactagtggataagatgattcgtacacaaatagttgattgtgctgccgtagcaaattggatcttctcttcagaactatctcgtgactttaccagattgtttgtttgggaaattttgcactctacaattcgtaagatgaacaaacatgtcctgaagatccagmaagagctggaagaagctaaagagaaacttgctaggcaacacaaacggcgaagtgatgatgacgacagaagcagtgacaggaaagacggggttcttgaggaacaaatagaacgacttcaggaaaaagtggaatctgctcagagtgaacaaaagaatcttttcctcgttatatttcagcggtttatcatgatcttgaccgagcacctagtacgatgcgaaactgatgggaccagtgtattaacaccatggtataagaactgtatagagaggctgcagcagatcttcctacagcatcaccaaataatccagcagtacatggtgaccctggagaaccttctcttcactgctgaattagaccctcatatcttggccgtgttccagcagttctgtgccctgcaggcctaagggtcattttttcctcatgtcaaggttttcttccacccctgagatggcaagaccagccccttgtcttcctcagcctgctcaacgtgaagatgatgaggatgaagacctttatgatgatccacttctacttattaaatactgttcgctgatgtggtcctgctctgtcccagtctagcagctttagtgtatggaaaaattgaactaggaattgagttttgaagaaataaaggtgtaagagcaaacattcaacagttgctgtccccagtaatgaagttcatacagacaaaagatgkcatgtcactgtacatcataccttgcaataaatattctgttaaattgtgctggtgcaatttaacatgcttttgtcaaagtaaacatactgttttcctaatttataactgtacttgaaaatgaaagatgaggaagggaccttgccaacctatgtagagcaggtttagctgttagtgatttctggataccaggattgtcttaaactggtaagggtgtagagggtgaatagaagcatcccttaactagacaaatctattttctgtaacatagtggccttggtaatacatgctcattaactagtggttattatgtgccaggtgctataggttcaccctattaactacttcaaacagtcctttgagatawawbtttacaataaaaacaggttttggagtaatttacccacggtccacagctagtaagtggaatttgaacctagatccagttggcccaagagctccttccccgcccccataatgctc

SEQ ID NO: 294 - DNA, 3871 bp, Homo sapiens
tgagcacatacccgccagtcctgatcctttctaaggtctctcttccctgcactgtctccgcctagcaattgtcactgctcaccgccctcgagcctattccmccgccgcgtatttgggtagaaaagctcgctcgtgacgtcaccaagctccggaagtctcctggcgtcggcgcaagggccgccgggaaaaccattgagaggccaccgggaaaccattgagaagccccggaggaccggcctgagcggaggcggrgactagagcggccgccggcacgacccgccttcaggcgtacgacgaccgcggccsgggggctctgagtggccaaagcggcggcactttctgcgtggccccggaaggacatagagcggaaggcgggagaaagaagtagccggcaggcggaggcagcccgaggrggcggttgcatgtgtgccagacgttcgtagcccactgagcttcctcacgccggctgtcgcagcgcctagccccacccggcggcctctcctgcgcttccggggccgtggcgagctagtgcgcctgcstgccggcccatccgcgcrccttgcagctgtccttgcgtcggccagcggccagacagttcctgcagcgcttaccgcctggcctctcggttccgcggcgcaccggagggcagcatgtcgcggcggcggcacagcgacgagaacgacggtgggcagcctcacaaaaggagaaagacctctgatgcaaatgaaactgaagatcatttggaatctttaatatgtaaagtaggagaaaagagtgcctgctctttggagagcaacctagaaggcttggctggtgttttggaagctgatcttcctaactacaagagcaagatcttaaggcttctttgtacagttgcacgcctattacctgagaagctgacaatttatacaacattagttggactactgaatgccaggaattacaattttggtggagaatttgtagaagccatgattcgtcaacttaaagaatcattgaaagcaaacaattataaygaagccgtgtatttggtccgttttttatctgatcttgtgaattgtcatgtgattgccgccccatcaatggttgctatgtttgaaaattttgtaagcgtaactcaggaagaagatgtacctcaggtgcgacgagattggtatgtgtatgcatttctgtcatctttgccctgggttggaaaggagttgtacgaaaagaaagatgcagagatggaccgcatctttgccaacactgaaagctatcttaaaagacgccaaaagactcatgtacccatgttacaggtatggactgctgataaaccacatccacaagaagagtatttagattgcctgtgggcccagattcagaaattgaaaaaggatcgctggcaggaacggcacatcctaagaccttatcttgcctttgacagcatcctgtgtgaagcactgcagcacaatctgcctccttttacaccacctcctcacactgaagattcagtgtacccaatgccaagggtcatcttcagaatgtttgattacacagatgatcccgagggtcctgtcatgccagggagtcattcagtggaaagatttgtaatagaagagaatcttcactgcatcattaagtcccactggaaggaaaggaagacttgtgctgcacagttagtgagctatccagggaagaacaagatccccttgaactaccacatagttgaggtgatctttgcagagctgtttcaacttccagcaccccctcacattgatgtgatgtacacaacactcctcattgaactgtgcaaacttcaacctggctctctaccccaagttcttgcacaggcaactgaaatgctatacatgcgtttggacacaatgaacactacctgtgtagacaggtttattaattggttttctcatcatctaagtaacttccagttccgttggagctgggaagattggtcagattgtcttagtcaagatcctgaaagtcccaaaccgaagtttgtaagagaagttctagaaaaatgtatgaggttgtcttaccatcagcgtatattagatattgttcctcctaccttctcagctctrtgtcctgcaaacccaacctgcatttacaagtatggagatgaaagtagcaattctcttcctggacattcygttgccctctgtttagctgttgcctttaaaagtaaggcaaccaatgatgaaatcttcagcattctgaaagatgtaccaaatcctaaccaggatgatgacgacgatgaaggattcagttttaacccattgaaaatagaagtctttgtacagactctgctacacttggcagccaaatcattcagccactccttcagtgctcttgcaaagtttcatgaagtcttcaaaaccctagctgaaagtgatgaaggaaagttacatgtgctaagagttatgtttgaggtctggaggaaccatccacagatgattgctgtactagtggataagatgattcgtacacaaatagttgattgtgctgccgtagcaaattggatcttctcttcagaactatctcgtgactttaccagattgtttgtttgggaaattttgcactctacaattcgtaagatgaacaaacatgtcctgaagatccagmaagagctggaagaagctaaagagaaacttgctaggcaacacaaacggcgaagtgatgatgacgacagaagcagtgacaggaaagacggggttcttgaggaacaaatagaacgacttcaggaaaaagtggaatctgctcagagtgaacaaaagaatcttttcctcgttatatttcagcggtttatcatgatcttgaccgagcacctagtacgatgcgaaactgatgggaccagtgtattaacaccatggtataagaactgtatagagaggctgcagcagatcttcctacagcatcaccaaataatccagcagtacatggtgaccctggagaaccttctcttcactgctgaattagaccctcatatcttggccgtgttccagcagttctgtgccctgcaggcctaagggtcattttttcctcatgtcaaggttttttttgatatcttaaaataatttgtcttattttttgatggtttgaatgcttgctttcttgtagtatcctttcacttcttaaaggaaacaaaggggaagaggacagtgaatgaacatggcattacttttaattgccctgaaaagcaaatacttcctaacggcagtaatgtgactatgaccatgatatattatatatgtgacagatacaaattctctgtgatcagtttgttattttttttctccttaaggcacaaaataattggtttgaggtatgtgaaacactagaggtcaaccttacatagtatatagaactgatgggtttacccagctacccagtagcataacttttcacagctcggggatgaattaacatggctgaaataaaactaaaagtatggtttttaaactttggcatttcatgatttatcatctcactctactctaaaactggtggtttcttactgaaggtgttctccatttgaaattttatcttcaaagtatttttaagtagtatctttaagacatgacttgttagtaataaaagtgttactagttggaagagtagctctcaaatttgtcttaatgtaaatcacctgggaatctttcaagttattttgaaatttaaaccaccgtctgggggtggaacgcagacatcctcagtaatccttaaagtttccccaggtgattccaggtttggtcaccattatcttagagcatctactcacttcctctagccttggggttatttgtccaaggtcttgtagtgagttacagaatactaaagtggatgtagaagtggtcagattgactgaaactatacc

SEQ ID NO: 295 - DNA, 3900 bp, Homo sapiens
tgagcacatacccgccagtcctgatcctttctaaggtctctcttccctgcactgtctccgcctagcaattgtcactgctcaccgccctcgagcctattccmccgccgcgtatttgggtagaaaagctcgctcgtgacgtcaccaagctccggaagtctcctggcgtcggcgcaagggccgccgggaaaaccattgagaggccaccgggaaaccattgagaagccccggaggaccggcctgagcggaggcggrgactagagcggccgccggcacgacccgccttcaggcgtacgacgaccgcggccsgggggctctgagtggccaaagcggcggcactttctgcgtggccccggaaggacatagagcggaaggcgggagaaagaagtagccggcaggcggaggcagcccgaggrggcggttgcatgtgtgccagacgttcgtagcccactgagcttcctcacgccggctgtcgcagcgcctagccccacccggcggcctctcctgcgcttccggggccgtggcgagctagtgcgcctgcstgccggcccatccgcgcrccttgcagctgtccttgcgtcggccagcggccagacagttcctgcagcgcttaccgcctggcctctcggttccgcggcgcaccggagggcagcatgtcgcggcggcggcacagcgacgagaacgacggtgggcagcctcacaaaaggagaaagacctctgatgcaaatgaaactgaagatcatttggaatctttaatatgtaaagtaggagaaaagagtgcctgctctttggagagcaacctagaaggcttggctggtgttttggaagctgatcttcctaactacaagagcaagatcttaaggcttctttgtacagtgtatgtatgcaaaagatttatgaatccagtgcacgcctattacctgagaagctgacaatttatacaacattagttggactactgaatgccaggaattacaattttggtggagaatttgtagaagccatgattcgtcaacttaaagaatcattgaaagcaaacaattataaygaagccgtgtatttggtccgttttttatctgatcttgtgaattgtcatgtgattgccgccccatcaatggttgctatgtttgaaaattttgtaagcgtaactcaggaagaagatgtacctcaggtgcgacgagattggtatgtgtatgcatttctgtcatctttgccctgggttggaaaggagttgtacgaaaagaaagatgcagagatggaccgcatctttgccaacactgaaagctatcttaaaagacgccaaaagactcatgtacccatgttacaggtatggactgctgataaaccacatccacaagaagagtatttagattgcctgtgggcccagattcagaaattgaaaaaggatcgctggcaggaacggcacatcctaagaccttatcttgcctttgacagcatcctgtgtgaagcactgcagcacaatctgcctccttttacaccacctcctcacactgaagattcagtgtacccaatgccaagggtcatcttcagaatgtttgattacacagatgatcccgagggtcctgtcatgccagggagtcattcagtggaaagatttgtaatagaagagaatcttcactgcatcattaagtcccactggaaggaaaggaagacttgtgctgcacagttagtgagctatccagggaagaacaagatccccttgaactaccacatagttgaggtgatctttgcagagctgtttcaacttccagcaccccctcacattgatgtgatgtacacaacactcctcattgaactgtgcaaacttcaacctggctctctaccccaagttcttgcacaggcaactgaaatgctatacatgcgtttggacacaatgaacactacctgtgtagacaggtttattaattggttttctcatcatctaagtaacttccagttccgttggagctgggaagattggtcagattgtcttagtcaagatcctgaaagtcccaaaccgaagtttgtaagagaagttctagaaaaatgtatgaggttgtcttaccatcagcgtatattagatattgttcctcctaccttctcagctctrtgtcctgcaaacccaacctgcatttacaagtatggagatgaaagtagcaattctcttcctggacattcygttgccctctgtttagctgttgcctttaaaagtaaggcaaccaatgatgaaatcttcagcattctgaaagatgtaccaaatcctaaccaggatgatgacgacgatgaaggattcagttttaacccattgaaaatagaagtctttgtacagactctgctacacttggcagccaaatcattcagccactccttcagtgctcttgcaaagtttcatgaagtcttcaaaaccctagctgaaagtgatgaaggaaagttacatgtgctaagagttatgtttgaggtctggaggaaccatccacagatgattgctgtactagtggataagatgattcgtacacaaatagttgattgtgctgccgtagcaaattggatcttctcttcagaactatctcgtgactttaccagattgtttgtttgggaaattttgcactctacaattcgtaagatgaacaaacatgtcctgaagatccagmaagagctggaagaagctaaagagaaacttgctaggcaacacaaacggcgaagtgatgatgacgacagaagcagtgacaggaaagacggggttcttgaggaacaaatagaacgacttcaggaaaaagtggaatctgctcagagtgaacaaaagaatcttttcctcgttatatttcagcggtttatcatgatcttgaccgagcacctagtacgatgcgaaactgatgggaccagtgtattaacaccatggtataagaactgtatagagaggctgcagcagatcttcctacagcatcaccaaataatccagcagtacatggtgaccctggagaaccttctcttcactgctgaattagaccctcatatcttggccgtgttccagcagttctgtgccctgcaggcctaagggtcattttttcctcatgtcaaggttttttttgatatcttaaaataatttgtcttattttttgatggtttgaatgcttgctttcttgtagtatcctttcacttcttaaaggaaacaaaggggaagaggacagtgaatgaacatggcattacttttaattgccctgaaaagcaaatacttcctaacggcagtaatgtgactatgaccatgatatattatatatgtgacagatacaaattctctgtgatcagtttgttattttttttctccttaaggcacaaaataattggtttgaggtatgtgaaacactagaggtcaaccttacatagtatatagaactgatgggtttacccagctacccagtagcataacttttcacagctcggggatgaattaacatggctgaaataaaactaaaagtatggtttttaaactttggcatttcatgatttatcatctcactctactctaaaactggtggtttcttactgaaggtgttctccatttgaaattttatcttcaaagtatttttaagtagtatctttaagacatgacttgttagtaataaaagtgttactagttggaagagtagctctcaaatttgtcttaatgtaaatcacctgggaatctttcaagttattttgaaatttaaaccaccgtctgggggtggaacgcagacatcctcagtaatccttaaagtttccccaggtgattccaggtttggtcaccattatcttagagcatctactcacttcctctagccttggggttatttgtccaaggtcttgtagtgagttacagaatactaaagtggatgtagaagtggtcagattgactgaaactatacc

SEQ ID NO: 296 - DNA, 501 bp, Homo sapiens
rtggatctgtgcctggcagacagctctgtgtcagcacctgcacctcacaggcaaggaatccatttatccccaggtgaatttcataaagaagtagaaaagtttttatctcaggcaaatcaagaacaaagtgatactatccttcttgattgcagaaacttctatgaaagcaaaataggacgattccaaggctgcttagccccagacatcaggaaattcagttacttccctagctacgttgacaaaaatctagaacttttcagagagaagagagtgctgatgtactgyacygggggcatccgctgtgagcggggttcagcctacctcaaagccaagggagtgtgcaaggaggtgttccagctcaagggtggcatccacaagtacctggaagagtttcctgatggcttttacaaagggaagttgtttgtttttgatgaacgctatgctctgtcctacaacagtgatgtggtgtcaggtaggtcagcacaggctcagagcccaaac

SEQ ID NO: 297 - DNA, 1736 bp, Homo sapiens
gccgagcctcggctcccaaccgggagcggcctccgtggccgggccgcaggcactcaccgtcgttctcgtcgctgtgccgccgccgcgacatgctgccctccggtgcgccgcggaaccgagaggccaggcggtaagcgctgcaggaactgtctggccgctggccgacgcaaggacagctgcaaggygcgcggatgggccggcasgcaggcgcactagctcgccacggccccggaagcgcaggagaggccgccgggtggggctaggcgctgcgacagccggcgtgaggaagctcagtgggctacgaacgtctggcacacatgcaaccgccycctcgggctgcctccgcctgccggctacttctttctcccgccttccgctctatgtccttccggggccacgcagaaagtgccgccgctttggccactcagagcccccsggccgcggtcgtcgtacgcctgaaggcgggtcgtgccggcggccgctctagtcyccgcctccgctcaggccggtcctccggggcttctcaatggtttcccggtggcctctcaatggttttcccggcggcccttgcgccgacgccaggagacttccggagcttggtgacgtcacgagcgagcttttctacccaaatacgcggcggkggaataggctcgagggcggcctttgccctttttgtcaaaaccaaagaagttccaacaaaaaggagttttgaatgtaaagaaaaattgtggaaatgctgtcrgcagctattcacagaccaaaccagcatccatagacatgtggcaacacaacatgctgatgaaatttatcaccagacagcttctattttaaagcaactggctgtgacattgagcacctcaaagagtctttcgtctgcagatgaaaagaaccctttaaaagagtgccttccacatagccatgacgtgtctgcttggctccctgatataagctgctttaaccctgatgagctgataagtggccagggcagtgaagaaggggaggtgctcctttattactgctaccatgacctggaggatccccartggatctgtgcctggcagacagctctgtgtcagcacctgcacctcacaggcaagattcgaattgctgcagaaggaatcaatgggacagttggtggaagcaaattggctaccagactttatgtggaagtcatgctttccttcccattgtttaaggatgacctgtgtaaagatgattttaagaccagcaaaggaggagctcactgttttccagaattgcgtgttggtgtatttgaagaaatcgtgcccatggggatcagccccaaaaagatctcctacaagaagcctggaatccatttatccccaggtgaatttcataaagaagtagaaaagtttttatctcaggcaaatcaagaacaaagtgatactatccttcttgattgcagaaacttctatgaaagcaaaatagtaagtaaaagccagaactgagttctctgaattggtagatctccccattcccacagtgtggtatatttcccaaggggaccttgtgtgtgcccacctgtggccacatggatctcctcccagtactggcagcttcagagaaaacccaagtcctaaaactcagaaatctggtgagagagtctaagaaaatatgaattaaaggcatccaggcacataatatactttgtgactcccatgagcctgcctttgacatstatcaaggatcttgcaaagttgcctttgggcagcctc

SEQ ID NO: 298 - DNA, 2710 bp, Homo sapiens
acgcagaaagtgccgccgctttggccactcagagcccccsggccgcggtcgtcgtacgcctgaaggcgggtcgtgccggcggccgctctagtcyccgcctccgctcaggccggtcctccggggcttctcaatggtttcccggtggcctctcaatggttttcccggcggcccttgcgccgacgccaggagacttccggagcttggtgacgtcacgagcgagcttttctacccaaatacgcggcggkggaataggctcgagggcggtgagcagtgacaattgctaggcggagacagtgcagggaagagagaccttagaaaggatcaggactggcgggaggtatttaactgaaaggaatatctgcttcactgttgcaaccaaaccagatgccttcttccacttcaccagaccaaggagatgacctggagaactgcattttaagattttctgacctggatttaaaagatatgagtcttattaatcccagcagcagtcttaaagcagaattagatggcagtacaaaaaagaaatactcgtttgcaaagaaaaagatgaaaagaaccctttaaaagagtgccttccacatagccatgacgtgtctgcttggctccctgatataagctgctttaaccctgatgagctgataagtggccagggcagtgaagaaggggaggtgctcctttattactgctaccatgacctggaggatccccartggatctgtgcctggcagacagctctgtgtcagcacctgcacctcacaggcaagattcgaattgctgcagaaggaatcaatgggacagttggtggaagcaaattggctaccagactttatgtggaagtcatgctttccttcccattgtttaaggatgacctgtgtaaagatgattttaagaccagcaaaggaggagctcactgttttccagaattgcgtgttggtgtatttgaagaaatcgtgcccatggggatcagccccaaaaagatctcctacaagaagcctggaatccatttatccccaggtgaatttcataaagaagtagaaaagtttttatctcaggcaaatcaagaacaaagtgatactatccttcttgattgcagaaacttctatgaaagcaaaataggacgattccaaggctgcttagccccagacatcaggaaattcagttacttccctagctacgttgacaaaaatctagaacttttcagagagaagagagtgctgatgtactgyacygggggcatccgctgtgagcggggttcagcctacctcaaagccaagggagtgtgcaaggaggtgttccagctcaagggtggcatccacaagtacctggaagagtttcctgatggcttttacaaagggaagttgtttgtttttgatgaacgctatgctctgtcctacaacagtgatgtggtgtcagagtgttcatactgtggagcccgctgggaccagtataaactctgctctactccccagtgccgccagctcgttttgacctgccctgcctgtcaaggacaaggattcacagcctgttgtgtcacatgtcaagacaaggggagcaggaaagtttcaggccctatgcaagacagctttaaagaggaatgcgagtgcacagcccgacggccacgcatacctagggaactcttgcagcatgtgcgacagcctgtgagcccagagccagggcctgatgctgatgaggatgggccagtgcttatgtgagcagcacctttggcattttcccaggccctcggtaaaagtaggtttggggtgactatacagagaaagcatggcaagactgcagaaacagagaaatcgggaacttcagttctggccgctgccaccgtggcagccgtctacacttcacagcgggaggggaggagtcacgttgtctaccacttacctgagacattctgatttggatgatgctagagcacagaaaataggtgagctgcatgggatcccaaagctgctgagggatagagcctgagcctggtggccacagcatatgccctttctgtkccatgcagctggggctgttagtagtcattgcccttgtcagcagaccttctaccctggtggcaaacacatgaaagstgtggccctgggagtggcctcctaaaacaagccacttaggtcatctgccatctacccttaacctctgtctctcgcctgaggggaatctgcaagctgtgcattgggcttacctcctgcttttgtagaaataaccatcctttggtatacatggaggatagttccagaacgcctgagtatacaaaaacccaatgcatactcaagtcccacagtgggccctacagaacccacgtatgtgataaatcagccctccatgtacgcaggtttcgccccctgccaatactgtattttcaacctgtatggttgaaaaaaatccatatataagtgcagccatgcagttcaaacccatattgttcaagggtcaactgtatagtttattgaacagccacacccattcctttacacatgatctatggcagagttgaatagttgcaacagacactatgtggcctgcaaaatcggaaatttttactgtctggccttttacagtggccttaaagatgtggccttcttcattttctgttggtttggtttcgtttctatgagagatttcctctgatagctctgctttccccagcacttactctctgagcttttaaatgttctctctgggagcttcatat

SEQ ID NO: 299 - DNA, 4100 bp, Homo sapiens
ccacgcgtccggcggtgagcagtgacaattgctaggcggagacagtgcagggaagagagaccttagaaaggatcaggactggcgggaggtatttaactgaaaggaatatctgcttcactgttgcaaccaaaccagatgccttcttccacttcaccagaccaaggagatgacctggagaactgcattttaagattttctgacctggatttaaaagatatgagtcttattaatcccagcagcagtcttaaagcagaattagatggcagtacaaaaaagaaatactcgtttgcaaagaaaaaggcctttgccctttttgtcaaaaccaaagaagttccaacaaaaaggagttttgaatgtaaagaaaaattgtggaaatgctgtcrgcagctattcacagaccaaaccagcatccatagacatgtggcaacacaacatgctgatgaaatttatcaccagacagcttctattttaaagcaactggctgtgacattgagcacctcaaagagtctttcgtctgcagatgaaaagaaccctttaaaagagtgccttccacatagccatgacgtgtctgcttggctccctgatataagctgctttaaccctgatgagctgataagtggccagggcagtgaagaaggggaggtgctcctttattactgctaccatgacctggaggatccccaatggatctgtgcctggcagacagctctgtgtcagcacctgcacctcacaggcaagattcgaattgctgcagaaggaatcaatgggacagttggtggaagcaaattggctaccagactttatgtggaagtcatgctttccttcccattgtttaaggatgacctgtgtaaagatgattttaagaccagcaaaggaggagctcactgttttccagaattgcgtgttggtgtatttgaagaaatcgtgcccatggggatcagccccaaaaagatctcctacaagaagcctggaatccatttatccccaggtgaatttcataaagaagtagaaaagtttttatctcaggcaaatcaagaacaaagtgatactatccttcttgattgcagaaacttctatgaaagcaaaataggacgattccaaggctgcttagccccagacatcaggaaattcagttacttccctagctacgttgacaaaaatctagaacttttcagagagaagagagtgctgatgtactgyacygggggcatccgctgtgagcggggttcagcctacctcaaagccaagggagtgtgcaaggaggtgttccagctcaagggtggcatccacaagtacctggaagagtttcctgatggcttttacaaagggaagttgtttgtttttgatgaacgctatgctctgtcctacaacagtgatgtggtgtcagagtgttcatactgtggagcccgctgggaccagtataaactctgctctactccccagtgccgccagctcgttttgacctgccctgcctgtcaaggacaaggattcacagcctgttgtgtcacatgtcaggacaaggggagcaggaaagtttcaggccctatgcaagacagctttaaagaggaatgcgagtgcacagcccgacggccacgcatacctagggaactcttgcagcatgtgcgacagcctgtgagcccagagccagggcctgatgctgatgaggatgggccagtgcttatgtgagcagcacctttggcattttcccaggccctcggtaaaagtaggtttggggtgactatacagagaaagcatggcaagactgcagaaacagagaaatcgggaacttcagttctggccgctgccaccgtggcagccgtctacacttcacagcgggaggggaggagtcacgttgtctaccacttacctgagacattctgatttggatgatgctagagcacagaaaataggtgagctgcatgggatcccaaagctgctgagggatagagcctgagcctggtggccacagcatatgccctttctgtkccatgcagctggggctgttagtagtcattgcccttgtcagcagaccttctaccctggtggcaaacacatgaaagstgtggccctgggagtggcctcctaaaacaagccacttaggtcatctgccatctacccttaacctctgtctctcgcctgaggggaatctgcaagctgtgcattgggcttacctcctgcttttgtagaaataaccatcctttggtatacatggaggatagttccagaacgcctgagtatacaaaaacccaatgcatactcaagtcccacagtgggccctacagaacccacgtatgtgataaatcagccctccatgtacgcaggtttcgccccctgccaatactgtattttcaacctgtatggttgaaaaaaatccatatataagtgcagccatgcagttcaaacccatattgttcaagggtcaactgtatagtttattgaacagccacacccattcctttacacatgatctatggcagagttgaatagttgcaacagacactatgtggcctgcaaaatcggaaatttttactgtctggccttttacagaaaagtttgccagcccctgatctagaccagcagctcatctgatagaggcagaggtggccttaaagatgtggccttcttcattttctgttggtttggtttcgtttctatgagagatttcctctgatagctctgctttccccagcacttactctctgagcttttaaatgttctctctgggagcttcatataagctcggtgacatttgagccacagtttttagatcagcacctggaatacatgacacattcttactgaggtcatccagcactgccatggtggctgcccagtcttctggccagtgtgccaggcacatgtccctgtcacacaggttccaagaaacacatacgcagccatgcatagaccaacagatttaatattatattgcagttttcagcgatgcagaatgcagctgcaattgtgttttaaggagaagccaaatggggatggttgtccctgcaacatggtgccactcctgggccatgtgcagcctcagtggacactcttccatagcgctgaggccctggccccgcctccagttaccctgtactgcccactgccttacagttcagtgcgcaggccttcaccttttcatcaccagcctctctgctcagtgctctggagttcttgaccttgtcctttatcatgagatttgctgaaatcactaatgaaaataactcccaaaagcaacaaacaaaaatattagtttaactggcactgtggtatattaaaaggcacaagggcattgtggcttaacacttttgctggatcccaagagacgcacatgatgttaaaaagagatctggcagcagtactaatactacatttcagtgtaatcatcttggggtggtttggccaggatttcccaattccttgatatctggagtttcttcaccattgtccggcatcctgcggaggcttaatatacaggcgtaaggtcagcagcaatttgtctaataagtgatgagatcagtagctgaagtctctaagctgggccattactaaataccatagccatgttgatctggaaatttatccctctagtgtcttacctcacataagccatttgcccactgtgcaatatagaaaggtgttttcaaaagtatttggccgtagattttcacatccatcataaggttggcattcaataaggaaaaagttctaactccagtattaaattgtacataaatcccaaatgttcttaaagaacactcagggacatgtttgttgcctggcattggtaatgaaaggttggtttttgaaacttgaaatttcaccattggtttttttcctatcatttctgcatatccagcaaaaggaatctcatgttgactcctggcagagttcagtggcttcagtctgtctatctgttctgaggggaaaattgtgttctggatccagtaatcaatttggcaactttaatcgaggttttcaaaattccaaggagggttaataaagaatgataatcagttttatttgctaatagctaagacaaatttgtaataaagtgttttataatacttcaaaaaaaaaaaaaaaaaaaaaaaaaaaaaaaa

SEQ ID NO: 300 - DNA, 1860 bp, Homo sapiens
ggactgcggaggccggggcggtggcgtgcagggtgaggtctcccgggctggcgcgcrtgcaagccccctgctgctacctcgcgctaggccagctccaggagggcaacagacgacaggacattkcaaaakggccacttaaattttcyttcgagtaaacagaacacctgccaagacmctcgarcctgggcgtgccccaagacaggtggttggggtctaggagtcggctgcagctggcgatgctctgaggggacgtcagggcctcaggatcgccccyatgaagacgaagtgcatctgtgaactgtgctcctgcgggcggcatcactgtccacatctccctaccaagatttatgatraaacagagaaaccatgtcttctctcygaatataccgagaactaccctttctatcactcctacctgcccagagagtccttcaagccaaggcgggagtaccagaaagggyctataccaatggaaggsctgactacatcaaggagagattttgggcctcacaaagtggcaccagtgaaggtccaccagtatgaccagttcgtcccgagtgaagagaatatggatttgctcacraygtataagaaagattacaatccctaccctgtctgtcgagtggrccccatcaaacctcgggacagtaaatatccatgtagygacaagatggagtgtttgcctmcttataaagctgattatttgccttggaaccaaccaaggcgagagccacttcgtctggaacacaaataccagccggcatcagtcaggtttgataacagaaccacacaccaggacgattaccccataaaaggccttgtgaagaccataagctgtaaacctctggccatgccaaagctctgtaacatccccttggaggatgtgactaactacaagatgagctatgtggcccaccccgtggagaagcgctttgtgcatgaagcagagaagttcaggccctgtgaaatmccctttgaaagccttaccactcaaaaacaatcctaccggggcctgatgggggagcctgccaagagcttgaaacctctagccaggcctcctgggctagacatgcctttctgtaacaccactgagtttcgagataagtaccaagcttggccaatgccccggatgttctccaaagctcccatcacctacgtccctcccgaagacaggatggatcttctgacaacagtgcaggcccattacacatgscctaagggtgccccagctcagtcctgccgacctgcacttcagattaagaagtgcggtcgctttgaaggctcttccaccaccaaggatgactacargcagtggtccagcatgcgcacagagccagtcaagcccgttccccagctggacttgcccaccgagcccctggactgcctgaccaccactcgggcccactatgtgccccacctgcctatcartaccaaaagctgtaagcctcattggtctggccctcgaggaaatgtccctgtggaaagccagaccacctacaccatcagctttactcccaaggaaatgggcaggtgcctagyttcatatcctgagcctcctggctacacctttgaggaagtggatgctttgggtcacaggatatacaaaccagtttcccaggcaggctctcagcagagcagccatctttctgtagatgattcagaaaamcccaaccagagggagttggaagtgttagcctgattttgaaaaayagtaatttagaaattacacagtacttttaaaagcagacaactgagaattatttgttggacaaaaaagaattccctaaaatgacaaaaaacaaaaaacaaaaaaccttcaccacttccagagcacttgaataaaatgagaatcacttgact

SEQ ID NO: 301 - DNA, 3326 bp, Homo sapiens
gcccgagggctgccggctgccggccgagggcggccccgccaccgaccaggtgatggcccagccagggtccggctgcaaagcgaccacccgctgtcttgaagggaccgcgccgcccgccatggctcagtctgacgccgaggccctggcaggagctctggacaaggacgagggtcaggcctccccatgtacgcccagcacgccatctgtctgctcaccgccctctgccgcctcctccgtgccgtctgcaggcaagaacatctgctccagctgcggcctcgagatcctggaccgatatctgctcaaggtcaacaacctcatctggcacgtgcggtgcctcgagtgctccgtgtgtcgcacgtcgctgaggcagcagaacagctgctacatcaagaacaaggagatcttctgcaagatggactacttcagccgattcgggaccaagtgtgcccggtgcggccgacagatctacgccagcgactgggtgcggagagctcgcggcaacgcctaccacctggcctgcttcgcctgcttctcgtgcaagcgccagctgtccactggtgaggagttcggcctggtcgaggagaaggtgctctgccgcatccactacgacaccatgattgagaacctcaagagggccgccgagaacgggaacggcctcacgttggagggggcagtgccctcggaacaggacagtcaacccaagccggccaagcgcgcgcggacgtccttcaccgcggaacagctgcaggttatgcaggcgcagttcgcgcaggacaacaaccccgacgctcagacgctgcagaagctggcggacatgacgggcctcagccggagagtcatccaggtgtggtttcaaaactgccgggcgcgtcataaaaagcacacgccgcaacacccagtgccgccctcsggggcgcccccgtcccgccttccctccgccctgtccgacgacatccactacaccccgttcagcagccccgagcgggcgcgcatggtcaccctgcacggctacattgagagtcaggtacagtgcgggcaggtgcactgccggctgccttacaccgcaccccccgtccacctcaaagccgatatggatgggccgctctccaaccggggtgagaaggtcatcctttttcagtactaacgctgccggcacttccgcatctgcccgtgggcgccccacagctgcccytcagccgctgagatccagtgtccaagctgcggccaggagtccacccacctccgcatccacccccgtccgccatcctgcccaccaccaggtcggttcccgaggcctggcctttccctctcctgctgagaaccagaacccaccaggagcaccacagagtcctcctcttggaaggcagaactccctgaaatctggaatcagggtggaaacagcctgtttttcccatttaaacaggagtcctcttcaacttcagctgattacaataacaaaaggcggaattgaattgtgcgatgccaacggccttctcatttacaggtttttttcccccacattggcctttatttactacttccttggaaccatctctgaattctgaatagctgacaacccccaatgttatccactctgttgcttttgtctggaaaactctacagtgtttgtgggatgtccccaaaggaaagctatgttctaattttatcatttccatctgtctggttatgtcaagttaattcagaaagagaagagacagtgaccaaccctgagargcctaatagggcagagatggaggcctgcccagactaggaggcagcggggatagacagggaatggggagaagaaagacccccattggtttggaaatcaaggagagggcggtgacatattggaccagaagaggcactagccattttaaggagaggaaagagaaaactctggggtcagggagagaccctayccccacctaattatccagcatatatgtaagaaacatagcagcgatggtattcgatctgtgccatgactcttctgaatgtttggacaggttagagttggggacccctgttggccacttgttgacctctcatagtggtgcttgggccaggtcttctcaatggaaggggaatcccttataggggagagggaacagagcccagtgaaatggcagtcagaatgttaaccctggatccatctctaagtagagagagggtgcccattgcctaggtgagtgtgccaagctcaggattccaactggtgcctctgagcttcccaatcaatacttcctggagccagccccacccacccctgagaacagaggtcagacacagctgcgtaacatccatcctgctacaactcttccaccccaaacaaaagggctcaggctacacacgaccatgatttatgttttcaggggatgcccatttgtcccaagcttatcctgtaattctagaattacctggtgtcctgatgcattttccactagaggttgctaatcagcatgttttagcccaagtccgccttcctgctgtggttaacctgttatgttgcttttggaaggagactctaagacagggaaagcaagttcatggtacatacgcagccattgtctctgtttttacccatggcagacattgctaatcaatggcagctctatttcactgagtctggataaggtttcagagttcaaatgcttgacgttggcacttaacatgaaagcctataggtcattcttgctctgggatctacaggcagggtaggcacaggtgcagcctaagaagggaacctgcttcctctcccttccaaagacagtgacagctgactgagggcaaagagcaggcaccactcagaacgtggtgagtacagctcagctcagcactcagtcagtggtaacttgtgcccagccctgtgctaggcgctgacattaacaggagcaaccagggcccaattcctggccttggagctcaaatctttcctttgatttttgctcctgatcatcaaggccccagtggcaaccatgtggtaagtggccaaccaagccctacccagggtcacccaacacactctgccttgagcctctcctcagggtctattccttgcgtggattatgtggccgtagcatgttacagttcaaacatgtctccactaccctgttaagagcagcctgggaacgtacaggccatcaagactatttatttaaatacaaaaaaaggggaaaacacacacacggaaaaaaaattgtaagcactttttttgtaaaaccaatgtctgttttgttacatacctttcatgtcgtgctttgtaaatgtcttatttgtgtaataaagttaatgcaagtagaagtgctggcactgaaatccagaac

SEQ ID NO: 302 - DNA, 3222 bp, Homo sapiens
gcccgagggctgccggctgccggccgagggcggccccgccaccgaccaggtgatggcccagccagggtccggctgcaaagcgaccacccgctgtcttgaagggaccgcgccgcccgccatggctcagtctgacgccgaggccctggcaggagctctggacaaggacgagggtcaggcctccccatgtacgcccagcacgccatctgtctgctcaccgccctctgccgcctcctccgtgccgtctgcaggcaagaacatctgctccagctgcggcctcgagatcctggaccgatatctgctcaaggtcaacaacctcatctggcacgtgcggtgcctcgagtgctccgtgtgtcgcacgtcgctgaggcagcagaacagctgctacatcaagaacaaggagatcttctgcaagatggactacttcagccgattcgggaccaagtgtgcccggtgcggccgacagatctacgccagcgactgggtgcggagagctcgcggcaacgcctaccacctggcctgcttcgcctgcttctcgtgcaagcgccagctgtccactggtgaggagttcggcctggtcgaggagaaggtgctctgccgcatccactacgacaccatgattgagaacctcaagagggccgccgagaacgggaacggcctcacgttggagggggcagtgccctcggaacaggacagtcaacccaagccggccaagcgcgcgcggacgtccttcaccgcggaacagctgcaggttatgcaggcgcagttcgcgcaggacaacaaccccgacgctcagacgctgcagaagctggcggacatgacgggcctcagccggagagtcatccaggtgtggtttcaaaactgccgggcgcgtcataaaaagcacacgccgcaacacccagtgccgccctcsggggcgcccccgtcccgccttccctccgccctgtccgacgacatccactacaccccgttcagcagccccgagcgggcgcgcatggtcaccctgcacggctacattgagagtcatcctttttcagtactaacgctgccggcacttccgcatctgcccgtgggcgccccacagctgcccytcagccgctgagatccagtgtccaagctgcggccaggagtccacccacctccgcatccacccccgtccgccatcctgcccaccaccaggtcggttcccgaggcctggcctttccctctcctgctgagaaccagaacccaccaggagcaccacagagtcctcctcttggaaggcagaactccctgaaatctggaatcagggtggaaacagcctgtttttcccatttaaacaggagtcctcttcaacttcagctgattacaataacaaaaggcggaattgaattgtgcgatgccaacggccttctcatttacaggtttttttcccccacattggcctttatttactacttccttggaaccatctctgaattctgaatagctgacaacccccaatgttatccactctgttgcttttgtctggaaaactctacagtgtttgtgggatgtccccaaaggaaagctatgttctaattttatcatttccatctgtctggttatgtcaagttaattcagaaagagaagagacagtgaccaaccctgagargcctaatagggcagagatggaggcctgcccagactaggaggcagcggggatagacagggaatggggagaagaaagacccccattggtttggaaatcaaggagagggcggtgacatattggaccagaagaggcactagccattttaaggagaggaaagagaaaactctggggtcagggagagaccctayccccacctaattatccagcatatatgtaagaaacatagcagcgatggtattcgatctgtgccatgactcttctgaatgtttggacaggttagagttggggacccctgttggccacttgttgacctctcatagtggtgcttgggccaggtcttctcaatggaaggggaatcccttataggggagagggaacagagcccagtgaaatggcagtcagaatgttaaccctggatccatctctaagtagagagagggtgcccattgcctaggtgagtgtgccaagctcaggattccaactggtgcctctgagcttcccaatcaatacttcctggagccagccccacccacccctgagaacagaggtcagacacagctgcgtaacatccatcctgctacaactcttccaccccaaacaaaagggctcaggctacacacgaccatgatttatgttttcaggggatgcccatttgtcccaagcttatcctgtaattctagaattacctggtgtcctgatgcattttccactagaggttgctaatcagcatgttttagcccaagtccgccttcctgctgtggttaacctgttatgttgcttttggaaggagactctaagacagggaaagcaagttcatggtacatacgcagccattgtctctgtttttacccatggcagacattgctaatcaatggcagctctatttcactgagtctggataaggtttcagagttcaaatgcttgacgttggcacttaacatgaaagcctataggtcattcttgctctgggatctacaggcagggtaggcacaggtgcagcctaagaagggaacctgcttcctctcccttccaaagacagtgacagctgactgagggcaaagagcaggcaccactcagaacgtggtgagtacagctcagctcagcactcagtcagtggtaacttgtgcccagccctgtgctaggcgctgacattaacaggagcaaccagggcccaattcctggccttggagctcaaatctttcctttgatttttgctcctgatcatcaaggccccagtggcaaccatgtggtaagtggccaaccaagccctacccagggtcacccaacacactctgccttgagcctctcctcagggtctattccttgcgtggattatgtggccgtagcatgttacagttcaaacatgtctccactaccctgttaagagcagcctgggaacgtacaggccatcaagactatttatttaaatacaaaaaaaggggaaaacacacacacggaaaaaaaattgtaagcactttttttgtaaaaccaatgtctgttttgttacatacctttcatgtcgtgctttgtaaatgtcttatttgtgtaataaagttaatgcaagtagaagtgctggcactgaaatccagaac

SEQ ID NO: 303 - DNA, 3372 bp, Homo sapiens
ctttgggcggcctgatggatctcactgattgacagttggaattgacactctggctacctcttatcttgggcattcacgacaatttctaattgcaggtgatggcccagccagggtccggctgcaaagcgaccacccgctgtcttgaagggaccgcgccgcccgccatggctcagtctgacgccgaggccctggcaggagctctggacaaggacgagggtcaggcctccccatgtacgcccagcacgccatctgtctgctcaccgccctctgccgcctcctccgtgccgtctgcaggcaagaacatctgctccagctgcggcctcgagatcctggaccgatatctgctcaaggtcaacaacctcatctggcacgtgcggtgcctcgagtgctccgtgtgtcgcacgtcgctgaggcagcagaacagctgctacatcaagaacaaggagatcttctgcaagatggactacttcagccgattcgggaccaagtgtgcccggtgcggccgacagatctacgccagcgactgggtgcggagagctcgcggcaacgcctaccacctggcctgcttcgcctgcttctcgtgcaagcgccagctgtccactggtgaggagttcggcctggtcgaggagaaggtgctctgccgcatccactacgacaccatgattgagaacctcaagagggccgccgagaacgggaacggcctcacgttggagggggcagtgccctcggaacaggacagtcaacccaagccggccaagcgcgcgcggacgtccttcaccgcggaacagctgcaggttatgcaggcgcagttcgcgcaggacaacaaccccgacgctcagacgctgcagaagctggcggacatgacgggcctcagccggagagtcatccaggtgtggtttcaaaactgccgggcgcgtcataaaaagcacacgccgcaacacccagtgccgccctcsggggcgcccccgtcccgccttccctccgccctgtccgacgacatccactacaccccgttcagcagccccgagcgggcgcgcatggtcaccctgcacggctacattgagagtcaggtacagtgcgggcaggtgcactgccggctgccttacaccgcaccccccgtccacctcaaagccgatatggatgggccgctctccaaccggggtgagaaggtcatcctttttcagtactaacgctgccggcacttccgcatctgcccgtgggcgccccacagctgcccytcagccgctgagatccagtgtccaagctgcggccaggagtccacccacctccgcatccacccccgtccgccatcctgcccaccaccaggtcggttcccgaggcctggcctttccctctcctgctgagaaccagaacccaccaggagcaccacagagtcctcctcttggaaggcagaactccctgaaatctggaatcagggtggaaacagcctgtttttcccatttaaacaggagtcctcttcaacttcagctgattacaataacaaaaggcggaattgaattgtgcgatgccaacggccttctcatttacaggtttttttcccccacattggcctttatttactacttccttggaaccatctctgaattctgaatagctgacaacccccaatgttatccactctgttgcttttgtctggaaaactctacagtgtttgtgggatgtccccaaaggaaagctatgttctaattttatcatttccatctgtctggttatgtcaagttaattcagaaagagaagagacagtgaccaaccctgagargcctaatagggcagagatggaggcctgcccagactaggaggcagcggggatagacagggaatggggagaagaaagacccccattggtttggaaatcaaggagagggcggtgacatattggaccagaagaggcactagccattttaaggagaggaaagagaaaactctggggtcagggagagaccctayccccacctaattatccagcatatatgtaagaaacatagcagcgatggtattcgatctgtgccatgactcttctgaatgtttggacaggttagagttggggacccctgttggccacttgttgacctctcatagtggtgcttgggccaggtcttctcaatggaaggggaatcccttataggggagagggaacagagcccagtgaaatggcagtcagaatgttaaccctggatccatctctaagtagagagagggtgcccattgcctaggtgagtgtgccaagctcaggattccaactggtgcctctgagcttcccaatcaatacttcctggagccagccccacccacccctgagaacagaggtcagacacagctgcgtaacatccatcctgctacaactcttccaccccaaacaaaagggctcaggctacacacgaccatgatttatgttttcaggggatgcccatttgtcccaagcttatcctgtaattctagaattacctggtgtcctgatgcattttccactagaggttgctaatcagcatgttttagcccaagtccgccttcctgctgtggttaacctgttatgttgcttttggaaggagactctaagacagggaaagcaagttcatggtacatacgcagccattgtctctgtttttacccatggcagacattgctaatcaatggcagctctatttcactgagtctggataaggtttcagagttcaaatgcttgacgttggcacttaacatgaaagcctataggtcattcttgctctgggatctacaggcagggtaggcacaggtgcagcctaagaagggaacctgcttcctctcccttccaaagacagtgacagctgactgagggcaaagagcaggcaccactcagaacgtggtgagtacagctcagctcagcactcagtcagtggtaacttgtgcccagccctgtgctaggcgctgacattaacaggagcaaccagggcccaattcctggccttggagctcaaatctttcctttgatttttgctcctgatcatcaaggccccagtggcaaccatgtggtaagtggccaaccaagccctacccagggtcacccaacacactctgccttgagcctctcctcagggtctattccttgcgtggattatgtggccgtagcatgttacagttcaaacatgtctccactaccctgttaagagcagcctgggaacgtacaggccatcaagactatttatttaaatacaaaaaaaggggaaaacacacacacggaaaaaaaattgtaagcactttttttgtaaaaccaatgtctgttttgttacatacctttcatgtcgtgctttgtaaatgtcttatttgtgtaataaagttaatgcaagtagaagtgctggcactgaaatccagaac

SEQ ID NO: 304 - DNA, 3337 bp, Homo sapiens
gccccggcgttgcccgagggctgccggctgccggccgagggcggccccgccaccgaccaggtgatggcccagccagggtccggctgcaaagcgaccacccgctgtcttgaagggaccgcgccgcccgccatggctcagtctgacgccgaggccctggcaggagctctggacaaggacgagggtcaggcctccccatgtacgcccagcacgccatctgtctgctcaccgccctctgccgcctcctccgtgccgtctgcaggcaagaacatctgctccagctgcggcctcgagatcctggaccgatatctgctcaaggtcaacaacctcatctggcacgtgcggtgcctcgagtgctccgtgtgtcgcacgtcgctgaggcagcagaacagctgctacatcaagaacaaggagatcttctgcaagatggactacttcagccgattcgggaccaagtgtgcccggtgcggccgacagatctacgccagcgactgggtgcggagagctcgcggcaacgcctaccacctggcctgcttcgcctgcttctcgtgcaagcgccagctgtccactggtgaggagttcggcctggtcgaggagaaggtgctctgccgcatccactacgacaccatgattgagaacctcaagagggccgccgagaacgggaacggcctcacgttggagggggcagtgccctcggaacaggacagtcaacccaagccggccaagcgcgcgcggacgtccttcaccgcggaacagctgcaggttatgcaggcgcagttcgcgcaggacaacaaccccgacgctcagacgctgcagaagctggcggacatgacgggcctcagccggagagtcatccaggtgtggtttcaaaactgccgggcgcgtcataaaaagcacacgccgcaacacccagtgccgccctcsggggcgcccccgtcccgccttccctccgccctgtccgacgacatccactacaccccgttcagcagccccgagcgggcgcgcatggtcaccctgcacggctacattgagagtcaggtacagtgcgggcaggtgcactgccggctgccttacaccgcaccccccgtccacctcaaagccgatatggatgggccgctctccaaccggggtgagaaggtcatcctttttcagtactaacgctgccggcacttccgcatctgcccgtgggcgccccacagctgcccytcagccgctgagatccagtgtccaagctgcggccaggagtccacccacctccgcatccacccccgtccgccatcctgcccaccaccaggtcggttcccgaggcctggcctttccctctcctgctgagaaccagaacccaccaggagcaccacagagtcctcctcttggaaggcagaactccctgaaatctggaatcagggtggaaacagcctgtttttcccatttaaacaggagtcctcttcaacttcagctgattacaataacaaaaggcggaattgaattgtgcgatgccaacggccttctcatttacaggtttttttcccccacattggcctttatttactacttccttggaaccatctctgaattctgaatagctgacaacccccaatgttatccactctgttgcttttgtctggaaaactctacagtgtttgtgggatgtccccaaaggaaagctatgttctaattttatcatttccatctgtctggttatgtcaagttaattcagaaagagaagagacagtgaccaaccctgagargcctaatagggcagagatggaggcctgcccagactaggaggcagcggggatagacagggaatggggagaagaaagacccccattggtttggaaatcaaggagagggcggtgacatattggaccagaagaggcactagccattttaaggagaggaaagagaaaactctggggtcagggagagaccctayccccacctaattatccagcatatatgtaagaaacatagcagcgatggtattcgatctgtgccatgactcttctgaatgtttggacaggttagagttggggacccctgttggccacttgttgacctctcatagtggtgcttgggccaggtcttctcaatggaaggggaatcccttataggggagagggaacagagcccagtgaaatggcagtcagaatgttaaccctggatccatctctaagtagagagagggtgcccattgcctaggtgagtgtgccaagctcaggattccaactggtgcctctgagcttcccaatcaatacttcctggagccagccccacccacccctgagaacagaggtcagacacagctgcgtaacatccatcctgctacaactcttccaccccaaacaaaagggctcaggctacacacgaccatgatttatgttttcaggggatgcccatttgtcccaagcttatcctgtaattctagaattacctggtgtcctgatgcattttccactagaggttgctaatcagcatgttttagcccaagtccgccttcctgctgtggttaacctgttatgttgcttttggaaggagactctaagacagggaaagcaagttcatggtacatacgcagccattgtctctgtttttacccatggcagacattgctaatcaatggcagctctatttcactgagtctggataaggtttcagagttcaaatgcttgacgttggcacttaacatgaaagcctataggtcattcttgctctgggatctacaggcagggtaggcacaggtgcagcctaagaagggaacctgcttcctctcccttccaaagacagtgacagctgactgagggcaaagagcaggcaccactcagaacgtggtgagtacagctcagctcagcactcagtcagtggtaacttgtgcccagccctgtgctaggcgctgacattaacaggagcaaccagggcccaattcctggccttggagctcaaatctttcctttgatttttgctcctgatcatcaaggccccagtggcaaccatgtggtaagtggccaaccaagccctacccagggtcacccaacacactctgccttgagcctctcctcagggtctattccttgcgtggattatgtggccgtagcatgttacagttcaaacatgtctccactaccctgttaagagcagcctgggaacgtacaggccatcaagactatttatttaaatacaaaaaaaggggaaaacacacacacggaaaaaaaattgtaagcactttttttgtaaaaccaatgtctgttttgttacatacctttcatgtcgtgctttgtaaatgtcttatttgtgtaataaagttaatgcaagtagaagtgctggcactgaaatccagaac

SEQ ID NO: 305 - DNA, 2684 bp, Homo sapiens
gcaagagcccgtgtcccgctaggctccgcgccctcgcgcccatagccccggcggcggcacgaccagaggcggccaggggagcgcgccgccccgctcggccctccagtcccsctccgcckcctccctcccgcacagcagccgccagcgcggcctcctgcaccatgtcggtggccggcctcaagaagcagttccataaagccactcagtcttccaaaaaacagtattcttgtgactgttactgagtataaactggatacttctggatacggctctggttgtacrtaagttgagtgagaaggttggaggagctgaaggaaccaagctagatgatgacttcaaagagatggaaaggaaagtggatgtcaccagcagggctgtgatggaaataatgactaaaacaattgaataccttcaacccaatccagcttccagagctaagctcagcatgatcaacaccatgtcaaaaatccgtggccaggagaaggggccaggctatcctcaggcagaggcgctgctggcagaggccatgctcaaatttggaagagagcttggagatgattgcaactttggcccagcacttggtgaggtcggggaggccatgcgggaactgtcggaggtcaaagactctttggacatagaagtgaagcagaacttcattgaccctcttcagaatcttcatgacaaagatcttagggaaattcaacatcatctaaagaagttggagggtcgacgcctggattttgattataagaagaaacgacaaggcaagattccggatgaagagcttcgtcaagctctagagaaatttgatgagtctaaggaaattgctgagtcaagcatgttcaatctcttggagatggatattgaacaagtgagccagctctctgcacttgtgcaagctcagctggagtaccacaagcaggcagtccagatcctgcagcaagtcacggtcagactggaagaaagaataagacaggcttcatctcagcctagaagggaatatcaacctaaaccacgaatgagcctggagtttccaactggagacagtactcagcccaatgggggtctctcccacacaggcactcccaaaccttcaggtgtccaaatggatcagccctgctgccgagctctgtacgactttgaacctgaaaatgaaggggagttgggatttaaagagggcgatatcatcacactcactaaccaaattgatgagaactggtatgaggggatgctgcatggccattcaggcttcttccccatcaattatgtggaaattctggttgccctgccccattaggatgttatgctggctggctcgcctcctcttgacccagatagttacggttaaccactgctttggcaatgctgcttataacacatcccaagtgcaggccgcagtggtccacgtcatccagccccaccaagtgactttggttgacttgtgggctcccacaggagtcatggtgatggatgatatcctcttagcctggtgggcrtggcatgtgctttttaaaacatcatctgagaccagccagtagtcacagaactgctgtttacacagttctcaggaggctgtggtttcttagaatatgaccatgagccatttcacagaaaaaccatcccaccgaagatattgtctatcaccccaggggccatctgaaggtctctttgcatttctccatgcaaagaggagaaagcttttgctttcacactgtcccttcccaaatatgtgagtcatggaattgtcaaagtaagccttccctcaccagcaaattgtctcctgatctgaatgaatttgtctcttaatgcatccatagaaaagtgttaattgtgggttcaaagcattctctgcaaataggcatctcagctcctcacacttatggctatttctgacgtatagccagttttcttccctccttgctattaaagccasagcggtaattccaaattatttttcagtaagacagttaatcagcattattgtgagagggactgaaaagaaattctccattatgaggaattgggaagaaatctggtatccaagcttaaatttcttgctatacagaaactatgtatgtatttaggctatttctgaagggcacagggaagggggaacaaatatcttcacttcagttttatttgtgaattacatgtttcatgaatccatttggcacagagacacaaggaagaaaacactagtaaccawctttccactagttcatakactgagaaacagtaaatacctttcctttccacttttaccctgtgttctttgaacatcatttgtgcagattctgccctcaatgaggaccaaataaagatgatttttgtgcttagcagtttaaggtatatggctgcatatgcaaaactctttcccaattcagtcgctacttttacttctgccctttctatccatcgtcttcattttgtgtgtacagtgctgtgtgtaagcttatcagtgtgtttttttatttgtatcagtcatgaaagtcctgttaggtatccagagttctatttatctagctgtacagactctttcagaggtttaacgtgctgcttccgatgtgccacctgcagtagtggatcatgtggagtgaaaggcaaatcttactgcttaatgtataaactctcaccacaggaagcatcgctgtttccaataaatattgctgaagacagaaccaaag

SEQ ID NO: 306 - DNA, 2576 bp, Homo sapiens
gcaagagcccgtgtcccgctaggctccgcgccctcgcgcccatagccccggcggcggcacgaccagaggcggccaggggagcgcgccgccccgctcggccctccagtcccsctccgcckcctccctcccgcacagcagccgccagcgcggcctcctgcaccatgtcggtggccggcctcaagaagcagttccataaagccactcagtcttccaaaaaacagtattcttgtgactgttactgagtataaactggatacttctggatacggctctggttgtacrtaagttgagtgagaaggttggaggagctgaaggaaccaagctagatgatgacttcaaagagatggaaaggaaagtggatgtcaccagcagggctgtgatggaaataatgactaaaacaattgaataccttcaacccaatccagcttccagagctaagctcagcatgatcaacaccatgtcaaaaatccgtggccaggagaaggggccaggctatcctcaggcagaggcgctgctggcagaggccatgctcaaatttggaagagagcttggagatgattgcaactttggcccagcacttggtgaggtcggggaggccatgcgggaactgtcggaggtcaaagactctttggacatagaagtgaagcagaacttcattgaccctcttcagaatcttcatgacaaagatcttagggaaattcaacatcatctaaagaagttggagggtcgacgcctggattttgattataagaagaaacgacaaggcaagattccggatgaagagcttcgtcaagctctagagaaatttgatgagtctaaggaaattgctgagtcaagcatgttcaatctcttggagatggatattgaacaagtgagccagctctctgcacttgtgcaagctcagctggagtaccacaagcaggcagtccagatcctgcagcaagtcacggtcagactggaagaaagaataagacaggcttcatctcagcctagaagggaatatcaacctaaaccacgaatgagcctggagtttccaactggagacagtactcagcccaatgggggtctctcccacacaggcactcccaaaccttcaggtgtccaaatggatcagccctgctgccgagctctgtacgactttgaacctgaaaatgaaggggagttgggatttaaagagggcgatatcatcacactcactaaccaaattgatgagaactggtatgaggggatgctgcatggccattcaggcttcttccccatcaattatgtggaaattctggttgccctgccccattaggatgttatgctggctggctcgcctcctcttgacccagatagttacggttaaccactgctttggcaatgctgcttataacacatcccaagtgcaggccgcagtggtccacgtcatccagccccaccaagtgactttggttgacttgtgggctcccacaggagtcatggtgatggatgatatcctcttagcctggtgggcrtggcatgtgctttttaaaacatcatctgagaccagccagtagtcacagaactgctgtttacacagttctcaggaggctgtggtttcttagaatatgaccatgagccatttcacagaaaaaccatcccaccgaagatattgtctatcaccccaggggccatctgaaggtctctttgcatttctccatgcaaagaggagaaagcttttgctttcacactgtcccttcccaaatatgtgagtcatggaattgtcaaagtaagccttccctcaccagcaaattgtctcctgatctgaatgaatttgtctcttaatgcatccatagaaaagtgttaattgtgggttcaaagcattctctgcaaataggcatctcagctcctcacacttatggctatttctgacgtatagccagttttcttccctccttgctattaaagccasagcggtaattccaaattatttttcagtaagacagttaatcagcattattgtgagagggattaaatttcttgctatacagaaactatgtatgtatttaggctatttctgaagggcacagggaagggggaacaaatatcttcacttcagttttatttgtgaattacatgtttcatgaatccatttggcacagagacacaaggaagaaaacactagtaaccawctttccactagttcatakactgagaaacagtaaatacctttcctttccacttttaccctgtgttctttgaacatcatttgtgcagattctgccctcaatgaggaccaaataaagatgatttttgtgcttagcagtttaaggtatatggctgcatatgcaaaactctttcccaattcagtcgctacttttacttctgccctttctatccatcgtcttcattttgtgtgtacagtgctgtgtgtaagcttatcagtgtgtttttttatttgtatcagtcatgaaagtcctgttaggtatccagagttctatttatctagctgtacagactctttcagaggtttaacgtgctgcttccgatgtgccacctgcagtagtggatcatgtggagtgaaaggcaaatcttactgcttaatgtataaactc

SEQ ID NO: 307 - DNA, 2259 bp, Homo sapiens
cttccagagctaagctcagcatgatcaacaccatgtcaaaaatccgtggccaggagaaggggccaggctatcctcaggcagaggcgctgctggcagaggccatgctcaaatttggaagagagcttggagatgattgcaactttggcccagcacttggtgaggtcggggaggccatgcgggaactgtcggaggtcaaagactctttggacatagaagtgaagcagaacttcattgaccctcttcagaatcttcatgacaaagatcttagggaaattcaacatcatctaaagaagttggagggtcgacgcctggattttgattataagaagaaacgacaaggcaagattccggatgaagagcttcgtcaagctctagagaaatttgatgagtctaaggaaattgctgagtcaagcatgttcaatctcttggagatggatattgaacaagtgagccagctctctgcacttgtgcaagctcagctggagtaccacaagcaggcagtccagatcctgcagcaagtcacggtcagactggaagaaagaataagacaggcttcatctcagcctagaagggaatatcaacctaaaccacgaatgagcctggagtttccaactggagacagtactcagcccaatgggggtctctcccacacaggcactcccaaaccttcaggtgtccaaatggatcagccctgctgccgagctctgtacgactttgaacctgaaaatgaaggggagttgggatttaaagagggcgatatcatcacactcactaaccaaattgatgagaactggtatgaggggatgctgcatggccattcaggcttcttccccatcaattatgtggaaattctggttgccctgccccattaggatgttatgctggctggctcgcctcctcttgacccagatagttacggttaaccactgctttggcaatgctgcttataacacatcccaagtgcaggccgcagtggtccacgtcatccagccccaccaagtgactttggttgacttgtgggctcccacaggagtcatggtgatggatgatatcctcttagcctggtgggcrtggcatgtgctttttaaaacatcatctgagaccagccagtagtcacagaactgctgtttacacagttctcaggaggctgtggtttcttagaatatgaccatgagccatttcacagaaaaaccatcccaccgaagatattgtctatcaccccaggggccatctgaaggtctctttgcatttctccatgcaaagaggagaaagcttttgctttcacactgtcccttcccaaatatgtgagtcatggaattgtcaaagtaagccttccctcaccagcaaattgtctcctgatctgaatgaatttgtctcttaatgcatccatagaaaagtgttaattgtgggttcaaagcattctctgcaaataggcatctcagctcctcacacttatggctatttctgacgtatagccagttttcttccctccttgctattaaagccasagcggtaattccaaattatttttcagtaagacagttaatcagcattattgtgagagggactgaaaagaaattctccattatgaggaattgggaagaaatctggtatccaagcttaaatttcttgctatacagaaactatgtatgtatttaggctatttctgaagggcacagggaagggggaacaaatatcttcacttcagttttatttgtgaattacatgtttcatgaatccatttggcacagagacacaaggaagaaaacactagtaaccawctttccactagttcatakactgagaaacagtaaatacctttcctttccacttttaccctgtgttctttgaacatcatttgtgcagattctgccctcaatgaggaccaaataaagatgatttttgtgcttagcagtttaaggtatatggctgcatatgcaaaactctttcccaattcagtcgctacttttacttctgccctttctatccatcgtcttcattttgtgtgtacagtgctgtgtgtaagcttatcagtgtgtttttttatttgtatcagtcatgaaagtcctgttaggtatccagagttctatttatctagctgtacagactctttcagaggtttaacgtgctgcttccgatgtgccacctgcagtagtggatcatgtggagtgaaaggcaaatcttactgcttaatgtataaactctcaccacaggaagcatcgctgtttccaataaatattgctgaagacagaaccaaag

SEQ ID NO: 308 - DNA, 2625 bp, Homo sapiens
acgtcagagtgtttctccgcaagagcccgtgtcccgctaggctccgcgccctcgcgcccatagccccggcggcggcacgaccagaggcggccaggggagcgcgccgccccgctcggccctccagtcccsctccgcckcctccctcccgcacagcagccgccagcgcggcctcctgcaccatgtcggtggccggcctcaagaagcagttccataaagccactcagaaagtgagtgagaaggttggaggagctgaaggaaccaagctagatgatgacttcaaagagatggaaaggaaagtggatgtcaccagcagggctgtgatggaaataatgactaaaacaattgaataccttcaacccaatccagcttccagagctaagctcagcatgatcaacaccatgtcaaaaatccgtggccaggagaaggggccaggctatcctcaggcagaggcgctgctggcagaggccatgctcaaatttggaagagagcttggagatgattgcaactttggcccagcacttggtgaggtcggggaggccatgcgggaactgtcggaggtcaaagactctttggacatagaagtgaagcagaacttcattgaccctcttcagaatcttcatgacaaagatcttagggaaattcaacatcatctaaagaagttggagggtcgacgcctggattttgattataagaagaaacgacaaggcaagattccggatgaagagcttcgtcaagctctagagaaatttgatgagtctaaggaaattgctgagtcaagcatgttcaatctcttggagatggatattgaacaagtgagccagctctctgcacttgtgcaagctcagctggagtaccacaagcaggcagtccagatcctgcagcaagtcacggtcagactggaagaaagaataagacaggcttcatctcagcctagaagggaatatcaacctaaaccacgaatgagcctggagtttccaactggagacagtactcagcccaatgggggtctctcccacacaggcactcccaaaccttcaggtgtccaaatggatcagccctgctgccgagctctgtacgactttgaacctgaaaatgaaggggagttgggatttaaagagggcgatatcatcacactcactaaccaaattgatgagaactggtatgaggggatgctgcatggccattcaggcttcttccccatcaattatgtggaaattctggttgccctgccccattaggatgttatgctggctggctcgcctcctcttgacccagatagttacggttaaccactgctttggcaatgctgcttataacacatcccaagtgcaggccgcagtggtccacgtcatccagccccaccaagtgactttggttgacttgtgggctcccacaggagtcatggtgatggatgatatcctcttagcctggtgggcrtggcatgtgctttttaaaacatcatctgagaccagccagtagtcacagaactgctgtttacacagttctcaggaggctgtggtttcttagaatatgaccatgagccatttcacagaaaaaccatcccaccgaagatattgtctatcaccccaggggccatctgaaggtctctttgcatttctccatgcaaagaggagaaagcttttgctttcacactgtcccttcccaaatatgtgagtcatggaattgtcaaagtaagccttccctcaccagcaaattgtctcctgatctgaatgaatttgtctcttaatgcatccatagaaaagtgttaattgtgggttcaaagcattctctgcaaataggcatctcagctcctcacacttatggctatttctgacgtatagccagttttcttccctccttgctattaaagccasagcggtaattccaaattatttttcagtaagacagttaatcagcattattgtgagagggactgaaaagaaattctccattatgaggaattgggaagaaatctggtatccaagcttaaatttcttgctatacagaaactatgtatgtatttaggctatttctgaagggcacagggaagggggaacaaatatcttcacttcagttttatttgtgaattacatgtttcatgaatccatttggcacagagacacaaggaagaaaacactagtaaccawctttccactagttcatakactgagaaacagtaaatacctttcctttccacttttaccctgtgttctttgaacatcatttgtgcagattctgccctcaatgaggaccaaataaagatgatttttgtgcttagcagtttaaggtatatggctgcatatgcaaaactctttcccaattcagtcgctacttttacttctgccctttctatccatcgtcttcattttgtgtgtacagtgctgtgtgtaagcttatcagtgtgtttttttatttgtatcagtcatgaaagtcctgttaggtatccagagttctatttatctagctgtacagactctttcagaggtttaacgtgctgcttccgatgtgccacctgcagtagtggatcatgtggagtgaaaggcaaatcttactgcttaatgtataaactctcaccacaggaagcatcgctgtttccaataaatattgctgaagacagaaccaaag

SEQ ID NO: 309 - DNA, 9250 bp, Homo sapiens
tcttacatccagtccaggacctgtcacaaaagactcacattagtaccacatggtatcctgttttagtaaagaataggtgaaatattttagtgagtagatcctacttttcctttcagatgcaatgaacagaagaccctgaaaggatttcaatccagaatgtcacaggataataagagcagatgtctgtgatgccctttacaaagcacctttacatactgtctctcattcgtctctaatgacacctatgtgatcctccattttttcagatgaggaaactgaggttcagagtgattaagcgagttgcctgagatttcacagctaacacattgtgaaatctagtctagcacccaggactaaaaactctcggcttcttttaaggccacatatcgcctcaccagaagggtggcctctctggagatataccctaccctcggccgacttgatattgagaacttggtcatcttaagcatgtgggccacttgggcaaggcagcccttcccaaattgtaaatgtccccacgtggagctcaagcgtctggcttgagccagaaggtgccctgaacactcggtggccccagcccccacgtaacagcacgtgctcgggtcccacattcggtcagacgcccctctccactggcatctgcccggtggaggcgccactgcgctctgcctccgccccagcaagcgcgtgtccacgcgggcgcgccacgccagccgtgcgccccagcggctcgccgtgcgcccgcgccccaggtgcccactggctcgcgcgccctccgtctgcgccttggagacccgcggcggcgatcgctcggagccgccttggaccgcggcctcgggtccatcacactccaggggcggagcgaggcaccgagacgtcagggcggagaactagcgccgggctagcgcgccctcccggcggctgccggcgtcccacgtcctcggctggcgcggccggcggcggcggcgaccgggagatgcagtgagcggcggcgctggggcgcagccaggcggccgggagggcgggggccagaggctgagcccgggcgagcccgccgtgcgcacagctctgcccgccgcccctggagcggatccccagccgtccctgggcgttctcccgggttctagcaaagccccccggggtgcccatcagtttccttgggtgactacagcgtgtgttttttcyttcctctttcccctgcctgtgtgcccttctccaggatggcagaggcggaattgcacaaggaaaggctgcaagccatagcagaaaaaagaaagaggcagactgaaatagaaggcaagcgacaacagcttgacgagcagatacttctgctgcagcattccaagtccaaagtgcttcgggagaaatggctgctgcagggcatacccgctggaactgccgaagaggaggaagccaggaggcggcagtctgaagaggatgagttcagagtcaagcaacttgaagataacattcagaggctggagcaagaaatacaaacgctagaaagtgaagagtcccagatatctgccaaagagcaaatcatcctagagaaactgaaggaaacagaaaaatccttcaaggactttcagaagggtttctccagtacggatggagatgcagtaaattacatttcctcccagcttcccgacctgccaatcctctgttcacgaacagcagaaccatcacctgggcaggacgggaccagcagagcggctgctgtgtacgccatggaaattaatgtggagaaagacaaacaaacaggagagaccaagattctctctacatctaccattggcccagagggggtccatcagaaaggagtcaaagtctatgatgatggtaccaaagtagtgtatgaggtgcgctcaggaggcaccgtagtagaaaatggagtgcacaaattaagcacaaaggatgtagaagagcttattcagaaggctggacaatcaagcttaggaggagggcacgtgtctgaaaggactgtgattgcagatgggagcctcagccatcccaaggaacacatgctctgcaaagaagctaagttagaaatggtacataagtctaggaaagaccattcttccgggaacccagggcagcaggcccaagcccccagcgctgcagggccggaggcaaacttggatcagcccgtcaccatgatttttatgggctaccaaaatatcgaggatgaagaggagacgaaaaaggtgctaggctatgatgaaaccatcaaggctgaattggtcctcattgatgaagatgatgagaagtcattgagggagaagacagtgacggacgtgtccactattgacgggaacgyggctgagcttgtgtccgggaggccggtctcagacaccacagagccctcatccccagaagggaaggaagagagcctagctacagagccagccccaggagtcgggtgggagaatgtgctgctaaaggaaggtgagtcagcctcgaacgccacagaaacatccggcccagacatgactatcaagaagcctccccagctttctgaggatgatatctggctaaaaagcgagggagacaactatagtgccaccctcctggagcctgctgccagctctctttccccagatcacaaaaacatggaaattgaggtgtctgttgcagaatgtaaaagtgttcctggaatcacctctaccccacatcccatggaccatccctccgctttctattcacccccgcataatggcctccttactgatcaccacgaatccctggataatgatgttgccagagagatccgctatctagatgaggtgctagaggccaactrctgtgattctgctgtggatggaacgtacaatggaacatcctccccagagcctggtgcagtggttctggtgggcggcctaagcccccctgtccacgaggcgacccagccagaacccactgaaagaacagctagccrgcaggcacctcctcacatcgagctcagtaatagcagccctgaccccatggcagaggcagaaagaacaaatggccattcccccagccagcctagagatgcgctgggggacagcctgcaggtgcctgtcagccccagctccacaaccagctcacggtgttcttcccgagatggagagttcactctcaccacactgaaaaaggaggccaagtttgagctgcgtgccttccatgaggacaagaagccctccaagctctttgaggatgacgagcatgagaaagaacaatactgcattagaaaagtgaggccttcagaggagatgctggagctggaaaaggagaggagagagctcatccgcagccaggccgtcaagaagaatcctggcattgcagcaaaatggtggaatcccccgcaggaaaaaaccatcgaggagcagctggacgaggaacatctggagtcgcacaaaaagtacaaggagcgcaaagagagaagggcacagcaggaacagttgctgctgcagmagcagttacagcagcagcagcagcagcccccatcgcagctctgcacagcccctgcctcttctcatgaacgcgcaagcatgattgacaaagcaaaggaggacattgtcacagagcagatagatttctctgctgctcgcaaacaatttcagctgatggagaattccaggcaagcrgtggccaagggccagagtacacccaggctgttctccatcaagcctttctacaggcctctggggtcagtcaactcagacaagccactgactaatccgagaccaccttctgtcgggggacctccagaagacagtggtgcctcagccgccaagggacagaaatcccccggtgccctggagaccccatcggcagcaggaagccagggcaacacagcctctcaggggaaggaagggccctacagcgagccttctaaacgtgggcccttatctaaactgtgggctgaggatggagaatttacgagcgcccgggctgtcctcactgtggtcaaggatgatgaccatgggattttggatcagttctcaagatctgtcaatgtctccttgacccaagaggagcttgactctggtctggacgaattgtcggtgaggtctcaggataccacagtcctggagaccctatccaatgatttcagcatggacaacatcagtgacagcggggcatccaatgagacaaccaatgccctccaggaaaattcactggctgatttttctctgccccagacaccacaaactgacaacccctcagagggccgaggagaaggcgtctccaagtcatttagtgatcatggtttctattccccttcctccacgctgggggactctccgtyggttgatgaccccttggagtatcaggctggcctcctggtgcagaatgccattcaacaagccatagccgagcaggtggataaagctgtgtccaaaaccagcagggatggagcagagcaacagggacctgaagcgactgtagargaagctgaagctgcggctttcggctcagaaragcctcagagcatgtttgagccacctcaggtgtcttctcctgttcaagagaaaagggatgtattaccaaagattctgcctgctgaagacagggyrctcagggaaagggggcccccccagccactgccagctgtgcagcccagtggcccgattaacatggaggagaccaggcccgaaggaagctatttcagcaagtactcggaggcagctgagctgagaagcacagcctccctcctggccactcaagaatctgacgtgatggttgggcctttcaagctgaggtccaggaaacagcggactttgtccatgattgaggaagagatccgagcagctcaggaaagggaagaggagctgaagaggcagagacaagtcttgcagagtacgcagagccccaggacaaagaatgccccatcrctgccctccagaacatgctacaaaactgctccagggaaaatagagaaagtcaaacctcctccatcccccaccactgaaggccccagcttgcagcctgacttagcccctgaagaggctgccggaacccagcggcccaagaatctgatgcagaccctcatggaagactatgagacacacaaatctaaaaggcgcgagagaatggatgatagtagttacacttctaagttactgtcttgcaaggtgacttccgaggtcctcgaggccacacgggttaatcgaagaaagagcgcactggctttgcgctgggaagcagggatctatgccaaccaggaggaagaagacaacgaataaacttccttcaacccaggaagcgtctttggtgcttgggagaccaagaaaccaagaaattaacaactgaaagcattttaatggactayttattaaagtgcaaacaaactcagcaatccttatgtagaccagaagctgcaatatacaatgatgaaaatgaaacgaaaaggaagtccccccatcagactctggacacccaggaatcaaaagagaaaggacttttttggtgactcaatcccagtgtctggtttggggccaatctacaatggatccaaaaggacaaaacatgttacaagcaaatcaacatagttgctgcaggcggaactgagaccagcctctctgggcgatgaaggacaatggtggtagggccacttagagagcagtagggcccaggctggtgcagcctacatggcacaggatatttccctgcaccagtttcccacctgtcacttgcagcatcagagggtgttgcattaactccattttctccagcagccataaaatgaatggcgtttctctccatatttgcccagaagaggcagttatgattccacttctcctacatttaattatttttaattgagaacaactcatgatcacaattcataaaatccatattttaagacaatagttcttcatgtcacaaacacaatctattctacatgaggaggctgagaaaggggaagagaaaaacaaaccaaatggatgatgttagctttaggatcgtgtctgcttataatattcactgatctgcagtttatgagaacacattttcacagttatgtttcttcataggaaaactatatttagtgggcaacaactatttttatgatgggatgggggagtatatacacgtatagaatctgtacgcrttgaacaacttggttcaagatggtgggggcatttttagagcggcaataattgaaaaaaaaggcgaactctgccttggagaggtagatgataagaaataaaaaggtgtttataactattttgtattataaagtgggccttagagataggaagaagaatgatggattccttttggatcaatcagaaaggaaacacgaaagaaaagtcaggaaggtagagagagaaaaagggagggaaggagaaagaatgggaataaaataaggaggtaagagatactatttttgctgagcaaccagtgtgtttcaggatgatacaaagaaaaatatagaatagaaataagtgcaggcttggaatcagctacaaatcctaaagatggggtgtgtgtggatgtgtgtgtgtgtgtgtgtacaccattgtgtgtttgtaaaatgtgtatgttcatgagtaagggtgtgtgtgtgtgtgtattaaaattccagagtgaccgtggcacttgggtgtacaggtaattcctccagagctgtttgctggcttcaggagtggagtgagaatttcttttttatgaaaagggatataaaggcaccgagctgatgcagtatttgtaatattaagttgacctaacaaggtatttgcatgagtcacaattacaaagttttgagcggttttgtaatttgacatttaggaragtctcctatttattctcatactttacattcatgcttagtatactatagaggatgccagctttaatctttctgtcatttaaagcaatatgataagggtattcaataattgggtgccctaaatttctggatgagaaaattttcaattctggccatgagaaagaaaaaaaaataaacagccttctttttttttcctttgttttaaaactgtggttttttaaaaaagcaataattaactcagacctcactaaaaatcatttttgtttttatattgttatgtcataagctctattatgttattctaacaagtagcaatttcacaaaatttgtatgtagatgttaacgcacatttcctttgcttcttttattagactagtgttgactttggggggggacatttattcacaaatgagaagtaggcacaaagtaaaaaatggaaccatctactaacaaggatcctttaaaactgccaagggagctctaacttgaagccacatcctacagatggcagcccaaatagcacatgggcaattggcaccatctttatatggttgagtctcctgaatattttgaatgaattctcaacaaaatgtgctagccactggggacgcaaaacaagtaagatccctgttgcaagaaattcattttatagtgagggaggttggcatggagactaaaattctcaggaaaatgagatccgtgttagattagaagtcctgatgtgaaatgggaggactcaggaaggaggatcgtctttacctgaggatttctagccagaggtcccagatgcctgggctgagaacccagcgataagggggcgttcccaaagcagacacagggataagaacagaggaggcagcagcattgcacagccccaggcacagtggcagttaggatggctggagagtaggatagttctatgggttgcccaaaaaatgtgatgygcttcaygttttctctgactcatggatctggtagagaccatagacatgatatagactaacttccccatttttcacaagaggaaaccatccttatgacttaccttaaagttttttgttctgttttgaaggaaaccatgtgcttcatgaaacctacagttgacaagagaatgtacagctaagagaaaagcttaagaggccacactattcgcggaatggctttagaggcagatgaagtggtctttgaccacagttgattgaaccagagcacttattgcttaaagaataacagagttctagagctgggggttcttgggccatgctccgtgtgtggataaggaaagaaatactgtttctgggactctcccacagtcacaaagctgttttcactgtggcccctacatctcttaacttttgctattactcctatgctgccttccggattactgctgtctatcttcttgctccactcactgaagatcctattataatcccatgaaaatgtaaattacagtttacttgggagagccagattttctctgtgctcttgagttttttattcattcaagaaaccttgggccaccgctttgtacatagcaccgtgctaggctctgggatcccaaatggacccttttaactttctgaagatgggaccgtcccctggaggaaagtcattcctgcctaatccatcgagagaaagaggcttacgaaaaactttgcctctgatgctcagccccacccccaaatagcacacaagcttgttaaccccacctcttacaaaatgtttagattctgtaggtgttaaaagcctttctggaagtattgcattctgccgtgtttataggtgttcactttcctccagagctgattaactactgacatgacttggctttctcatccagaaattatggaaacagggtctgtcagtggcaggaggccgtgctgtgttttacttggatgacacaatgcagtttacttgcctcttcatacccatgcatgctgctcaccctagacaatgacatataagccgtatatagatcaatgtccacatatatatacacacacacatatatatatataaagtgtaacaaggaacactaaaacagtgttgattcttgtctctgaagacaaataattaaaccttttttttcccaactaaagaatggatttaattaaactatgtattgaaaaaaaagtagcctaagtgttagagatggtgaatatattccattttagttaaagaacaaatttcctgaattttaagcattcagtgagctgccaattttgattttgtgttgctctttacccaaattattttttctttgtttttctttttttgggggaggaggggaaaaaagcagcaatactgtgtttggaaattatactctgtatctggttttcctgtgtatgttaaccacttaaatgttattatcctgctttggttttagagtgattgtgaggcattcaatgcaagtatacagttattttctcattaaaatccaatgtgtgttgagtttttataaataatggc

SEQ ID NO: 310 - DNA, 7976 bp, Homo sapiens
cgcggccagtgcactcggctccgggagaggcgagcagcgccggtgagccccgcagcagcgcacccggccgcggagccccgcgatggagatggcagaggcggaattgcacaaggaaaggctgcaagccatagcagaaaaaagaaagaggcagactgaaatagaaggcaagcgacaacagcttgacgagcagatacttctgctgcagcattccaagtccaaagtgcttcgggagaaatggctgctgcagggcatacccgctggaactgccgaagaggaggaagccaggaggcggcagtctgaagaggatgagttcagagtcaagcaacttgaagataacattcagaggctggagcaagaaatacaaacgctagaaagtgaagagtcccagatatctgccaaagagcaaatcatcctagagaaactgaaggaaacagaaaaatccttcaaggactttcagaagggtttctccagtacggatggagatgcagtaaattacatttcctcccagcttcccgacctgccaatcctctgttcacgaacagcagaaccatcacctgggcaggacgggaccagcagagcggctgctgtgtacgccatggaaattaatgtggagaaagacaaacaaacaggagagaccaagattctctctacatctaccattggcccagagggggtccatcagaaaggagtcaaagtctatgatgatggtaccaaagtagtgtatgaggtgcgctcaggaggcaccgtagtagaaaatggagtgcacaaattaagcacaaaggatgtagaagagcttattcagaaggctggacaatcaagcttaggaggagggcacgtgtctgaaaggactgtgattgcagatgggagcctcagccatcccaaggaacacatgctctgcaaagaagctaagttagaaatggtacataagtctaggaaagaccattcttccgggaacccagggcagcaggcccaagcccccagcgctgcagggccggaggcaaacttggatcagcccgtcaccatgatttttatgggctaccaaaatatcgaggatgaagaggagacgaaaaaggtgctaggctatgatgaaaccatcaaggctgaattggtcctcattgatgaagatgatgagaagtcattgagggagaagacagtgacggacgtgtccactattgacgggaacgyggctgagcttgtgtccgggaggccggtctcagacaccacagagccctcatccccagaagggaaggaagagagcctagctacagagccagccccaggagtcgggtgggagaatgtgctgctaaaggaaggtgagtcagcctcgaacgccacagaaacatccggcccagacatgactatcaagaagcctccccagctttctgaggatgatatctggctaaaaagcgagggagacaactatagtgccaccctcctggagcctgctgccagctctctttccccagatcacaaaaacatggaaattgaggtgtctgttgcagaatgtaaaagtgttcctggaatcacctctaccccacatcccatggaccatccctccgctttctattcacccccgcataatggcctccttactgatcaccacgaatccctggataatgatgttgccagagagatccgctatctagatgaggtgctagaggccaactrctgtgattctgctgtggatggaacgtacaatggaacatcctccccagagcctggtgcagtggttctggtgggcggcctaagcccccctgtccacgaggcgacccagccagaacccactgaaagaacagctagccrgcaggcacctcctcacatcgagctcagtaatagcagccctgaccccatggcagaggcagaaagaacaaatggccattcccccagccagcctagagatgcgctgggggacagcctgcaggtgcctgtcagccccagctccacaaccagctcacggtgttcttcccgagatggagagttcactctcaccacactgaaaaaggaggccaagtttgagctgcgtgccttccatgaggacaagaagccctccaagctctttgaggatgacgagcatgagaaagaacaatactgcattagaaaagtgaggccttcagaggagatgctggagctggaaaaggagaggagagagctcatccgcagccaggccgtcaagaagaatcctggcattgcagcaaaatggtggaatcccccgcaggaaaaaaccatcgaggagcagctggacgaggaacatctggagtcgcacaaaaagtacaaggagcgcaaagagagaagggcacagcaggaacagttgctgctgcagmagcagttacagcagcagcagcagcagcccccatcgcagctctgcacagcccctgcctcttctcatgaacgcgcaagcatgattgacaaagcaaaggaggacattgtcacagagcagatagatttctctgctgctcgcaaacaatttcagctgatggagaattccaggcaagcrgtggccaagggccagagtacacccaggctgttctccatcaagcctttctacaggcctctggggtcagtcaactcagacaagccactgactaatccgagaccaccttctgtcgggggacctccagaagacagtggtgcctcagccgccaagggacagaaatcccccggtgccctggagaccccatcggcagcaggaagccagggcaacacagcctctcaggggaaggaagggccctacagcgagccttctaaacgtgggcccttatctaaactgtgggctgaggatggagaatttacgagcgcccgggctgtcctcactgtggtcaaggatgatgaccatgggattttggatcagttctcaagatctgtcaatgtctccttgacccaagaggagcttgactctggtctggacgaattgtcggtgaggtctcaggataccacagtcctggagaccctatccaatgatttcagcatggacaacatcagtgacagcggggcatccaatgagacaaccaatgccctccaggaaaattcactggctgatttttctctgccccagacaccacaaactgacaacccctcagagggccgaggagaaggcgtctccaagtcatttagtgatcatggtttctattccccttcctccacgctgggggactctccgtyggttgatgaccccttggagtatcaggctggcctcctggtgcagaatgccattcaacaagccatagccgagcaggtggataaagctgtgtccaaaaccagcagggatggagcagagcaacagggacctgaagcgactgtagargaagctgaagctgcggctttcggctcagaaragcctcagagcatgtttgagccacctcaggtgtcttctcctgttcaagagaaaagggatgtattaccaaagattctgcctgctgaagacagggyrctcagggaaagggggcccccccagccactgccagctgtgcagcccagtggcccgattaacatggaggagaccaggcccgaaggaagctatttcagcaagtactcggaggcagctgagctgagaagcacagcctccctcctggccactcaagaatctgacgtgatggttgggcctttcaagctgaggtccaggaaacagcggactttgtccatgattgaggaagagatccgagcagctcaggaaagggaagaggagctgaagaggcagagacaagtcttgcagagtacgcagagccccaggacaaagaatgccccatcrctgccctccagaacatgctacaaaactgctccagggaaaatagagaaagtcaaacctcctccatcccccaccactgaaggccccagcttgcagcctgacttagcccctgaagaggctgccggaacccagcggcccaagaatctgatgcagaccctcatggaagactatgagacacacaaatctaaaaggcgcgagagaatggatgatagtagttacacttctaagttactgtcttgcaaggtgacttccgaggtcctcgaggccacacgggttaatcgaagaaagagcgcactggctttgcgctgggaagcagggatctatgccaaccaggaggaagaagacaacgaataaacttccttcaacccaggaagcgtctttggtgcttgggagaccaagaaaccaagaaattaacaactgaaagcattttaatggactayttattaaagtgcaaacaaactcagcaatccttatgtagaccagaagctgcaatatacaatgatgaaaatgaaacgaaaaggaagtccccccatcagactctggacacccaggaatcaaaagagaaaggacttttttggtgactcaatcccagtgtctggtttggggccaatctacaatggatccaaaaggacaaaacatgttacaagcaaatcaacatagttgctgcaggcggaactgagaccagcctctctgggcgatgaaggacaatggtggtagggccacttagagagcagtagggcccaggctggtgcagcctacatggcacaggatatttccctgcaccagtttcccacctgtcacttgcagcatcagagggtgttgcattaactccattttctccagcagccataaaatgaatggcgtttctctccatatttgcccagaagaggcagttatgattccacttctcctacatttaattatttttaattgagaacaactcatgatcacaattcataaaatccatattttaagacaatagttcttcatgtcacaaacacaatctattctacatgaggaggctgagaaaggggaagagaaaaacaaaccaaatggatgatgttagctttaggatcgtgtctgcttataatattcactgatctgcagtttatgagaacacattttcacagttatgtttcttcataggaaaactatatttagtgggcaacaactatttttatgatgggatgggggagtatatacacgtatagaatctgtacgcrttgaacaacttggttcaagatggtgggggcatttttagagcggcaataattgaaaaaaaaggcgaactctgccttggagaggtagatgataagaaataaaaaggtgtttataactattttgtattataaagtgggccttagagataggaagaagaatgatggattccttttggatcaatcagaaaggaaacacgaaagaaaagtcaggaaggtagagagagaaaaagggagggaaggagaaagaatgggaataaaataaggaggtaagagatactatttttgctgagcaaccagtgtgtttcaggatgatacaaagaaaaatatagaatagaaataagtgcaggcttggaatcagctacaaatcctaaagatggggtgtgtgtggatgtgtgtgtgtgtgtgtgtacaccattgtgtgtttgtaaaatgtgtatgttcatgagtaagggtgtgtgtgtgtgtgtattaaaattccagagtgaccgtggcacttgggtgtacaggtaattcctccagagctgtttgctggcttcaggagtggagtgagaatttcttttttatgaaaagggatataaaggcaccgagctgatgcagtatttgtaatattaagttgacctaacaaggtatttgcatgagtcacaattacaaagttttgagcggttttgtaatttgacatttaggaragtctcctatttattctcatactttacattcatgcttagtatactatagaggatgccagctttaatctttctgtcatttaaagcaatatgataagggtattcaataattgggtgccctaaatttctggatgagaaaattttcaattctggccatgagaaagaaaaaaaaataaacagccttctttttttttcctttgttttaaaactgtggttttttaaaaaagcaataattaactcagacctcactaaaaatcatttttgtttttatattgttatgtcataagctctattatgttattctaacaagtagcaatttcacaaaatttgtatgtagatgttaacgcacatttcctttgcttcttttattagactagtgttgactttggggggggacatttattcacaaatgagaagtaggcacaaagtaaaaaatggaaccatctactaacaaggatcctttaaaactgccaagggagctctaacttgaagccacatcctacagatggcagcccaaatagcacatgggcaattggcaccatctttatatggttgagtctcctgaatattttgaatgaattctcaacaaaatgtgctagccactggggacgcaaaacaagtaagatccctgttgcaagaaattcattttatagtgagggaggttggcatggagactaaaattctcaggaaaatgagatccgtgttagattagaagtcctgatgtgaaatgggaggactcaggaaggaggatcgtctttacctgaggatttctagccagaggtcccagatgcctgggctgagaacccagcgataagggggcgttcccaaagcagacacagggataagaacagaggaggcagcagcattgcacagccccaggcacagtggcagttaggatggctggagagtaggatagttctatgggttgcccaaaaaatgtgatgygcttcaygttttctctgactcatggatctggtagagaccatagacatgatatagactaacttccccatttttcacaagaggaaaccatccttatgacttaccttaaagttttttgttctgttttgaaggaaaccatgtgcttcatgaaacctacagttgacaagagaatgtacagctaagagaaaagcttaagaggccacactattcgcggaatggctttagaggcagatgaagtggtctttgaccacagttgattgaaccagagcacttattgcttaaagaataacagagttctagagctgggggttcttgggccatgctccgtgtgtggataaggaaagaaatactgtttctgggactctcccacagtcacaaagctgttttcactgtggcccctacatctcttaacttttgctattactcctatgctgccttccggattactgctgtctatcttcttgctccactcactgaagatcctattataatcccatgaaaatgtaaattacagtttacttgggagagccagattttctctgtgctcttgagttttttattcattcaagaaaccttgggccaccgctttgtacatagcaccgtgctaggctctgggatcccaaatggacccttttaactttctgaagatgggaccgtcccctggaggaaagtcattcctgcctaatccatcgagagaaagaggcttacgaaaaactttgcctctgatgctcagccccacccccaaatagcacacaagcttgttaaccccacctcttacaaaatgtttagattctgtaggtgttaaaagcctttctggaagtattgcattctgccgtgtttataggtgttcactttcctccagagctgattaactactgacatgacttggctttctcatccagaaattatggaaacagggtctgtcagtggcaggaggccgtgctgtgttttacttggatgacacaatgcagtttacttgcctcttcatacccatgcatgctgctcaccctagacaatgacatataagccgtatatagatcaatgtccacatatatatacacacacacatatatatatataaagtgtaacaaggaacactaaaacagtgttgattcttgtctctgaagacaaataattaaaccttttttttcccaactaaagaatggatttaattaaactatgtattgaaaaaaaagtagcctaagtgttagagatggtgaatatattccattttagttaaagaacaaatttcctgaattttaagcattcagtgagctgccaattttgattttgtgttgctctttacccaaattattttttctttgttatactctgtatctggttttcctgtgtatgttaaccacttaaatgttattatcctgctttggt

SEQ ID NO: 311 - DNA, 7241 bp, Homo sapiens
cgcggccagtgcactcggctccgggagaggcgagcagcgccggtgagccccgcagcagcgcacccggccgcggagccccgcgatggagatggcagaggcggaattgcacaaggaaaggctgcaagccatagcagaaaaaagaaagaggcagactgaaatagaaggcaagcgacaacagcttgacgagcagatacttctgctgcagcattccaagtccaaagtgcttcgggagaaatggctgctgcagggcatacccgctggaactgccgaagaggaggaagccaggaggcggcagtctgaagaggatgagttcagagtcaagcaacttgaagataacattcagaggctggagcaagaaatacaaacgctagaaagtgaagagtcccagatatctgccaaagagcaaatcatcctagagaaactgaaggaaacagaaaaatccttcaaggactttcagaagggtttctccagtacggatggagatgcagtaaattacatttcctcccagcttcccgacctgccaatcctctgttcacgaacagcagaaccatcacctgggcaggacgggaccagcagagcggctggagtcgggtgggagaatgtgctgctaaaggaaggtgagtcagcctcgaacgccacagaaacatccggcccagacatgactatcaagaagcctccccagctttctgaggatgatatctggctaaaaagcgagggagacaactatagtgccaccctcctggagcctgctgccagctctctttccccagatcacaaaaacatggaaattgaggtgtctgttgcagaatgtaaaagtgttcctggaatcacctctaccccacatcccatggaccatccctccgctttctattcacccccgcataatggcctccttactgatcaccacgaatccctggataatgatgttgccagagagatccgctatctagatgaggtgctagaggccaactrctgtgattctgctgtggatggaacgtacaatggaacatcctccccagagcctggtgcagtggttctggtgggcggcctaagcccccctgtccacgaggcgacccagccagaacccactgaaagaacagctagccrgcaggcacctcctcacatcgagctcagtaatagcagccctgaccccatggcagaggcagaaagaacaaatggccattcccccagccagcctagagatgcgctgggggacagcctgcaggtgcctgtcagccccagctccacaaccagctcacggtgttcttcccgagatggagagttcactctcaccacactgaaaaaggaggccaagtttgagctgcgtgccttccatgaggacaagaagccctccaagctctttgaggatgacgagcatgagaaagaacaatactgcattagaaaagtgaggccttcagaggagatgctggagctggaaaaggagaggagagagctcatccgcagccaggccgtcaagaagaatcctggcattgcagcaaaatggtggaatcccccgcaggaaaaaaccatcgaggagcagctggacgaggaacatctggagtcgcacaaaaagtacaaggagcgcaaagagagaagggcacagcaggaacagttgctgctgcagmagcagttacagcagcagcagcagcagcccccatcgcagctctgcacagcccctgcctcttctcatgaacgcgcaagcatgattgacaaagcaaaggaggacattgtcacagagcagatagatttctctgctgctcgcaaacaatttcagctgatggagaattccaggcaagcrgtggccaagggccagagtacacccaggctgttctccatcaagcctttctacaggcctctggggtcagtcaactcagacaagccactgactaatccgagaccaccttctgtcgggggacctccagaagacagtggtgcctcagccgccaagggacagaaatcccccggtgccctggagaccccatcggcagcaggaagccagggcaacacagcctctcaggggaaggaagggccctacagcgagccttctaaacgtgggcccttatctaaactgtgggctgaggatggagaatttacgagcgcccgggctgtcctcactgtggtcaaggatgatgaccatgggattttggatcagttctcaagatctgtcaatgtctccttgacccaagaggagcttgactctggtctggacgaattgtcggtgaggtctcaggataccacagtcctggagaccctatccaatgatttcagcatggacaacatcagtgacagcggggcatccaatgagacaaccaatgccctccaggaaaattcactggctgatttttctctgccccagacaccacaaactgacaacccctcagagggccgaggagaaggcgtctccaagtcatttagtgatcatggtttctattccccttcctccacgctgggggactctccgtyggttgatgaccccttggagtatcaggctggcctcctggtgcagaatgccattcaacaagccatagccgagcaggtggataaagctgtgtccaaaaccagcagggatggagcagagcaacagggacctgaagcgactgtagargaagctgaagctgcggctttcggctcagaaragcctcagagcatgtttgagccacctcaggtgtcttctcctgttcaagagaaaagggatgtattaccaaagattctgcctgctgaagacagggyrctcagggaaagggggcccccccagccactgccagctgtgcagcccagtggcccgattaacatggaggagaccaggcccgaaggaagctatttcagcaagtactcggaggcagctgagctgagaagcacagcctccctcctggccactcaagaatctgacgtgatggttgggcctttcaagctgaggtccaggaaacagcggactttgtccatgattgaggaagagatccgagcagctcaggaaagggaagaggagctgaagaggcagagacaagtcttgcagagtacgcagagccccaggacaaagaatgccccatcrctgccctccagaacatgctacaaaactgctccagggaaaatagagaaagtcaaacctcctccatcccccaccactgaaggccccagcttgcagcctgacttagcccctgaagaggctgccggaacccagcggcccaagaatctgatgcagaccctcatggaagactatgagacacacaaatctaaaaggcgcgagagaatggatgatagtagtgtcctcgaggccacacgggttaatcgaagaaagagcgcactggctttgcgctgggaagcagggatctatgccaaccaggaggaagaagacaacgaataaacttccttcaacccaggaagcgtctttggtgcttgggagaccaagaaaccaagaaattaacaactgaaagcattttaatggactayttattaaagtgcaaacaaactcagcaatccttatgtagaccagaagctgcaatatacaatgatgaaaatgaaacgaaaaggaagtccccccatcagactctggacacccaggaatcaaaagagaaaggacttttttggtgactcaatcccagtgtctggtttggggccaatctacaatggatccaaaaggacaaaacatgttacaagcaaatcaacatagttgctgcaggcggaactgagaccagcctctctgggcgatgaaggacaatggtggtagggccacttagagagcagtagggcccaggctggtgcagcctacatggcacaggatatttccctgcaccagtttcccacctgtcacttgcagcatcagagggtgttgcattaactccattttctccagcagccataaaatgaatggcgtttctctccatatttgcccagaagaggcagttatgattccacttctcctacatttaattatttttaattgagaacaactcatgatcacaattcataaaatccatattttaagacaatagttcttcatgtcacaaacacaatctattctacatgaggaggctgagaaaggggaagagaaaaacaaaccaaatggatgatgttagctttaggatcgtgtctgcttataatattcactgatctgcagtttatgagaacacattttcacagttatgtttcttcataggaaaactatatttagtgggcaacaactatttttatgatgggatgggggagtatatacacgtatagaatctgtacgcrttgaacaacttggttcaagatggtgggggcatttttagagcggcaataattgaaaaaaaaggcgaactctgccttggagaggtagatgataagaaataaaaaggtgtttataactattttgtattataaagtgggccttagagataggaagaagaatgatggattccttttggatcaatcagaaaggaaacacgaaagaaaagtcaggaaggtagagagagaaaaagggagggaaggagaaagaatgggaataaaataaggaggtaagagatactatttttgctgagcaaccagtgtgtttcaggatgatacaaagaaaaatatagaatagaaataagtgcaggcttggaatcagctacaaatcctaaagatggggtgtgtgtggatgtgtgtgtgtgtgtgtgtacaccattgtgtgtttgtaaaatgtgtatgttcatgagtaagggtgtgtgtgtgtgtgtattaaaattccagagtgaccgtggcacttgggtgtacaggtaattcctccagagctgtttgctggcttcaggagtggagtgagaatttcttttttatgaaaagggatataaaggcaccgagctgatgcagtatttgtaatattaagttgacctaacaaggtatttgcatgagtcacaattacaaagttttgagcggttttgtaatttgacatttaggaragtctcctatttattctcatactttacattcatgcttagtatactatagaggatgccagctttaatctttctgtcatttaaagcaatatgataagggtattcaataattgggtgccctaaatttctggatgagaaaattttcaattctggccatgagaaagaaaaaaaaataaacagccttctttttttttcctttgttttaaaactgtggttttttaaaaaagcaataattaactcagacctcactaaaaatcatttttgtttttatattgttatgtcataagctctattatgttattctaacaagtagcaatttcacaaaatttgtatgtagatgttaacgcacatttcctttgcttcttttattagactagtgttgactttggggggggacatttattcacaaatgagaagtaggcacaaagtaaaaaatggaaccatctactaacaaggatcctttaaaactgccaagggagctctaacttgaagccacatcctacagatggcagcccaaatagcacatgggcaattggcaccatctttatatggttgagtctcctgaatattttgaatgaattctcaacaaaatgtgctagccactggggacgcaaaacaagtaagatccctgttgcaagaaattcattttatagtgagggaggttggcatggagactaaaattctcaggaaaatgagatccgtgttagattagaagtcctgatgtgaaatgggaggactcaggaaggaggatcgtctttacctgaggatttctagccagaggtcccagatgcctgggctgagaacccagcgataagggggcgttcccaaagcagacacagggataagaacagaggaggcagcagcattgcacagccccaggcacagtggcagttaggatggctggagagtaggatagttctatgggttgcccaaaaaatgtgatgygcttcaygttttctctgactcatggatctggtagagaccatagacatgatatagactaacttccccatttttcacaagaggaaaccatccttatgacttaccttaaagttttttgttctgttttgaaggaaaccatgtgcttcatgaaacctacagttgacaagagaatgtacagctaagagaaaagcttaagaggccacactattcgcggaatggctttagaggcagatgaagtggtctttgaccacagttgattgaaccagagcacttattgcttaaagaataacagagttctagagctgggggttcttgggccatgctccgtgtgtggataaggaaagaaatactgtttctgggactctcccacagtcacaaagctgttttcactgtggcccctacatctcttaacttttgctattactcctatgctgccttccggattactgctgtctatcttcttgctccactcactgaagatcctattataatcccatgaaaatgtaaattacagtttacttgggagagccagattttctctgtgctcttgagttttttattcattcaagaaaccttgggccaccgctttgtacatagcaccgtgctaggctctgggatcccaaatggacccttttaactttctgaagatgggaccgtcccctggaggaaagtcattcctgcctaatccatcgagagaaagaggcttacgaaaaactttgcctctgatgctcagccccacccccaaatagcacacaagcttgttaaccccacctcttacaaaatgtttagattctgtaggtgttaaaagcctttctggaagtattgcattctgccgtgtttataggtgttcactttcctccagagctgattaactactgacatgacttggctttctcatccagaaattatggaaacagggtctgtcagtggcaggaggccgtgctgtgttttacttggatgacacaatgcagtttacttgcctcttcatacccatgcatgctgctcaccctagacaatgacatataagccgtatatagatcaatgtccacatatatatacacacacacatatatatatataaagtgtaacaaggaacactaaaacagtgttgattcttgtctctgaagacaaataattaaaccttttttttcccaactaaagaatggatttaattaaactatgtattgaaaaaaaagtagcctaagtgttagagatggtgaatatattccattttagttaaagaacaaatttcctgaattttaagcattcagtgagctgccaattttgattttgtgttgctctttacccaaattattttttctttgttatactctgtatctggttttcctgtgtatgttaaccacttaaatgttattatcctgctttggt

SEQ ID NO: 312 - DNA, 8554 bp, Homo sapiens
tcttacatccagtccaggacctgtcacaaaagactcacattagtaccacatggtatcctgttttagtaaagaataggtgaaatattttagtgagtagatcctacttttcctttcagatgcaatgaacagaagaccctgaaaggatttcaatccagaatgtcacaggataataagagcagatgtctgtgatgccctttacaaagcacctttacatactgtctctcattcgtctctaatgacacctatgtgatcctccattttttcagatgaggaaactgaggttcagagtgattaagcgagttgcctgagatttcacagctaacacattgtgaaatctagtctagcacccaggactaaaaactctcggcttcttttaaggccacatatcgcctcaccagaagggtggcctctctggagatataccctaccctcggccgacttgatattgagaacttggtcatcttaagcatgtgggccacttgggcaaggcagcccttcccaaattgtaaatgtccccacgtggagctcaagcgtctggcttgagccagaaggtgccctgaacactcggtggccccagcccccacgtaacagcacgtgctcgggtcccacattcggtcagacgcccctctccactggcatctgcccggtggaggcgccactgcgctctgcctccgccccagcaagcgcgtgtccacgcgggcgcgccacgccagccgtgcgccccagcggctcgccgtgcgcccgcgccccaggtgcccactggctcgcgcgccctccgtctgcgccttggagacccgcggcggcgatcgctcggagccgccttggaccgcggcctcgggtccatcacactccaggggcggagcgaggcaccgagacgtcagggcggagaactagcgccgggctagcgcgccctcccggcggctgccggcgtcccacgtcctcggctggcgcggccggcggcggcggcgaccgggagatgcagtgagcggcggcgctggggcgcagccaggcggccgggagggcgggggccagaggctgagcccgggcgagcccgccgtgcgcacagctctgcccgccgcccctggagcggatccccagccgtccctgggcgttctcccgggttctagcaaagccccccggggtgcccatcagtttccttgggtgactacagcgtgtgttttttcyttcctctttcccctgcctgtgtgcccttctccaggatggcagaggcggaattgcacaaggaaaggctgcaagccatagcagaaaaaagaaagaggcagactgaaatagaaggcaagcgacaacagcttgacgagcagatacttctgctgcagcattccaagtccaaagtgcttcgggagaaatggctgctgcagggcatacccgctggaactgccgaagaggaggaagccaggaggcggcagtctgaagaggatgagttcagagtcaagcaacttgaagataacattcagaggctggagcaagaaatacaaacgctagaaagtgaagagtcccagatatctgccaaagagcaaatcatcctagagaaactgaaggaaacagaaaaatccttcaaggactttcagaagggtttctccagtacggatggagatgcagtaaattacatttcctcccagcttcccgacctgccaatcctctgttcacgaacagcagaaccatcacctgggcaggacgggaccagcagagcggctggagtcgggtgggagaatgtgctgctaaaggaaggtgagtcagcctcgaacgccacagaaacatccggcccagacatgactatcaagaagcctccccagctttctgaggatgatatctggctaaaaagcgagggagacaactatagtgccaccctcctggagcctgctgccagctctctttccccagatcacaaaaacatggaaattgaggtgtctgttgcagaatgtaaaagtgttcctggaatcacctctaccccacatcccatggaccatccctccgctttctattcacccccgcataatggcctccttactgatcaccacgaatccctggataatgatgttgccagagagatccgctatctagatgaggtgctagaggccaactrctgtgattctgctgtggatggaacgtacaatggaacatcctccccagagcctggtgcagtggttctggtgggcggcctaagcccccctgtccacgaggcgacccagccagaacccactgaaagaacagctagccrgcaggcacctcctcacatcgagctcagtaatagcagccctgaccccatggcagaggcagaaagaacaaatggccattcccccagccagcctagagatgcgctgggggacagcctgcaggtgcctgtcagccccagctccacaaccagctcacggtgttcttcccgagatggagagttcactctcaccacactgaaaaaggaggccaagtttgagctgcgtgccttccatgaggacaagaagccctccaagctctttgaggatgacgagcatgagaaagaacaatactgcattagaaaagtgaggccttcagaggagatgctggagctggaaaaggagaggagagagctcatccgcagccaggccgtcaagaagaatcctggcattgcagcaaaatggtggaatcccccgcaggaaaaaaccatcgaggagcagctggacgaggaacatctggagtcgcacaaaaagtacaaggagcgcaaagagagaagggcacagcaggaacagttgctgctgcagmagcagttacagcagcagcagcagcagcccccatcgcagctctgcacagcccctgcctcttctcatgaacgcgcaagcatgattgacaaagcaaaggaggacattgtcacagagcagatagatttctctgctgctcgcaaacaatttcagctgatggagaattccaggcaagcrgtggccaagggccagagtacacccaggctgttctccatcaagcctttctacaggcctctggggtcagtcaactcagacaagccactgactaatccgagaccaccttctgtcgggggacctccagaagacagtggtgcctcagccgccaagggacagaaatcccccggtgccctggagaccccatcggcagcaggaagccagggcaacacagcctctcaggggaaggaagggccctacagcgagccttctaaacgtgggcccttatctaaactgtgggctgaggatggagaatttacgagcgcccgggctgtcctcactgtggtcaaggatgatgaccatgggattttggatcagttctcaagatctgtcaatgtctccttgacccaagaggagcttgactctggtctggacgaattgtcggtgaggtctcaggataccacagtcctggagaccctatccaatgatttcagcatggacaacatcagtgacagcggggcatccaatgagacaaccaatgccctccaggaaaattcactggctgatttttctctgccccagacaccacaaactgacaacccctcagagggccgaggagaaggcgtctccaagtcatttagtgatcatggtttctattccccttcctccacgctgggggactctccgtyggttgatgaccccttggagtatcaggctggcctcctggtgcagaatgccattcaacaagccatagccgagcaggtggataaagctgtgtccaaaaccagcagggatggagcagagcaacagggacctgaagcgactgtagargaagctgaagctgcggctttcggctcagaaragcctcagagcatgtttgagccacctcaggtgtcttctcctgttcaagagaaaagggatgtattaccaaagattctgcctgctgaagacagggyrctcagggaaagggggcccccccagccactgccagctgtgcagcccagtggcccgattaacatggaggagaccaggcccgaaggaagctatttcagcaagtactcggaggcagctgagctgagaagcacagcctccctcctggccactcaagaatctgacgtgatggttgggcctttcaagctgaggtccaggaaacagcggactttgtccatgattgaggaagagatccgagcagctcaggaaagggaagaggagctgaagaggcagagacaagtcttgcagagtacgcagagccccaggacaaagaatgccccatcrctgccctccagaacatgctacaaaactgctccagggaaaatagagaaagtcaaacctcctccatcccccaccactgaaggccccagcttgcagcctgacttagcccctgaagaggctgccggaacccagcggcccaagaatctgatgcagaccctcatggaagactatgagacacacaaatctaaaaggcgcgagagaatggatgatagtagttacacttctaagttactgtcttgcaaggtgacttccgaggtcctcgaggccacacgggttaatcgaagaaagagcgcactggctttgcgctgggaagcagggatctatgccaaccaggaggaagaagacaacgaataaacttccttcaacccaggaagcgtctttggtgcttgggagaccaagaaaccaagaaattaacaactgaaagcattttaatggactayttattaaagtgcaaacaaactcagcaatccttatgtagaccagaagctgcaatatacaatgatgaaaatgaaacgaaaaggaagtccccccatcagactctggacacccaggaatcaaaagagaaaggacttttttggtgactcaatcccagtgtctggtttggggccaatctacaatggatccaaaaggacaaaacatgttacaagcaaatcaacatagttgctgcaggcggaactgagaccagcctctctgggcgatgaaggacaatggtggtagggccacttagagagcagtagggcccaggctggtgcagcctacatggcacaggatatttccctgcaccagtttcccacctgtcacttgcagcatcagagggtgttgcattaactccattttctccagcagccataaaatgaatggcgtttctctccatatttgcccagaagaggcagttatgattccacttctcctacatttaattatttttaattgagaacaactcatgatcacaattcataaaatccatattttaagacaatagttcttcatgtcacaaacacaatctattctacatgaggaggctgagaaaggggaagagaaaaacaaaccaaatggatgatgttagctttaggatcgtgtctgcttataatattcactgatctgcagtttatgagaacacattttcacagttatgtttcttcataggaaaactatatttagtgggcaacaactatttttatgatgggatgggggagtatatacacgtatagaatctgtacgcrttgaacaacttggttcaagatggtgggggcatttttagagcggcaataattgaaaaaaaaggcgaactctgccttggagaggtagatgataagaaataaaaaggtgtttataactattttgtattataaagtgggccttagagataggaagaagaatgatggattccttttggatcaatcagaaaggaaacacgaaagaaaagtcaggaaggtagagagagaaaaagggagggaaggagaaagaatgggaataaaataaggaggtaagagatactatttttgctgagcaaccagtgtgtttcaggatgatacaaagaaaaatatagaatagaaataagtgcaggcttggaatcagctacaaatcctaaagatggggtgtgtgtggatgtgtgtgtgtgtgtgtgtacaccattgtgtgtttgtaaaatgtgtatgttcatgagtaagggtgtgtgtgtgtgtgtattaaaattccagagtgaccgtggcacttgggtgtacaggtaattcctccagagctgtttgctggcttcaggagtggagtgagaatttcttttttatgaaaagggatataaaggcaccgagctgatgcagtatttgtaatattaagttgacctaacaaggtatttgcatgagtcacaattacaaagttttgagcggttttgtaatttgacatttaggaragtctcctatttattctcatactttacattcatgcttagtatactatagaggatgccagctttaatctttctgtcatttaaagcaatatgataagggtattcaataattgggtgccctaaatttctggatgagaaaattttcaattctggccatgagaaagaaaaaaaaataaacagccttctttttttttcctttgttttaaaactgtggttttttaaaaaagcaataattaactcagacctcactaaaaatcatttttgtttttatattgttatgtcataagctctattatgttattctaacaagtagcaatttcacaaaatttgtatgtagatgttaacgcacatttcctttgcttcttttattagactagtgttgactttggggggggacatttattcacaaatgagaagtaggcacaaagtaaaaaatggaaccatctactaacaaggatcctttaaaactgccaagggagctctaacttgaagccacatcctacagatggcagcccaaatagcacatgggcaattggcaccatctttatatggttgagtctcctgaatattttgaatgaattctcaacaaaatgtgctagccactggggacgcaaaacaagtaagatccctgttgcaagaaattcattttatagtgagggaggttggcatggagactaaaattctcaggaaaatgagatccgtgttagattagaagtcctgatgtgaaatgggaggactcaggaaggaggatcgtctttacctgaggatttctagccagaggtcccagatgcctgggctgagaacccagcgataagggggcgttcccaaagcagacacagggataagaacagaggaggcagcagcattgcacagccccaggcacagtggcagttaggatggctggagagtaggatagttctatgggttgcccaaaaaatgtgatgygcttcaygttttctctgactcatggatctggtagagaccatagacatgatatagactaacttccccatttttcacaagaggaaaccatccttatgacttaccttaaagttttttgttctgttttgaaggaaaccatgtgcttcatgaaacctacagttgacaagagaatgtacagctaagagaaaagcttaagaggccacactattcgcggaatggctttagaggcagatgaagtggtctttgaccacagttgattgaaccagagcacttattgcttaaagaataacagagttctagagctgggggttcttgggccatgctccgtgtgtggataaggaaagaaatactgtttctgggactctcccacagtcacaaagctgttttcactgtggcccctacatctcttaacttttgctattactcctatgctgccttccggattactgctgtctatcttcttgctccactcactgaagatcctattataatcccatgaaaatgtaaattacagtttacttgggagagccagattttctctgtgctcttgagttttttattcattcaagaaaccttgggccaccgctttgtacatagcaccgtgctaggctctgggatcccaaatggacccttttaactttctgaagatgggaccgtcccctggaggaaagtcattcctgcctaatccatcgagagaaagaggcttacgaaaaactttgcctctgatgctcagccccacccccaaatagcacacaagcttgttaaccccacctcttacaaaatgtttagattctgtaggtgttaaaagcctttctggaagtattgcattctgccgtgtttataggtgttcactttcctccagagctgattaactactgacatgacttggctttctcatccagaaattatggaaacagggtctgtcagtggcaggaggccgtgctgtgttttacttggatgacacaatgcagtttacttgcctcttcatacccatgcatgctgctcaccctagacaatgacatataagccgtatatagatcaatgtccacatatatatacacacacacatatatatatataaagtgtaacaaggaacactaaaacagtgttgattcttgtctctgaagacaaataattaaaccttttttttcccaactaaagaatggatttaattaaactatgtattgaaaaaaaagtagcctaagtgttagagatggtgaatatattccattttagttaaagaacaaatttcctgaattttaagcattcagtgagctgccaattttgattttgtgttgctctttacccaaattattttttctttgtttttctttttttgggggaggaggggaaaaaagcagcaatactgtgtttggaaattatactctgtatctggttttcctgtgtatgttaaccacttaaatgttattatcctgctttggttttagagtgattgtgaggcattcaatgcaagtatacagttattttctcattaaaatccaatgtgtgttgagtttttataaataatggc

SEQ ID NO: 313 - DNA, 2502 bp, Homo sapiens
tcttacatccagtccaggacctgtcacaaaagactcacattagtaccacatggtatcctgttttagtaaagaataggtgaaatattttagtgagtagatcctacttttcctttcagatgcaatgaacagaagaccctgaaaggatttcaatccagaatgtcacaggataataagagcagatgtctgtgatgccctttacaaagcacctttacatactgtctctcattcgtctctaatgacacctatgtgatcctccattttttcagatgaggaaactgaggttcagagtgattaagcgagttgcctgagatttcacagctaacacattgtgaaatctagtctagcacccaggactaaaaactctcggcttcttttaaggccacatatcgcctcaccagaagggtggcctctctggagatataccctaccctcggccgacttgatattgagaacttggtcatcttaagcatgtgggccacttgggcaaggcagcccttcccaaattgtaaatgtccccacgtggagctcaagcgtctggcttgagccagaaggtgccctgaacactcggtggccccagcccccacgtaacagcacgtgctcgggtcccacattcggtcagacgcccctctccactggcatctgcccggtggaggcgccactgcgctctgcctccgccccagcaagcgcgtgtccacgcgggcgcgccacgccagccgtgcgccccagcggctcgccgtgcgcccgcgccccaggtgcccactggctcgcgcgccctccgtctgcgccttggagacccgcggcggcgatcgctcggagccgccttggaccgcggcctcgggtccatcacactccaggggcggagcgaggcaccgagacgtcagggcggagaactagcgccgggctagcgcgccctcccggcggctgccggcgtcccacgtcctcggctggcgcggccggcggcggcggcgaccgggagatgcagtgagcggcggcgctggggcgcagccaggcggccgggagggcgggggccagaggctgagcccgggcgagcccgccgtgcgcacagctctgcccgccgcccctggagcggatccccagccgtccctgggcgttctcccgggttctagcaaagccccccggggtgcccatcagtttccttgggtgactacagcgtgtgttttttcyttcctctttcccctgcctgtgtgcccttctccaggatggcagaggcggaattgcacaaggaaaggctgcaagccatagcagaaaaaagaaagaggcagactgaaatagaaggcaagcgacaacagcttgacgagcagatacttctgctgcagcattccaagtccaaagtgcttcgggagaaatggctgctgcagggcatacccgctggaactgccgaagaggaggaagccaggaggcggcagtctgaagaggatgagttcagagtcaagcaacttgaagataacattcagaggctggagcaagaaatacaaacgctagaaagtgaagagtcccagatatctgccaaagagcaaatcatcctagagaaactgaaggaaacagaaaaatccttcaaggactttcagaagggtttctccagtacggatggagatgcagtaaattacatttcctcccagcttcccgacctgccaatcctctgttcacgaacagcagaaccatcacctgggcaggacgggaccagcagagcggctgctgtgtacgccatggaaattaatgtggagaaagacaaacaaacaggagagaccaagattctctctacatctaccattggcccagagggggtccatcagaaaggagtcaaagtctatgatgatggtaccaaagtagtgtatgaggtgcgctcaggaggcaccgtagtagaaaatggagtgcacaaattaagcacaaaggatgtagaagagcttattcagaaggctggacaatcaagcttaggaggagggcacgtgtctgaaaggactgtgattgcagatgggagcctcagccatcccaaggaacacatgctctgcaaagaagctaagttagaaatggtacataagtctaggaaagaccattcttccgggaacccagggcagcaggcccaagcccccagcgctgcagggccggaggcaaacttggatcagcccgtcaccatgatttttatgggctaccaaaatatcgaggatgaagaggagacgaaaaaggtgctaggctatgatgaaaccatcaaggctgaattggtcctcattgatgaagatgatgagaagtcattgagggagaagacagtgacggacgtgtccactattgacgggaacgyggctgagcttgtgtccgggaggccggtctcagacaccacagagccctcatccccagaagggaaggaagagagcctagctacagagccagccccaggtacccaaaagaaaaagcrctgtcaatgctgtgttgtcatgtgaccacttctttcttctcctttcttctgggcagcctgtactctccacc

SEQ ID NO: 314 - DNA, 8118 bp, Homo sapiens
cgcggccagtgcactcggctccgggagaggcgagcagcgccggtgagccccgcagcagcgcacccggccgcggagccccgcgatggagatggcagaggcggaattgcacaaggaaaggctgcaagccatagcagaaaaaagaaagaggcagactgaaatagaaggcaagcgacaacagcttgacgagcagatacttctgctgcagcattccaagtccaaagtgcttcgggagaaatggctgctgcagggcatacccgctggaactgccgaagaggaggaagccaggaggcggcagtctgaagaggatgagttcagagtcaagcaacttgaagataacattcagaggctggagcaagaaatacaaacgctagaaagtgaagagtcccagatatctgccaaagagcaaatcatcctagagaaactgaaggaaacagaaaaatccttcaaggactttcagaagggtttctccagtacggatggagatgcagtaaattacatttcctcccagcttcccgacctgccaatcctctgttcacgaacagcagaaccatcacctgggcaggacgggaccagcagagcggctgctgtgtacgccatggaaattaatgtggagaaagacaaacaaacaggagagaccaagattctctctacatctaccattggcccagagggggtccatcagaaaggagtcaaagtctatgatgatggtaccaaagtagtgtatgaggtgcgctcaggaggcaccgtagtagaaaatggagtgcacaaattaagcacaaaggatgtagaagagcttattcagaaggctggacaatcaagcttaggaggagggcacgtgtctgaaaggactgtgattgcagatgggagcctcagccatcccaaggaacacatgctctgcaaagaagctaagttagaaatggtacataagtctaggaaagaccattcttccgggaacccagggcagcaggcccaagcccccagcgctgcagggccggaggcaaacttggatcagcccgtcaccatgatttttatgggctaccaaaatatcgaggatgaagaggagacgaaaaaggtgctaggctatgatgaaaccatcaaggctgaattggtcctcattgatgaagatgatgagaagtcattgagggagaagacagtgacggacgtgtccactattgacgggaacgyggctgagcttgtgtccgggaggccggtctcagacaccacagagccctcatccccagaagggaaggaagagagcctagctacagagccagccccaggagtcgggtgggagaatgtgctgctaaaggaaggtgagtcagcctcgaacgccacagaaacatccggcccagacatgactatcaagaagcctccccagctttctgaggatgatatctggctaaaaagcgagggagacaactatagtgccaccctcctggagcctgctgccagctctctttccccagatcacaaaaacatggaaattgaggtgtctgttgcagaatgtaaaagtgttcctggaatcacctctaccccacatcccatggaccatccctccgctttctattcacccccgcataatggcctccttactgatcaccacgaatccctggataatgatgttgccagagagatccgctatctagatgaggtgctagaggccaactrctgtgattctgctgtggatggaacgtacaatggaacatcctccccagagcctggtgcagtggttctggtgggcggcctaagcccccctgtccacgaggcgacccagccagaacccactgaaagaacagctagccrgcaggcacctcctcacatcgagctcagtaatagcagccctgaccccatggcagaggcagaaagaacaaatggccattcccccagccagcctagagatgcgctgggggacagcctgcaggtgcctgtcagccccagctccacaaccagctcacggtgttcttcccgagatggagagttcactctcaccacactgaaaaaggaggccaagtttgagctgcgtgccttccatgaggacaagaagccctccaagctctttgaggatgacgagcatgagaaagaacaatactgcattagaaaagtgaggccttcagaggagatgctggagctggaaaaggagaggagagagctcatccgcagccaggccgtcaagaagaatcctggcattgcagcaaaatggtggaatcccccgcaggaaaaaaccatcgaggagcagctggacgaggaacatctggagtcgcacaaaaagtacaaggagcgcaaagagagaagggcacagcaggaacagttgctgctgcagmagcagttacagcagcagcagcagcagcccccatcgcagctctgcacagcccctgcctcttctcatgaacgcgcaagcatgattgacaaagcaaaggaggacattgtcacagagcagatagatttctctgctgctcgcaaacaatttcagctgatggagaattccaggcaagcrgtggccaagggccagagtacacccaggctgttctccatcaagcctttctacaggcctctggggtcagtcaactcagacaagccactgactaatccgagaccaccttctgtcgggggacctccagaagacagtggtgcctcagccgccaagggacagaaatcccccggtgccctggagaccccatcggcagcaggaagccagggcaacacagcctctcaggggaaggaagggccctacagcgagccttctaaacgtgggcccttatctaaactgtgggctgaggatggagaatttacgagcgcccgggctgtcctcactgtggtcaaggatgatgaccatgggattttggatcagttctcaagatctgtcaatgtctccttgacccaagaggagcttgactctggtctggacgaattgtcggtgaggtctcaggataccacagtcctggagaccctatccaatgatttcagcatggacaacatcagtgacagcggggcatccaatgagacaaccaatgccctccaggaaaattcactggctgatttttctctgccccagacaccacaaactgacaacccctcagagggccgaggagaaggcgtctccaagtcatttagtgatcatggtttctattccccttcctccacgctgggggactctccgtyggttgatgaccccttggagtatcaggctggcctcctggtgcagaatgccattcaacaagccatagccgagcaggtggataaagctgtgtccaaaaccagcagggatggagcagagcaacagggacctgaagcgactgtagargaagctgaagctgcggctttcggctcagaaragcctcagagcatgtttgagccacctcaggtgtcttctcctgttcaagagaaaagggatgtattaccaaagattctgcctgctgaagacagggyrctcagggaaagggggcccccccagccactgccagctgtgcagcccagtggcccgattaacatggaggagaccaggcccgaaggaagctatttcagcaagtactcggaggcagctgagctgagaagcacagcctccctcctggccactcaagaatctgacgtgatggttgggcctttcaagctgaggtccaggaaacagcggactttgtccatgattgaggaagagatccgagcagctcaggaaagggaagaggagctgaagaggcagagacaagtcttgcagagtacgcagagccccaggacaaagaatgccccatcrctgccctccagaacatgctacaaaactgctccagggaaaatagagaaagtcaaacctcctccatcccccaccactgaaggccccagcttgcagcctgacttagcccctgaagaggctgccggaacccagcggcccaagaatctgatgcagaccctcatggaagactatgagacacacaaatctaaaaggcgcgagagaatggatgatagtagttacacttctaagttactgtcttgcaaggtgacttccgaggtcctcgaggccacacgggttaatcgaagaaagagcgcactggctttgcgctgggaagcagggatctatgccaaccaggaggaagaagacaacgaataaacttccttcaacccaggaagcgtctttggtgcttgggagaccaagaaaccaagaaattaacaactgaaagcattttaatggactayttattaaagtgcaaacaaactcagcaatccttatgtagaccagaagctgcaatatacaatgatgaaaatgaaacgaaaaggaagtccccccatcagactctggacacccaggaatcaaaagagaaaggacttttttggtgactcaatcccagtgtctggtttggggccaatctacaatggatccaaaaggacaaaacatgttacaagcaaatcaacatagttgctgcaggcggaactgagaccagcctctctgggcgatgaaggacaatggtggtagggccacttagagagcagtagggcccaggctggtgcagcctacatggcacaggatatttccctgcaccagtttcccacctgtcacttgcagcatcagagggtgttgcattaactccattttctccagcagccataaaatgaatggcgtttctctccatatttgcccagaagaggcagttatgattccacttctcctacatttaattatttttaattgagaacaactcatgatcacaattcataaaatccatattttaagacaatagttcttcatgtcacaaacacaatctattctacatgaggaggctgagaaaggggaagagaaaaacaaaccaaatggatgatgttagctttaggatcgtgtctgcttataatattcactgatctgcagtttatgagaacacattttcacagttatgtttcttcataggaaaactatatttagtgggcaacaactatttttatgatgggatgggggagtatatacacgtatagaatctgtacgcrttgaacaacttggttcaagatggtgggggcatttttagagcggcaataattgaaaaaaaaggcgaactctgccttggagaggtagatgataagaaataaaaaggtgtttataactattttgtattataaagtgggccttagagataggaagaagaatgatggattccttttggatcaatcagaaaggaaacacgaaagaaaagtcaggaaggtagagagagaaaaagggagggaaggagaaagaatgggaataaaataaggaggtaagagatactatttttgctgagcaaccagtgtgtttcaggatgatacaaagaaaaatatagaatagaaataagtgcaggcttggaatcagctacaaatcctaaagatggggtgtgtgtggatgtgtgtgtgtgtgtgtgtacaccattgtgtgtttgtaaaatgtgtatgttcatgagtaagggtgtgtgtgtgtgtgtattaaaattccagagtgaccgtggcacttgggtgtacaggtaattcctccagagctgtttgctggcttcaggagtggagtgagaatttcttttttatgaaaagggatataaaggcaccgagctgatgcagtatttgtaatattaagttgacctaacaaggtatttgcatgagtcacaattacaaagttttgagcggttttgtaatttgacatttaggaragtctcctatttattctcatactttacattcatgcttagtatactatagaggatgccagctttaatctttctgtcatttaaagcaatatgataagggtattcaataattgggtgccctaaatttctggatgagaaaattttcaattctggccatgagaaagaaaaaaaaataaacagccttctttttttttcctttgttttaaaactgtggttttttaaaaaagcaataattaactcagacctcactaaaaatcatttttgtttttatattgttatgtcataagctctattatgttattctaacaagtagcaatttcacaaaatttgtatgtagatgttaacgcacatttcctttgcttcttttattagactagtgttgactttggggggggacatttattcacaaatgagaagtaggcacaaagtaaaaaatggaaccatctactaacaaggatcctttaaaactgccaagggagctctaacttgaagccacatcctacagatggcagcccaaatagcacatgggcaattggcaccatctttatatggttgagtctcctgaatattttgaatgaattctcaacaaaatgtgctagccactggggacgcaaaacaagtaagatccctgttgcaagaaattcattttatagtgagggaggttggcatggagactaaaattctcaggaaaatgagatccgtgttagattagaagtcctgatgtgaaatgggaggactcaggaaggaggatcgtctttacctgaggatttctagccagaggtcccagatgcctgggctgagaacccagcgataagggggcgttcccaaagcagacacagggataagaacagaggaggcagcagcattgcacagccccaggcacagtggcagttaggatggctggagagtaggatagttctatgggttgcccaaaaaatgtgatgygcttcaygttttctctgactcatggatctggtagagaccatagacatgatatagactaacttccccatttttcacaagaggaaaccatccttatgacttaccttaaagttttttgttctgttttgaaggaaaccatgtgcttcatgaaacctacagttgacaagagaatgtacagctaagagaaaagcttaagaggccacactattcgcggaatggctttagaggcagatgaagtggtctttgaccacagttgattgaaccagagcacttattgcttaaagaataacagagttctagagctgggggttcttgggccatgctccgtgtgtggataaggaaagaaatactgtttctgggactctcccacagtcacaaagctgttttcactgtggcccctacatctcttaacttttgctattactcctatgctgccttccggattactgctgtctatcttcttgctccactcactgaagatcctattataatcccatgaaaatgtaaattacagtttacttgggagagccagattttctctgtgctcttgagttttttattcattcaagaaaccttgggccaccgctttgtacatagcaccgtgctaggctctgggatcccaaatggacccttttaactttctgaagatgggaccgtcccctggaggaaagtcattcctgcctaatccatcgagagaaagaggcttacgaaaaactttgcctctgatgctcagccccacccccaaatagcacacaagcttgttaaccccacctcttacaaaatgtttagattctgtaggtgttaaaagcctttctggaagtattgcattctgccgtgtttataggtgttcactttcctccagagctgattaactactgacatgacttggctttctcatccagaaattatggaaacagggtctgtcagtggcaggaggccgtgctgtgttttacttggatgacacaatgcagtttacttgcctcttcatacccatgcatgctgctcaccctagacaatgacatataagccgtatatagatcaatgtccacatatatatacacacacacatatatatatataaagtgtaacaaggaacactaaaacagtgttgattcttgtctctgaagacaaataattaaaccttttttttcccaactaaagaatggatttaattaaactatgtattgaaaaaaaagtagcctaagtgttagagatggtgaatatattccattttagttaaagaacaaatttcctgaattttaagcattcagtgagctgccaattttgattttgtgttgctctttacccaaattattttttctttgtttttctttttttgggggaggaggggaaaaaagcagcaatactgtgtttggaaattatactctgtatctggttttcctgtgtatgttaaccacttaaatgttattatcctgctttggttttagagtgattgtgaggcattcaatgcaagtatacagttattttctcattaaaatccaatgtgtgttgagtttttataaataatggc

SEQ ID NO: 315 - DNA, 7098 bp, Homo sapiens
ctgccattaaagggatctactgttttccagtattttattctgcaaagattttccaaaaagtttcttgtctccagaataactgcattacatctggcagagagtcatatgttttaaagatctgttcatacaaaaggaccttctttttgcaatcctattaatagtcgtattgcacagcctgcaatcatttgccgcaaaatacttgggaagactctggtacaataatgatgtaatctcttccaccttagtagataaaatttaaaaatggcactagcatgtaaacaaaatggaatccataaattagagaggattgggcacctgttactacaagaaaatgaacatttaagggattattagaaaatatctattcaaaagaatttgtcactgtggtttccattttccttcctcttarttatgagtcagtttgtcagcattcacatccataagagatgcagtatttaaccctgacttttgtttactctttattccagaagcctccccagctttctgaggatgatatctggctaaaaagcgagggagacaactatagtgccaccctcctggagcctgctgccagctctctttccccagatcacaaaaacatggaaattgaggtgtctgttgcagaatgtaaaagtgttcctggaatcacctctaccccacatcccatggaccatccctccgctttctattcacccccgcataatggcctccttactgatcaccacgaatccctggataatgatgttgccagagagatccgctatctagatgaggtgctagaggccaactrctgtgattctgctgtggatggaacgtacaatggaacatcctccccagagcctggtgcagtggttctggtgggcggcctaagcccccctgtccacgaggcgacccagccagaacccactgaaagaacagctagccrgcaggcacctcctcacatcgagctcagtaatagcagccctgaccccatggcagaggcagaaagaacaaatggccattcccccagccagcctagagatgcgctgggggacagcctgcaggtgcctgtcagccccagctccacaaccagctcacggtgttcttcccgagatggagagttcactctcaccacactgaaaaaggaggccaagtttgagctgcgtgccttccatgaggacaagaagccctccaagctctttgaggatgacgagcatgagaaagaacaatactgcattagaaaagtgaggccttcagaggagatgctggagctggaaaaggagaggagagagctcatccgcagccaggccgtcaagaagaatcctggcattgcagcaaaatggtggaatcccccgcaggaaaaaaccatcgaggagcagctggacgaggaacatctggagtcgcacaaaaagtacaaggagcgcaaagagagaagggcacagcaggaacagttgctgctgcagmagcagttacagcagcagcagcagcagcccccatcgcagctctgcacagcccctgcctcttctcatgaacgcgcaagcatgattgacaaagcaaaggaggacattgtcacagagcagatagatttctctgctgctcgcaaacaatttcagctgatggagaattccaggcaagcrgtggccaagggccagagtacacccaggctgttctccatcaagcctttctacaggcctctggggtcagtcaactcagacaagccactgactaatccgagaccaccttctgtcgggggacctccagaagacagtggtgcctcagccgccaagggacagaaatcccccggtgccctggagaccccatcggcagcaggaagccagggcaacacagcctctcaggggaaggaagggccctacagcgagccttctaaacgtgggcccttatctaaactgtgggctgaggatggagaatttacgagcgcccgggctgtcctcactgtggtcaaggatgatgaccatgggattttggatcagttctcaagatctgtcaatgtctccttgacccaagaggagcttgactctggtctggacgaattgtcggtgaggtctcaggataccacagtcctggagaccctatccaatgatttcagcatggacaacatcagtgacagcggggcatccaatgagacaaccaatgccctccaggaaaattcactggctgatttttctctgccccagacaccacaaactgacaacccctcagagggccgaggagaaggcgtctccaagtcatttagtgatcatggtttctattccccttcctccacgctgggggactctccgtyggttgatgaccccttggagtatcaggctggcctcctggtgcagaatgccattcaacaagccatagccgagcaggtggataaagctgtgtccaaaaccagcagggatggagcagagcaacagggacctgaagcgactgtagargaagctgaagctgcggctttcggctcagaaragcctcagagcatgtttgagccacctcaggtgtcttctcctgttcaagagaaaagggatgtattaccaaagattctgcctgctgaagacagggyrctcagggaaagggggcccccccagccactgccagctgtgcagcccagtggcccgattaacatggaggagaccaggcccgaaggaagctatttcagcaagtactcggaggcagctgagctgagaagcacagcctccctcctggccactcaagaatctgacgtgatggttgggcctttcaagctgaggtccaggaaacagcggactttgtccatgattgaggaagagatccgagcagctcaggaaagggaagaggagctgaagaggcagagacaagtcttgcagagtacgcagagccccaggacaaagaatgccccatcrctgccctccagaacatgctacaaaactgctccagggaaaatagagaaagtcaaacctcctccatcccccaccactgaaggccccagcttgcagcctgacttagcccctgaagaggctgccggaacccagcggcccaagaatctgatgcagaccctcatggaagactatgagacacacaaatctaaaaggcgcgagagaatggatgatagtagttacacttctaagttactgtcttgcaaggtgacttccgaggtcctcgaggccacacgggttaatcgaagaaagagcgcactggctttgcgctgggaagcagggatctatgccaaccaggaggaagaagacaacgaataaacttccttcaacccaggaagcgtctttggtgcttgggagaccaagaaaccaagaaattaacaactgaaagcattttaatggactayttattaaagtgcaaacaaactcagcaatccttatgtagaccagaagctgcaatatacaatgatgaaaatgaaacgaaaaggaagtccccccatcagactctggacacccaggaatcaaaagagaaaggacttttttggtgactcaatcccagtgtctggtttggggccaatctacaatggatccaaaaggacaaaacatgttacaagcaaatcaacatagttgctgcaggcggaactgagaccagcctctctgggcgatgaaggacaatggtggtagggccacttagagagcagtagggcccaggctggtgcagcctacatggcacaggatatttccctgcaccagtttcccacctgtcacttgcagcatcagagggtgttgcattaactccattttctccagcagccataaaatgaatggcgtttctctccatatttgcccagaagaggcagttatgattccacttctcctacatttaattatttttaattgagaacaactcatgatcacaattcataaaatccatattttaagacaatagttcttcatgtcacaaacacaatctattctacatgaggaggctgagaaaggggaagagaaaaacaaaccaaatggatgatgttagctttaggatcgtgtctgcttataatattcactgatctgcagtttatgagaacacattttcacagttatgtttcttcataggaaaactatatttagtgggcaacaactatttttatgatgggatgggggagtatatacacgtatagaatctgtacgcrttgaacaacttggttcaagatggtgggggcatttttagagcggcaataattgaaaaaaaaggcgaactctgccttggagaggtagatgataagaaataaaaaggtgtttataactattttgtattataaagtgggccttagagataggaagaagaatgatggattccttttggatcaatcagaaaggaaacacgaaagaaaagtcaggaaggtagagagagaaaaagggagggaaggagaaagaatgggaataaaataaggaggtaagagatactatttttgctgagcaaccagtgtgtttcaggatgatacaaagaaaaatatagaatagaaataagtgcaggcttggaatcagctacaaatcctaaagatggggtgtgtgtggatgtgtgtgtgtgtgtgtgtacaccattgtgtgtttgtaaaatgtgtatgttcatgagtaagggtgtgtgtgtgtgtgtattaaaattccagagtgaccgtggcacttgggtgtacaggtaattcctccagagctgtttgctggcttcaggagtggagtgagaatttcttttttatgaaaagggatataaaggcaccgagctgatgcagtatttgtaatattaagttgacctaacaaggtatttgcatgagtcacaattacaaagttttgagcggttttgtaatttgacatttaggaragtctcctatttattctcatactttacattcatgcttagtatactatagaggatgccagctttaatctttctgtcatttaaagcaatatgataagggtattcaataattgggtgccctaaatttctggatgagaaaattttcaattctggccatgagaaagaaaaaaaaataaacagccttctttttttttcctttgttttaaaactgtggttttttaaaaaagcaataattaactcagacctcactaaaaatcatttttgtttttatattgttatgtcataagctctattatgttattctaacaagtagcaatttcacaaaatttgtatgtagatgttaacgcacatttcctttgcttcttttattagactagtgttgactttggggggggacatttattcacaaatgagaagtaggcacaaagtaaaaaatggaaccatctactaacaaggatcctttaaaactgccaagggagctctaacttgaagccacatcctacagatggcagcccaaatagcacatgggcaattggcaccatctttatatggttgagtctcctgaatattttgaatgaattctcaacaaaatgtgctagccactggggacgcaaaacaagtaagatccctgttgcaagaaattcattttatagtgagggaggttggcatggagactaaaattctcaggaaaatgagatccgtgttagattagaagtcctgatgtgaaatgggaggactcaggaaggaggatcgtctttacctgaggatttctagccagaggtcccagatgcctgggctgagaacccagcgataagggggcgttcccaaagcagacacagggataagaacagaggaggcagcagcattgcacagccccaggcacagtggcagttaggatggctggagagtaggatagttctatgggttgcccaaaaaatgtgatgygcttcaygttttctctgactcatggatctggtagagaccatagacatgatatagactaacttccccatttttcacaagaggaaaccatccttatgacttaccttaaagttttttgttctgttttgaaggaaaccatgtgcttcatgaaacctacagttgacaagagaatgtacagctaagagaaaagcttaagaggccacactattcgcggaatggctttagaggcagatgaagtggtctttgaccacagttgattgaaccagagcacttattgcttaaagaataacagagttctagagctgggggttcttgggccatgctccgtgtgtggataaggaaagaaatactgtttctgggactctcccacagtcacaaagctgttttcactgtggcccctacatctcttaacttttgctattactcctatgctgccttccggattactgctgtctatcttcttgctccactcactgaagatcctattataatcccatgaaaatgtaaattacagtttacttgggagagccagattttctctgtgctcttgagttttttattcattcaagaaaccttgggccaccgctttgtacatagcaccgtgctaggctctgggatcccaaatggacccttttaactttctgaagatgggaccgtcccctggaggaaagtcattcctgcctaatccatcgagagaaagaggcttacgaaaaactttgcctctgatgctcagccccacccccaaatagcacacaagcttgttaaccccacctcttacaaaatgtttagattctgtaggtgttaaaagcctttctggaagtattgcattctgccgtgtttataggtgttcactttcctccagagctgattaactactgacatgacttggctttctcatccagaaattatggaaacagggtctgtcagtggcaggaggccgtgctgtgttttacttggatgacacaatgcagtttacttgcctcttcatacccatgcatgctgctcaccctagacaatgacatataagccgtatatagatcaatgtccacatatatatacacacacacatatatatatataaagtgtaacaaggaacactaaaacagtgttgattcttgtctctgaagacaaataattaaaccttttttttcccaactaaagaatggatttaattaaactatgtattgaaaaaaaagtagcctaagtgttagagatggtgaatatattccattttagttaaagaacaaatttcctgaattttaagcattcagtgagctgccaattttgattttgtgttgctctttacccaaattattttttctttgttatactctgtatctggttttcctgtgtatgttaaccacttaaatgttattatcctgctttggt

SEQ ID NO: 316 - DNA, 7240 bp, Homo sapiens
ctgccattaaagggatctactgttttccagtattttattctgcaaagattttccaaaaagtttcttgtctccagaataactgcattacatctggcagagagtcatatgttttaaagatctgttcatacaaaaggaccttctttttgcaatcctattaatagtcgtattgcacagcctgcaatcatttgccgcaaaatacttgggaagactctggtacaataatgatgtaatctcttccaccttagtagataaaatttaaaaatggcactagcatgtaaacaaaatggaatccataaattagagaggattgggcacctgttactacaagaaaatgaacatttaagggattattagaaaatatctattcaaaagaatttgtcactgtggtttccattttccttcctcttarttatgagtcagtttgtcagcattcacatccataagagatgcagtatttaaccctgacttttgtttactctttattccagaagcctccccagctttctgaggatgatatctggctaaaaagcgagggagacaactatagtgccaccctcctggagcctgctgccagctctctttccccagatcacaaaaacatggaaattgaggtgtctgttgcagaatgtaaaagtgttcctggaatcacctctaccccacatcccatggaccatccctccgctttctattcacccccgcataatggcctccttactgatcaccacgaatccctggataatgatgttgccagagagatccgctatctagatgaggtgctagaggccaactrctgtgattctgctgtggatggaacgtacaatggaacatcctccccagagcctggtgcagtggttctggtgggcggcctaagcccccctgtccacgaggcgacccagccagaacccactgaaagaacagctagccrgcaggcacctcctcacatcgagctcagtaatagcagccctgaccccatggcagaggcagaaagaacaaatggccattcccccagccagcctagagatgcgctgggggacagcctgcaggtgcctgtcagccccagctccacaaccagctcacggtgttcttcccgagatggagagttcactctcaccacactgaaaaaggaggccaagtttgagctgcgtgccttccatgaggacaagaagccctccaagctctttgaggatgacgagcatgagaaagaacaatactgcattagaaaagtgaggccttcagaggagatgctggagctggaaaaggagaggagagagctcatccgcagccaggccgtcaagaagaatcctggcattgcagcaaaatggtggaatcccccgcaggaaaaaaccatcgaggagcagctggacgaggaacatctggagtcgcacaaaaagtacaaggagcgcaaagagagaagggcacagcaggaacagttgctgctgcagmagcagttacagcagcagcagcagcagcccccatcgcagctctgcacagcccctgcctcttctcatgaacgcgcaagcatgattgacaaagcaaaggaggacattgtcacagagcagatagatttctctgctgctcgcaaacaatttcagctgatggagaattccaggcaagcrgtggccaagggccagagtacacccaggctgttctccatcaagcctttctacaggcctctggggtcagtcaactcagacaagccactgactaatccgagaccaccttctgtcgggggacctccagaagacagtggtgcctcagccgccaagggacagaaatcccccggtgccctggagaccccatcggcagcaggaagccagggcaacacagcctctcaggggaaggaagggccctacagcgagccttctaaacgtgggcccttatctaaactgtgggctgaggatggagaatttacgagcgcccgggctgtcctcactgtggtcaaggatgatgaccatgggattttggatcagttctcaagatctgtcaatgtctccttgacccaagaggagcttgactctggtctggacgaattgtcggtgaggtctcaggataccacagtcctggagaccctatccaatgatttcagcatggacaacatcagtgacagcggggcatccaatgagacaaccaatgccctccaggaaaattcactggctgatttttctctgccccagacaccacaaactgacaacccctcagagggccgaggagaaggcgtctccaagtcatttagtgatcatggtttctattccccttcctccacgctgggggactctccgtyggttgatgaccccttggagtatcaggctggcctcctggtgcagaatgccattcaacaagccatagccgagcaggtggataaagctgtgtccaaaaccagcagggatggagcagagcaacagggacctgaagcgactgtagargaagctgaagctgcggctttcggctcagaaragcctcagagcatgtttgagccacctcaggtgtcttctcctgttcaagagaaaagggatgtattaccaaagattctgcctgctgaagacagggyrctcagggaaagggggcccccccagccactgccagctgtgcagcccagtggcccgattaacatggaggagaccaggcccgaaggaagctatttcagcaagtactcggaggcagctgagctgagaagcacagcctccctcctggccactcaagaatctgacgtgatggttgggcctttcaagctgaggtccaggaaacagcggactttgtccatgattgaggaagagatccgagcagctcaggaaagggaagaggagctgaagaggcagagacaagtcttgcagagtacgcagagccccaggacaaagaatgccccatcrctgccctccagaacatgctacaaaactgctccagggaaaatagagaaagtcaaacctcctccatcccccaccactgaaggccccagcttgcagcctgacttagcccctgaagaggctgccggaacccagcggcccaagaatctgatgcagaccctcatggaagactatgagacacacaaatctaaaaggcgcgagagaatggatgatagtagttacacttctaagttactgtcttgcaaggtgacttccgaggtcctcgaggccacacgggttaatcgaagaaagagcgcactggctttgcgctgggaagcagggatctatgccaaccaggaggaagaagacaacgaataaacttccttcaacccaggaagcgtctttggtgcttgggagaccaagaaaccaagaaattaacaactgaaagcattttaatggactayttattaaagtgcaaacaaactcagcaatccttatgtagaccagaagctgcaatatacaatgatgaaaatgaaacgaaaaggaagtccccccatcagactctggacacccaggaatcaaaagagaaaggacttttttggtgactcaatcccagtgtctggtttggggccaatctacaatggatccaaaaggacaaaacatgttacaagcaaatcaacatagttgctgcaggcggaactgagaccagcctctctgggcgatgaaggacaatggtggtagggccacttagagagcagtagggcccaggctggtgcagcctacatggcacaggatatttccctgcaccagtttcccacctgtcacttgcagcatcagagggtgttgcattaactccattttctccagcagccataaaatgaatggcgtttctctccatatttgcccagaagaggcagttatgattccacttctcctacatttaattatttttaattgagaacaactcatgatcacaattcataaaatccatattttaagacaatagttcttcatgtcacaaacacaatctattctacatgaggaggctgagaaaggggaagagaaaaacaaaccaaatggatgatgttagctttaggatcgtgtctgcttataatattcactgatctgcagtttatgagaacacattttcacagttatgtttcttcataggaaaactatatttagtgggcaacaactatttttatgatgggatgggggagtatatacacgtatagaatctgtacgcrttgaacaacttggttcaagatggtgggggcatttttagagcggcaataattgaaaaaaaaggcgaactctgccttggagaggtagatgataagaaataaaaaggtgtttataactattttgtattataaagtgggccttagagataggaagaagaatgatggattccttttggatcaatcagaaaggaaacacgaaagaaaagtcaggaaggtagagagagaaaaagggagggaaggagaaagaatgggaataaaataaggaggtaagagatactatttttgctgagcaaccagtgtgtttcaggatgatacaaagaaaaatatagaatagaaataagtgcaggcttggaatcagctacaaatcctaaagatggggtgtgtgtggatgtgtgtgtgtgtgtgtgtacaccattgtgtgtttgtaaaatgtgtatgttcatgagtaagggtgtgtgtgtgtgtgtattaaaattccagagtgaccgtggcacttgggtgtacaggtaattcctccagagctgtttgctggcttcaggagtggagtgagaatttcttttttatgaaaagggatataaaggcaccgagctgatgcagtatttgtaatattaagttgacctaacaaggtatttgcatgagtcacaattacaaagttttgagcggttttgtaatttgacatttaggaragtctcctatttattctcatactttacattcatgcttagtatactatagaggatgccagctttaatctttctgtcatttaaagcaatatgataagggtattcaataattgggtgccctaaatttctggatgagaaaattttcaattctggccatgagaaagaaaaaaaaataaacagccttctttttttttcctttgttttaaaactgtggttttttaaaaaagcaataattaactcagacctcactaaaaatcatttttgtttttatattgttatgtcataagctctattatgttattctaacaagtagcaatttcacaaaatttgtatgtagatgttaacgcacatttcctttgcttcttttattagactagtgttgactttggggggggacatttattcacaaatgagaagtaggcacaaagtaaaaaatggaaccatctactaacaaggatcctttaaaactgccaagggagctctaacttgaagccacatcctacagatggcagcccaaatagcacatgggcaattggcaccatctttatatggttgagtctcctgaatattttgaatgaattctcaacaaaatgtgctagccactggggacgcaaaacaagtaagatccctgttgcaagaaattcattttatagtgagggaggttggcatggagactaaaattctcaggaaaatgagatccgtgttagattagaagtcctgatgtgaaatgggaggactcaggaaggaggatcgtctttacctgaggatttctagccagaggtcccagatgcctgggctgagaacccagcgataagggggcgttcccaaagcagacacagggataagaacagaggaggcagcagcattgcacagccccaggcacagtggcagttaggatggctggagagtaggatagttctatgggttgcccaaaaaatgtgatgygcttcaygttttctctgactcatggatctggtagagaccatagacatgatatagactaacttccccatttttcacaagaggaaaccatccttatgacttaccttaaagttttttgttctgttttgaaggaaaccatgtgcttcatgaaacctacagttgacaagagaatgtacagctaagagaaaagcttaagaggccacactattcgcggaatggctttagaggcagatgaagtggtctttgaccacagttgattgaaccagagcacttattgcttaaagaataacagagttctagagctgggggttcttgggccatgctccgtgtgtggataaggaaagaaatactgtttctgggactctcccacagtcacaaagctgttttcactgtggcccctacatctcttaacttttgctattactcctatgctgccttccggattactgctgtctatcttcttgctccactcactgaagatcctattataatcccatgaaaatgtaaattacagtttacttgggagagccagattttctctgtgctcttgagttttttattcattcaagaaaccttgggccaccgctttgtacatagcaccgtgctaggctctgggatcccaaatggacccttttaactttctgaagatgggaccgtcccctggaggaaagtcattcctgcctaatccatcgagagaaagaggcttacgaaaaactttgcctctgatgctcagccccacccccaaatagcacacaagcttgttaaccccacctcttacaaaatgtttagattctgtaggtgttaaaagcctttctggaagtattgcattctgccgtgtttataggtgttcactttcctccagagctgattaactactgacatgacttggctttctcatccagaaattatggaaacagggtctgtcagtggcaggaggccgtgctgtgttttacttggatgacacaatgcagtttacttgcctcttcatacccatgcatgctgctcaccctagacaatgacatataagccgtatatagatcaatgtccacatatatatacacacacacatatatatatataaagtgtaacaaggaacactaaaacagtgttgattcttgtctctgaagacaaataattaaaccttttttttcccaactaaagaatggatttaattaaactatgtattgaaaaaaaagtagcctaagtgttagagatggtgaatatattccattttagttaaagaacaaatttcctgaattttaagcattcagtgagctgccaattttgattttgtgttgctctttacccaaattattttttctttgtttttctttttttgggggaggaggggaaaaaagcagcaatactgtgtttggaaattatactctgtatctggttttcctgtgtatgttaaccacttaaatgttattatcctgctttggttttagagtgattgtgaggcattcaatgcaagtatacagttattttctcattaaaatccaatgtgtgttgagtttttataaataatggc

SEQ ID NO: 317 - DNA, 1370 bp, Homo sapiens
cgcggccagtgcactcggctccgggagaggcgagcagcgccggtgagccccgcagcagcgcacccggccgcggagccccgcgatggagatggcagaggcggaattgcacaaggaaaggctgcaagccatagcagaaaaaagaaagaggcagactgaaatagaaggcaagcgacaacagcttgacgagcagatacttctgctgcagcattccaagtccaaagtgcttcgggagaaatggctgctgcagggcatacccgctggaactgccgaagaggaggaagccaggaggcggcagtctgaagaggatgagttcagagtcaagcaacttgaagataacattcagaggctggagcaagaaatacaaacgctagaaagtgaagagtcccagatatctgccaaagagcaaatcatcctagagaaactgaaggaaacagaaaaatccttcaaggactttcagaagggtttctccagtacggatggagatgcagtaaattacatttcctcccagcttcccgacctgccaatcctctgttcacgaacagcagaaccatcacctgggcaggacgggaccagcagagcggctgctgtgtacgccatggaaattaatgtggagaaagacaaacaaacaggagagaccaagattctctctacatctaccattggcccagagggggtccatcagaaaggagtcaaagtctatgatgatggtaccaaagtagtgtatgaggtgcgctcaggaggcaccgtagtagaaaatggagtgcacaaattaagcacaaaggatgtagaagagcttattcagaaggctggacaatcaagcttaggaggagggcacgtgtctgaaaggactgtgattgcagatgggagcctcagccatcccaaggaacacatgctctgcaaagaagctaagttagaaatggtacataagtctaggaaagaccattcttccgggaacccagggcagcaggcccaagcccccagcgctgcagggccggaggcaaacttggatcagcccgtcaccatgatttttatgggctaccaaaatatcgaggatgaagaggagacgaaaaaggtgctaggctatgatgaaaccatcaaggctgaattggtcctcattgatgaagatgatgagaagtcattgagggagaagacagtgacggacgtgtccactattgacgggaacgyggctgagcttgtgtccgggaggccggtctcagacaccacagagccctcatccccagaagggaaggaagagagcctagctacagagccagccccaggtacccaaaagaaaaagcrctgtcaatgctgtgttgtcatgtgaccacttctttcttctcctttcttctgggcagcctgtactctccacc

SEQ ID NO: 318 - DNA, 6179 bp, Homo sapiens
cgtgcgcacgcgcgctgctctcaggtccgcaggttccacccccccccccgccccccccaattacagtgctttggggttcgacatcaaaacagagatcaaatacaaaagtttgggcagatgggcaagagggcagagggacaggggacgcggccaatgtagctcctctacctctacggtgccaggcctacaaagaaggccggccgccgtaagtgaccagaagcgggcccggcctcgccccctccgcctggtgacgtcactcccgcgccgcactcccagtgctgsggctgcctagttgacgcacccattgagtcgctggcttctttgcagcgcttcagcgttttcccctggagggcgcctccatccttggaggcctagtgccgtcggagagagagcgggagccgcggacagagacgcgtgcgcaattcggagccgactctgggtgcggactgtgggagckgactctgggtagccggctgcgcgtggctggggaggcgaggccggacgcacctctstttgggggtcctcagagattaatgattcatcaagggatasttgtacttgtctcgtgggaatcacttcatcatgcgaaatctgaaattatttcggaccctggagttcagggatattcaaggtccagggaatcctcagtgcttctctctccgaactgaacaggggacggtgctcattggttcagaacatggcctgatagaagtagaccctgtctcaagagaagtgaaaaatgaagtttctttggtggcagaaggctttctyccagaggatggaagtggcygcattgttggtgttcaggacttgctggatcaggagtctgtgtgtgtggccacagcctctggagacgtcatactctgcrgtctcagcacacaacagctggagtgtgttgggagtgtagccagtggtatctctgttatgagttggagtcctgaccaagagctggtgcttcttgccacaggtcaacagaccctgattatgatgacaaaagattttgagccaatcctggagcagcaratccatcaggatgattttggtgaaagcaagtttatcactgttggatggggtaggaaggagacacagttccatggatcagaaggcagacaagcagcttttcagatgcaaatgcatgagtctgctttgccctgggatgaccatagaccacaagttacctggcggggggatggacagttttttgctgtgagtgttgtttgcccagaaacaggggctcggaaggtcagagtgtggaaccgagagtttgctttgcagtcaaccagtgagcctgtggcaggactgggaccagccctggcttggaaaccctcaggcrgtttgattgcatctacacaagataaacccaaccagcaggatattgtgttttttgagaaaaatggactycttcatggacactttacacttcccttccttaaagatgaggttaaggtaaatgacttgctctggaatgcagattcctctgtgcttgcagtctggctggaagaccttcagagagaaraaagctccattccgaaaacctgtgttcagctctggactgttggaaactatcactggtatctcaagcaaagtttatccttcagcacctgtgggaagagcaagattgtgtctctgatgtgggaccctgtgaccccataccggctgcatgttctctgtcagggctggcattacctcgcctatgattggcactggacgrctgaccggagcgtrggagataattcaagtgacttgtccaatgtggctgtcattgatggaaacagggtgttggtgacagtcttccggcagactgtggttccgcctcccatgtgcacctaccaactgctgttcccacaccctgtgaatcaagtcacattcttagcacaccctcaaaagagtaatgaccttgctgttctagatgccagtaaccagatttctgtttataaatgtggtgattgtccaagtgctgaccctacagtgaaactgggagctgtgggtggaagtggatttaaagtttgccttagaactcctcatttggaaaagagatacaaaatccagtttgagaataatgaagatcaagatgtaaacccgctgaaactaggccttctcacttggattgaagaagacgtcttcctggctgtaagccacagtgagttcagcccccrgtctgtcattcaccatttgactgcagcttcttctgagatggatgaagagcatggacagctcaatgtcagttcatctgcagcggtggatggggtcataatcagtctatgttgcaattccaagaccaagtcagtagtattacagctggytgatggccagatatttaagtacctttgggagtcaccktctctggctattaaaccatggaagaactctggtggatttcctgttcggtttccttatccatgcacccagaccgaattggccatgattggagaagaggaatgtgtccttggtctgactgacaggtgtcgctttttcatcaatgacattgaggttgcgtcaaatatcacrtcatttgcagtatatgatgagtttttattgttgacaacycattcccatacctgccagtgtttttgcctgagggatgcttcatttaaaacattacaggccggcctgagcagcaatcatgtgtcccatggggaagttctgcggaaagtggagaggggttcacsgattgtcactgttgtgccccaggacacaaagcttgtattacagatgccaaggggaaacttagaagttgttcatcatcgagccctggttttagctcagattcggaagtggttggacaaacttatgtttaaagaggcatttgaatgcatgagaaagctgagaatcaatctcaatctgatttatgatcataaccctaaggtgtttcttgraaatgtggaaaccttcattaaacagatagattctgtgaatcatattaacttgttttttacagaattgaaagaagaagatgtcacgaagaccatgtaccctgcaccagttaccagcagtgtctacctgtccagggatcctgacgggaataaamtagaccttgtctgcgatgctatgagagcagtcatggagagcatraatcctcataaatactgcctatccatacttacatctcatgtaaagaagacaaccscagaactggaaattgtactgcaaaaagtacacgagcttcaaggaaatgctccctctgatcctgatgctgtgagtgctgaagaggccttgaaatatttgctgcatctggtagatgttaatgaattatatgatcattctcttggcacctatgactttgatttggtcctcatggtagctgagaagtcacagaaggatcccaaagaatatcttccatttcttaatacacttaagaaaatggaaactaattatcagcggtttactatagacaaatacttgaaacgatatgaaaaagccattggccacctcagcaaatgtggacctgagtacttcccagaatgcttaaacttgataaaagataaaaacttgtataacgaagctctgaagttatattcaccaagctcacaacagtaccaggatatcagcattgcttatggggagcacctgatgcaggagcacatgtatgagccagcggggctcatgtttgcccgttgcrgtgcccacgagaaagctctctcagcctttctsacatgtggcaactggaagcaagccctctgtgtggcagcccagcttaactttaccaaagaccagctggtgggcctcggcagaactctggcaggaaagctggttgagcagaggaagcacattgatgcggccatggttttggaagagwgtgcccaggattatgaagaagctgtgctcttgctgttagaaggagctgcctgggaagaagctttgaggctggtatacaaatataacagactggatattatagaaaccaacgtaaagccttccattttagaagcccagaaaaattatatggcatttctggactctcagacagccacattcagtcgccacaagaaacgtttattggtagttcgagagctcaaggagcaagcccagcaggcaggtctggatgatgaggtacyccacgggcaagagtcagacctcttctctgaaactagcagtgtcgtgagtggcagtgagatgagtggcaaatactcccatagtaactccaggatatcagcgagatcatccaagaatcgccgaaaagcggagcggaagaagcacagcctcaaagaaggcagtccgmtggaggacctggccctcctggaggcactgagtgaagtggtgcagaacactgaaaacctgaaagatgaagtataccatattttaaaggtactctttctctttgagtttgatgaacaaggaagggaattacagaaggcctttgaagatacgctgcagttgatggaaaggtcacttccagaaatttggactcttacttaccagcagaattcagctaccccggttctaggtcccaattctactgcaaatagtatcatggcatcttatcagcaacagaagacttcggttcctgttcttgatgctgagctttttataccaccaaagatcaacagaagaacccagtggaagctgagcctgctagactgagtgactgcagttaggagggatccgacagagaagaccatttccactcattcctgttgtcctaccaccccttgctctttgagggctggctattgagaactggaaagagtaaaatgataacttaccttagcattgccaagaacttcagcagacaacaagcaattctatttattttatgttgtgtatacatcttgatcattagcaagacattaagctttaaccattatggcaccattttgtgagaatgattgttctttcacttgggctgtttgagagcataattatggtaatcatgagattaatgtttcatgatttctacctccaaagtgtgaagacaagtaaaacaatgtttctaaattgtcttattttgttggcggagaagattacaatggctattagtgctacatttggtcaaatgtaatcacttaaatagcttcwtgtcaccttaaactaaagcagaataaaaagtatcctttgaaattataagccctcctttgctgacagctattattttgtaacatcttaccaggtcatgtgctttcagttataactgggctgagcctcctataattacaatgtctatagggactgttttactgcctgtgtattttctgctagagagttagcaatgttagagctagaacagattagaatttctaaacagtatcatgcacagttggtgtgagtgatcagtgtgcattgtatggcatgcatggttgtgaattattctctgttctccaaatactgtttctttaactcagatatttttgttagtgtctaggccacttcatttatttttcgtcatggtactttactgacttctctttattcaattctccacgccctcaccaaaaaaaactgtctcaaaatgagaatattttattttcatggtgagtctagaaaacgcccacttcattctgattaaaaattcttccatgttttaaatatcagaaccagacctttcttactgtgtatcttagcccatttgtgtctctataacaacaaccagctttcaaaggaactaatagagtgaaaactcactcattaccacgaggatggcacaagcgattcacgtaggatctgcccctgtgaccaaaacacctcccattgggccccacttccaacactggtgatcacatttcaacatgaggtttagggaaacaaatgcctaaactacagcactgtacataaactaacaggaaatgctgcttttgatcctcaaagaagtgatatagccaaaattgtaatttaagaagcctttgccagtatagcaagatgttaactatagaatcaatctaggagtattcactgtaaaattcaacttttctgtatgtttgaacattttcacaatctmataggagtttttaaaaagaagagaaagaagatatactttgctttggagaaatctactttttgacttacatgggtttgctgtaattaagtgcccaatattgaaaggctgcaagtactttgtaatcactctttggcatgggtaaataagcatggtaacttatattgaaatatagtgctcttgctttggataactgtaaagggacccatgctgatagactggaaatagaagtaaatgtgtttattgataa

SEQ ID NO: 319 - DNA, 4256 bp, Homo sapiens
atggcgacctccggcgccgccacccccgccctccgggaccccagcgcttcctccgcgcagcccggactgggcgtgctcttccggcgcacagcgcgtgtcgtgcgcacgcgcgctgctctcaggtccgcagcgcttcagcgttttcccctggagggcgcctccatccttggaggcctagtgccgtcggagagagagcgggagccgcggacagagacgcgtgcgcaattcggagccgactctgggtgcggactgtgggagckgactctgggtagccggctgcgcgtggctggggaggcgaggccggacgcacctctstttgggggtcctcagstgtacttgtctcgtgggaatcacttcatcatgcgaaatctgaaattatttcggaccctggagttcagggatattcaaggtccagggaatcctcagtgcttctctctccgaactgaacaggggacggtgctcattggttcagaacatggcctgatagaagtagaccctgtctcaagagaagtgaaaaatgaagtttctttggtggcagaaggctttctyccagaggatggaagtggcygcattgttggtgttcaggacttgctggatcaggagtctgtgtgtgtggccacagcctctggagacgtcatactctgcrgtctcagcacacaacagctggagtgtgttgggagtgtagccagtggtatctctgttatgagttggagtcctgaccaagagctggtgcttcttgccacaggtcaacagaccctgattatgatgacaaaagattttgagccaatcctggagcagcaratccatcaggatgattttggtgaaagcaagtttatcactgttggatggggtaggaaggagacacagttccatggatcagaaggcagacaagcagcttttcagatgcaaatgcatgagtctgctttgccctgggatgaccatagaccacaagttacctggcggggggatggacagttttttgctgtgagtgttgtttgcccagaaacaggggctcggaaggtcagagtgtggaaccgagagtttgctttgcagtcaaccagtgagcctgtggcaggactgggaccagccctggcttggaaaccctcaggcrgtttgattgcatctacacaagataaacccaaccagcaggatattgtgttttttgagaaaaatggactycttcatggacactttacacttcccttccttaaagatgaggttaaggtaaatgacttgctctggaatgcagattcctctgtgcttgcagtctggctggaagaccttcagagagaaraaagctccattccgaaaacctgtgttcagctctggactgttggaaactatcactggtatctcaagcaaagtttatccttcagcacctgtgggaagagcaagattgtgtctctgatgtgggaccctgtgaccccataccggctgcatgttctctgtcagggctggcattacctcgcctatgattggcactggacgrctgaccggagcgtrggagataattcaagtgacttgtccaatgtggctgtcattgatggaaacagggtgttggtgacagtcttccggcagactgtggttccgcctcccatgtgcacctaccaactgctgttcccacaccctgtgaatcaagtcacattcttagcacaccctcaaaagagtaatgaccttgctgttctagatgccagtaaccagatttctgtttataaatgtggtgattgtccaagtgctgaccctacagtgaaactgggagctgtgggtggaagtggatttaaagtttgccttagaactcctcatttggaaaagagatacaaaatccagtttgagaataatgaagatcaagatgtaaacccgctgaaactaggccttctcacttggattgaagaagacgtcttcctggctgtaagccacagtgagttcagcccccrgtctgtcattcaccatttgactgcagcttcttctgagatggatgaagagcatggacagctcaatgtcagttcatctgcagcggtggatggggtcataatcagtctatgttgcaattccaagaccaagtcagtagtattacagctggytgatggccagatatttaagtacctttgggagtcaccktctctggctattaaaccatggaagaactctggtggatttcctgttcggtttccttatccatgcacccagaccgaattggccatgattggagaagaggaatgtgtccttggtctgactgacaggtgtcgctttttcatcaatgacattgaggttgcgtcaaatatcacrtcatttgcagtatatgatgagtttttattgttgacaacycattcccatacctgccagtgtttttgcctgagggatgcttcatttaaaacattacaggccggcctgagcagcaatcatgtgtcccatggggaagttctgcggaaagtggagaggggttcacsgattgtcactgttgtgccccaggacacaaagcttgtattacagatgccaaggggaaacttagaagttgttcatcatcgagccctggttttagctcagattcggaagtggttggacaaacttatgtttaaagaggcatttgaatgcatgagaaagctgagaatcaatctcaatctgatttatgatcataaccctaaggtgtttcttgraaatgtggaaaccttcattaaacagatagattctgtgaatcatattaacttgttttttacagaattgaagtaaaagatgtcacgaagaccatgtaccctgcaccagttaccagcagtgtctacctgtccagggatcctgacgggaataaamtagaccttgtctgcgatgctatgagagcagtcatggagagcatraatcctcataaatactgcctatccatacttacatctcatgtaaagaagacaaccscagaactggaaattgtactgcaaaaagtacacgagcttcaaggaaatgctccctctgatcctgatgctgtgagtgctgaagaggccttgaaatatttgctgcatctggtagatgttaatgaattatatgatcattctcttggcacctatgactttgatttggtcctcatggtagctgagaagtcacagaaggatcccaaagaatatcttccatttcttaatacacttaagaaaatggaaactaattatcagcggtttactatagacaaatacttgaaacgatatgaaaaagccattggccacctcagcaaatgtggacctgagtacttcccagaatgcttaaacttgataaaagataaaaacttgtataacgaagctctgaagttatattcaccaagctcacaacagtaccaggatatcagcattgcttatggggagcacctgatgcaggagcacatgtatgagccagcggggctcatgtttgcccgttgcrgtgcccacgagaaagctctctcagcctttctsacatgtggcaactggaagcaagccctctgtgtggcagcccagcttaactttaccaaagaccagctggtgggcctcggcagaactctggcaggaaagctggttgagcagaggaagcacattgatgcggccatggttttggaagagwgtgcccaggattatgaagaagctgtgctcttgctgttagaaggagctgcctgggaagaagctttgaggctggtatacaaatataacagactggatattatagaaaccaacgtaaagccttccattttagaagcccagaaaaattatatggcatttctggactctcagacagccacattcagtcgccacaagaaacgtttattggtagttcgagagctcaaggagcaagcccagcaggcaggtctggatgatgaggtacyccacgggcaagagtcagacctcttctctgaaactagcagtgtcgtgagtggcagtgagatgagtggcaaatactcccatagtaactccaggatatcagcgagatcatccaagaatcgccgaaaagcggagcggaagaagcacagcctcaaagaaggcagtccgmtggaggacctggccctcctggaggcactgagtgaagtggtgcagaacactgaaaacctgaaagatgaagtataccatattttaaaggtactctttctctttgagtttgatgaacaaggaagggaattacagaaggcctttgaagatacgctgcagttgatggaaaggtcacttccagaaatttggactcttacttaccagcagaattcagctaccccgacatggggagagggagtcttgctgtgttgcccaagctggtct

SEQ ID NO: 320 - DNA, 5957 bp, Homo sapiens
atggcgacctccggcgccgccacccccgccctccgggaccccagcgcttcctccgcgcagcccggactgggcgtgctcttccggcgcacagcgcgtgtcgtgcgcacgcgcgctgctctcaggtccgcagcgcttcagcgttttcccctggagggcgcctccatccttggaggcctagtgccgtcggagagagagcgggagccgcggacagagacgcgtgcgcaattcggagccgactctgggtgcggactgtgggagckgactctgggtagccggctgcgcgtggctggggaggcgaggccggacgcacctctstttgggggtcctcagstgtacttgtctcgtgggaatcacttcatcatgcgaaatctgaaattatttcggaccctggagttcagggatattcaaggtccagggaatcctcagtgcttctctctccgaactgaacaggggacggtgctcattggttcagaacatggcctgatagaagtagaccctgtctcaagagaagtgaaaaatgaagtttctttggtggcagaaggctttctyccagaggatggaagtggcygcattgttggtgttcaggacttgctggatcaggagtctgtgtgtgtggccacagcctctggagacgtcatactctgcrgtctcagcacacaacagctggagtgtgttgggagtgtagccagtggtatctctgttatgagttggagtcctgaccaagagctggtgcttcttgccacaggtcaacagaccctgattatgatgacaaaagattttgagccaatcctggagcagcaratccatcaggatgattttggtgaaagcaagtttatcactgttggatggggtaggaaggagacacagttccatggatcagaaggcagacaagcagcttttcagatgcaaatgcatgagtctgctttgccctgggatgaccatagaccacaagttacctggcggggggatggacagttttttgctgtgagtgttgtttgcccagaaacaggggctcggaaggtcagagtgtggaaccgagagtttgctttgcagtcaaccagtgagcctgtggcaggactgggaccagccctggcttggaaaccctcaggcrgtttgattgcatctacacaagataaacccaaccagcaggatattgtgttttttgagaaaaatggactycttcatggacactttacacttcccttccttaaagatgaggttaaggtaaatgacttgctctggaatgcagattcctctgtgcttgcagtctggctggaagaccttcagagagaaraaagctccattccgaaaacctgtgttcagctctggactgttggaaactatcactggtatctcaagcaaagtttatccttcagcacctgtgggaagagcaagattgtgtctctgatgtgggaccctgtgaccccataccggctgcatgttctctgtcagggctggcattacctcgcctatgattggcactggacgrctgaccggagcgtrggagataattcaagtgacttgtccaatgtggctgtcattgatggaaacagggtgttggtgacagtcttccggcagactgtggttccgcctcccatgtgcacctaccaactgctgttcccacaccctgtgaatcaagtcacattcttagcacaccctcaaaagagtaatgaccttgctgttctagatgccagtaaccagatttctgtttataaatgtggtgattgtccaagtgctgaccctacagtgaaactgggagctgtgggtggaagtggatttaaagtttgccttagaactcctcatttggaaaagagatacaaaatccagtttgagaataatgaagatcaagatgtaaacccgctgaaactaggccttctcacttggattgaagaagacgtcttcctggctgtaagccacagtgagttcagcccccrgtctgtcattcaccatttgactgcagcttcttctgagatggatgaagagcatggacagctcaatgtcagttcatctgcagcggtggatggggtcataatcagtctatgttgcaattccaagaccaagtcagtagtattacagctggytgatggccagatatttaagtacctttgggagtcaccktctctggctattaaaccatggaagaactctggtggatttcctgttcggtttccttatccatgcacccagaccgaattggccatgattggagaagaggaatgtgtccttggtctgactgacaggtgtcgctttttcatcaatgacattgaggttgcgtcaaatatcacrtcatttgcagtatatgatgagtttttattgttgacaacycattcccatacctgccagtgtttttgcctgagggatgcttcatttaaaacattacaggccggcctgagcagcaatcatgtgtcccatggggaagttctgcggaaagtggagaggggttcacsgattgtcactgttgtgccccaggacacaaagcttgtattacagatgccaaggggaaacttagaagttgttcatcatcgagccctggttttagctcagattcggaagtggttggacaaacttatgtttaaagaggcatttgaatgcatgagaaagctgagaatcaatctcaatctgatttatgatcataaccctaaggtgtttcttgraaatgtggaaaccttcattaaacagatagattctgtgaatcatattaacttgttttttacagaattgaaagaagaagatgtcacgaagaccatgtaccctgcaccagttaccagcagtgtctacctgtccagggatcctgacgggaataaamtagaccttgtctgcgatgctatgagagcagtcatggagagcatraatcctcataaatactgcctatccatacttacatctcatgtaaagaagacaaccscagaactggaaattgtactgcaaaaagtacacgagcttcaaggaaatgctccctctgatcctgatgctgtgagtgctgaagaggccttgaaatatttgctgcatctggtagatgttaatgaattatatgatcattctcttggcacctatgactttgatttggtcctcatggtagctgagaagtcacagaaggatcccaaagaatatcttccatttcttaatacacttaagaaaatggaaactaattatcagcggtttactatagacaaatacttgaaacgatatgaaaaagccattggccacctcagcaaatgtggacctgagtacttcccagaatgcttaaacttgataaaagataaaaacttgtataacgaagctctgaagttatattcaccaagctcacaacagtaccaggatatcagcattgcttatggggagcacctgatgcaggagcacatgtatgagccagcggggctcatgtttgcccgttgcrgtgcccacgagaaagctctctcagcctttctsacatgtggcaactggaagcaagccctctgtgtggcagcccagcttaactttaccaaagaccagctggtgggcctcggcagaactctggcaggaaagctggttgagcagaggaagcacattgatgcggccatggttttggaagagwgtgcccaggattatgaagaagctgtgctcttgctgttagaaggagctgcctgggaagaagctttgaggctggtatacaaatataacagactggatattatagaaaccaacgtaaagccttccattttagaagcccagaaaaattatatggcatttctggactctcagacagccacattcagtcgccacaagaaacgtttattggtagttcgagagctcaaggagcaagcccagcaggcaggtctggatgatgaggtacyccacgggcaagagtcagacctcttctctgaaactagcagtgtcgtgagtggcagtgagatgagtggcaaatactcccatagtaactccaggatatcagcgagatcatccaagaatcgccgaaaagcggagcggaagaagcacagcctcaaagaaggcagtccgmtggaggacctggccctcctggaggcactgagtgaagtggtgcagaacactgaaaacctgaaagatgaagtataccatattttaaaggtactctttctctttgagtttgatgaacaaggaagggaattacagaaggcctttgaagatacgctgcagttgatggaaaggtcacttccagaaatttggactcttacttaccagcagaattcagctaccccggttctaggtcccaattctactgcaaatagtatcatggcatcttatcagcaacagaagacttcggttcctgttcttgatgctgagctttttataccaccaaagatcaacagaagaacccagtggaagctgagcctgctagactgagtgactgcagttaggagggatccgacagagaagaccatttccactcattcctgttgtcctaccaccccttgctctttgagggctggctattgagaactggaaagagtaaaatgataacttaccttagcattgccaagaacttcagcagacaacaagcaattctatttattttatgttgtgtatacatcttgatcattagcaagacattaagctttaaccattatggcaccattttgtgagaatgattgttctttcacttgggctgtttgagagcataattatggtaatcatgagattaatgtttcatgatttctacctccaaagtgtgaagacaagtaaaacaatgtttctaaattgtcttattttgttggcggagaagattacaatggctattagtgctacatttggtcaaatgtaatcacttaaatagcttcwtgtcaccttaaactaaagcagaataaaaagtatcctttgaaattataagccctcctttgctgacagctattattttgtaacatcttaccaggtcatgtgctttcagttataactgggctgagcctcctataattacaatgtctatagggactgttttactgcctgtgtattttctgctagagagttagcaatgttagagctagaacagattagaatttctaaacagtatcatgcacagttggtgtgagtgatcagtgtgcattgtatggcatgcatggttgtgaattattctctgttctccaaatactgtttctttaactcagatatttttgttagtgtctaggccacttcatttatttttcgtcatggtactttactgacttctctttattcaattctccacgccctcaccaaaaaaaactgtctcaaaatgagaatattttattttcatggtgagtctagaaaacgcccacttcattctgattaaaaattcttccatgttttaaatatcagaaccagacctttcttactgtgtatcttagcccatttgtgtctctataacaacaaccagctttcaaaggaactaatagagtgaaaactcactcattaccacgaggatggcacaagcgattcacgtaggatctgcccctgtgaccaaaacacctcccattgggccccacttccaacactggtgatcacatttcaacatgaggtttagggaaacaaatgcctaaactacagcactgtacataaactaacaggaaatgctgcttttgatcctcaaagaagtgatatagccaaaattgtaatttaagaagcctttgccagtatagcaagatgttaactatagaatcaatctaggagtattcactgtaaaattcaacttttctgtatgtttgaacattttcacaatctmataggagtttttaaaaagaagagaaagaagatatactttgctttggagaaatctactttttgacttacatgggtttgctgtaattaagtgcccaatattgaaaggctgcaagtactttgtaatcactctttggcatgggtaaataagcatggtaacttatattgaaatatagtgctcttgctttggataactgtaaagggacccatgctgatagactggaaatagaagtaaatgtgtttattgataa

SEQ ID NO: 321 - DNA, 6107 bp, Homo sapiens
cgtgcgcacgcgcgctgctctcaggtccgcaggttccacccccccccccgccccccccaattacagtgctttggggttcgacatcaaaacagagatcaaatacaaaagtttgggcagatgggcaagagggcagagggacaggggacgcggccaatgtagctcctctacctctacggtgccaggcctacaaagaaggccggccgccgtaagtgaccagaagcgggcccggcctcgccccctccgcctggtgacgtcactcccgcgccgcactcccagtgctgsggctgcctagttgacgcacccattgagtcgctggcttctttgcagcgcttcagcgttttcccctggagggcgcctccatccttggaggcctagtgccgtcggagagagagcgggagccgcggacagagacgcgtgcgcaattcggagccgactctgggtgcggactgtgggagckgactctgggtagccggctgcgcgtggctggggaggcgaggccggacgcacctctstttgggggtcctcagagattaatgattcatcaagggatasttgtacttgtctcgtgggaatcacttcatcatgcgaaatctgaaattatttcggaccctggagttcagggatattcaaggtccagggaatcctcagtgcttctctctccgaactgaacaggggacggtgctcattggttcagaacatggcctgatagaagtagaccctgtctcaagagaagtgaaaaatgaagtttctttggtggcagaaggctttctyccagaggatggaagtggcygcattgttggtgttcaggacttgctggatcaggagtctgtgtgtgtggccacagcctctggagacgtcatactctgcrgtctcagcacacaacagctggagtgtgttgggagtgtagccagtggtatctctgttatgagttggagtcctgaccaagagctggtgcttcttgccacaggtcaacagaccctgattatgatgacaaaagattttgagccaatcctggagcagcaratccatcaggatgattttggtgaaagcaagtttatcactgttggatggggtaggaaggagacacagttccatggatcagaaggcagacaagcagcttttcagatgcaaatgcatgagtctgctttgccctgggatgaccatagaccacaagttacctggcggggggatggacagttttttgctgtgagtgttgtttgcccagaaacaggggctcggaaggtcagagtgtggaaccgagagtttgctttgcagtcaaccagtgagcctgtggcaggactgggaccagccctggcttggaaaccctcaggcrgtttgattgcatctacacaagataaacccaaccagcaggatattgtgttttttgagaaaaatggactycttcatggacactttacacttcccttccttaaagatgaggttaaggtaaatgacttgctctggaatgcagattcctctgtgcttgcagtctggctggaagaccttcagagagaaraaagctccattccgaaaacctgtgttcagctctggactgttggaaactatcactggtatctcaagcaaagtttatccttcagcacctgtgggaagagcaagattgtgtctctgatgtgggaccctgtgaccccataccggctgcatgttctctgtcagggctggcattacctcgcctatgattggcactggacgrctgaccggagcgtrggagataattcaagtgacttgtccaatgtggctgtcattgatggaaacagggtgttggtgacagtcttccggcagactgtggttccgcctcccatgtgcacctaccaactgctgttcccacaccctgtgaatcaagtcacattcttagcacaccctcaaaagagtaatgaccttgctgttctagatgccagtaaccagatttctgtttataaatgtggtgattgtccaagtgctgaccctacagtgaaactgggagctgtgggtggaagtggatttaaagtttgccttagaactcctcatttggaaaagagatacaaaatccagtttgagaataatgaagatcaagatgtaaacccgctgaaactaggccttctcacttggattgaagaagacgtcttcctggctgtaagccacagtgagttcagcccccrgtctgtcattcaccatttgactgcagcttcttctgagatggatgaagagcatggacagctcaatgtcagttcatctgcagcggtggatggggtcataatcagtctatgttgcaattccaagaccaagtcagtagtattacagctggytgatggccagatatttaagtacctttgggagtcaccktctctggctattaaaccatggaagaactctggtggatttcctgttcggtttccttatccatgcacccagaccgaattggccatgattggagaagaggaatgtgtccttggtctgactgacaggtgtcgctttttcatcaatgacattgaggttgcgtcaaatatcacrtcatttgcagtatatgatgagtttttattgttgacaacycattcccatacctgccagtgtttttgcctgagggatgcttcatttaaaacattacaggccggcctgagcagcaatcatgtgtcccatggggaagttctgcggaaagtggagaggggttcacsgattgtcactgttgtgccccaggacacaaagcttgtattacagatgccaaggggaaacttagaagttgttcatcatcgagccctggttttagctcagattcggaagtggttggacaaacttatgtttaaagaggcatttgaatgcatgagaaagctgagaatcaatctcaatctgatttatgatcataaccctaaggtgtttcttgraaatgtggaaaccttcattaaacagatagattctgtgaatcatattaacttgttttttacagaattgaaagaagaagatgtcacgaagaccatgtaccctgcaccagttaccagcagtgtctacctgtccagggatcctgacgggaataaamtagaccttgtctgcgatgctatgagagcagtcatggagagcatraatcctcataaatactgcctatccatacttacatctcatgtaaagaagacaaccscagaactggaaattgtactgcaaaaagtacacgagcttcaaggaaatgctccctctgatcctgatgctgtgagtgctgaagaggccttgaaatatttgctgcatctggtagatgttaatgaattatatgatcattctcttggcacctatgactttgatttggtcctcatggtagctgagaagtcacagaaggatcccaaagaatatcttccatttcttaatacacttaagaaaatggaaactaattatcagcggtttactatagacaaatacttgaaacgatatgaaaaagccattggccacctcagcaaatgtggacctgagtacttcccagaatgcttaaacttgataaaagataaaaacttgtataacgaagctctgaagttatattcaccaagctcacaacagtaccaggatatcagcattgcttatggggagcacctgatgcaggagcacatgtatgagccagcggggctcatgtttgcccgttgcrgtgcccacgagaaagctctctcagcctttctsacatgtggcaactggaagcaagccctctgtgtggcagcccagcttaactttaccaaagaccagctggtgggcctcggcagaactctggcagaagctgtgctcttgctgttagaaggagctgcctgggaagaagctttgaggctggtatacaaatataacagactggatattatagaaaccaacgtaaagccttccattttagaagcccagaaaaattatatggcatttctggactctcagacagccacattcagtcgccacaagaaacgtttattggtagttcgagagctcaaggagcaagcccagcaggcaggtctggatgatgaggtacyccacgggcaagagtcagacctcttctctgaaactagcagtgtcgtgagtggcagtgagatgagtggcaaatactcccatagtaactccaggatatcagcgagatcatccaagaatcgccgaaaagcggagcggaagaagcacagcctcaaagaaggcagtccgmtggaggacctggccctcctggaggcactgagtgaagtggtgcagaacactgaaaacctgaaagatgaagtataccatattttaaaggtactctttctctttgagtttgatgaacaaggaagggaattacagaaggcctttgaagatacgctgcagttgatggaaaggtcacttccagaaatttggactcttacttaccagcagaattcagctaccccggttctaggtcccaattctactgcaaatagtatcatggcatcttatcagcaacagaagacttcggttcctgttcttgatgctgagctttttataccaccaaagatcaacagaagaacccagtggaagctgagcctgctagactgagtgactgcagttaggagggatccgacagagaagaccatttccactcattcctgttgtcctaccaccccttgctctttgagggctggctattgagaactggaaagagtaaaatgataacttaccttagcattgccaagaacttcagcagacaacaagcaattctatttattttatgttgtgtatacatcttgatcattagcaagacattaagctttaaccattatggcaccattttgtgagaatgattgttctttcacttgggctgtttgagagcataattatggtaatcatgagattaatgtttcatgatttctacctccaaagtgtgaagacaagtaaaacaatgtttctaaattgtcttattttgttggcggagaagattacaatggctattagtgctacatttggtcaaatgtaatcacttaaatagcttcwtgtcaccttaaactaaagcagaataaaaagtatcctttgaaattataagccctcctttgctgacagctattattttgtaacatcttaccaggtcatgtgctttcagttataactgggctgagcctcctataattacaatgtctatagggactgttttactgcctgtgtattttctgctagagagttagcaatgttagagctagaacagattagaatttctaaacagtatcatgcacagttggtgtgagtgatcagtgtgcattgtatggcatgcatggttgtgaattattctctgttctccaaatactgtttctttaactcagatatttttgttagtgtctaggccacttcatttatttttcgtcatggtactttactgacttctctttattcaattctccacgccctcaccaaaaaaaactgtctcaaaatgagaatattttattttcatggtgagtctagaaaacgcccacttcattctgattaaaaattcttccatgttttaaatatcagaaccagacctttcttactgtgtatcttagcccatttgtgtctctataacaacaaccagctttcaaaggaactaatagagtgaaaactcactcattaccacgaggatggcacaagcgattcacgtaggatctgcccctgtgaccaaaacacctcccattgggccccacttccaacactggtgatcacatttcaacatgaggtttagggaaacaaatgcctaaactacagcactgtacataaactaacaggaaatgctgcttttgatcctcaaagaagtgatatagccaaaattgtaatttaagaagcctttgccagtatagcaagatgttaactatagaatcaatctaggagtattcactgtaaaattcaacttttctgtatgtttgaacattttcacaatctmataggagtttttaaaaagaagagaaagaagatatactttgctttggagaaatctactttttgacttacatgggtttgctgtaattaagtgcccaatattgaaaggctgcaagtactttgtaatcactctttggcatgggtaaataagcatggtaacttatattgaaatatagtgctcttgctttggataactgtaaagggacccatgctgatagactggaaatagaagtaaatgtgtttattgataa

SEQ ID NO: 322 - DNA, 5840 bp, Homo sapiens
atggcgacctccggcgccgccacccccgccctccgggaccccagcgcttcctccgcgcagcccggactgggcgtgctcttccggcgcacagcgcgtgtcgtgcgcacgcgcgctgctctcaggtccgcagcgcttcagcgttttcccctggagggcgcctccatccttggaggcctagtgccgtcggagagagagcgggagccgcggacagagacgcgtgcgcaattcggagccgactctgggtgcggactgtgggagckgactctgggtagccggctgcgcgtggctggggaggcgaggccggacgcacctctstttgggggtcctcagstgtacttgtctcgtgggaatcacttcatcatgcgaaatctgaaattatttcggaccctggagttcagggatattcaaggtccagggaatcctcagtgcttctctctccgaactgaacaggggacggtgctcattggttcagaacatggcctgatagaagtagaccctgtctcaagagaagtgaaaaatgaagtttctttggtggcagaaggctttctyccagaggatggaagtggcygcattgttggtgttcaggacttgctggatcaggagtctgtgtgtgtggccacagcctctggagacgtcatactctgcrgtctcagcacacaacagctggagtgtgttgggagtgtagccagtggtatctctgttatgagttggagtcctgaccaagagctggtgcttcttgccacaggtcaacagaccctgattatgatgacaaaagattttgagccaatcctggagcagcaratccatcaggatgattttggtgaaagcaagtttatcactgttggatggggtaggaaggagacacagttccatggatcagaaggcagacaagcagcttttcagatgcaaatgcatgagtctgctttgccctgggatgaccatagaccacaagttacctggcggggggatggacagttttttgctgtgagtgttgtttgcccagaaacaggggctcggaaggtcagagtgtggaaccgagagtttgctttgcagtcaaccagtgagcctgtggcaggactgggaccagccctggcttggaaaccctcaggcrgtttgattgcatctacacaagataaacccaaccagcaggatattgtgttttttgagaaaaatggactycttcatggacactttacacttcccttccttaaagatgaggttaaggtaaatgacttgctctggaatgcagattcctctgtgcttgcagtctggctggaagaccttcagagagaaraaagctccattccgaaaacctgtgttcagctctggactgttggaaactatcactggtatctcaagcaaagtttatccttcagcacctgtgggaagagcaagattgtgtctctgatgtgggaccctgtgaccccataccggctgcatgttctctgtcagggctggcattacctcgcctatgattggcactggacgrctgaccggagcgtrggagataattcaagtgacttgtccaatgtggctgtcattgatggaaacagggtgttggtgacagtcttccggcagactgtggttccgcctcccatgtgcacctaccaactgctgttcccacaccctgtgaatcaagtcacattcttagcacaccctcaaaagagtaatgaccttgctgttctagatgccagtaaccagatttctgtttataaatgtggtgattgtccaagtgctgaccctacagtgaaactgggagctgtgggtggaagtggatttaaagtttgccttagaactcctcatttggaaaagagatacaaaatccagtttgagaataatgaagatcaagatgtaaacccgctgaaactaggccttctcacttggattgaagaagacgtcttcctggctgtaagccacagtgagttcagcccccrgtctgtcattcaccatttgactgcagcttcttctgagatggatgaagagcatggacagctcaatgtcagttcatctgcagcggtggatggggtcataatcagtctatgttgcaattccaagaccaagtcagtagtattacagctggytgatggccagatatttaagtacctttgggagtcaccktctctggctattaaaccatggaagaactctggtggatttcctgttcggtttccttatccatgcacccagaccgaattggccatgattggagaagaggaatgtgtccttggtctgactgacaggtgtcgctttttcatcaatgacattgaggttgcgtcaaatatcacrtcatttgcagtatatgatgagtttttattgttgacaacycattcccatacctgccagtgtttttgcctgagggatgcttcatttaaaacattacaggccggcctgagcagcaatcatgtgtcccatggggaagttctgcggaaagtggagaggggttcacsgattgtcactgttgtgccccaggacacaaagcttgtattacagatgccaaggggaaacttagaagttgttcatcatcgagccctggttttagctcagattcggaagtggttggacaaagaagaagatgtcacgaagaccatgtaccctgcaccagttaccagcagtgtctacctgtccagggatcctgacgggaataaamtagaccttgtctgcgatgctatgagagcagtcatggagagcatraatcctcataaatactgcctatccatacttacatctcatgtaaagaagacaaccscagaactggaaattgtactgcaaaaagtacacgagcttcaaggaaatgctccctctgatcctgatgctgtgagtgctgaagaggccttgaaatatttgctgcatctggtagatgttaatgaattatatgatcattctcttggcacctatgactttgatttggtcctcatggtagctgagaagtcacagaaggatcccaaagaatatcttccatttcttaatacacttaagaaaatggaaactaattatcagcggtttactatagacaaatacttgaaacgatatgaaaaagccattggccacctcagcaaatgtggacctgagtacttcccagaatgcttaaacttgataaaagataaaaacttgtataacgaagctctgaagttatattcaccaagctcacaacagtaccaggatatcagcattgcttatggggagcacctgatgcaggagcacatgtatgagccagcggggctcatgtttgcccgttgcrgtgcccacgagaaagctctctcagcctttctsacatgtggcaactggaagcaagccctctgtgtggcagcccagcttaactttaccaaagaccagctggtgggcctcggcagaactctggcaggaaagctggttgagcagaggaagcacattgatgcggccatggttttggaagagwgtgcccaggattatgaagaagctgtgctcttgctgttagaaggagctgcctgggaagaagctttgaggctggtatacaaatataacagactggatattatagaaaccaacgtaaagccttccattttagaaggtgagggttccattttagatagaattcctcatttggaagaagcccagaaaaattatatggcatttctggactctcagacagccacattcagtcgccacaagaaacgtttattggtagttcgagagctcaaggagcaagcccagcaggcaggtctggatgatgaggtacyccacgggcaagagtcagacctcttctctgaaactagcagtgtcgtgagtggcagtgagatgagtggcaaatactcccatagtaactccaggatatcagcgagatcatccaagaatcgccgaaaagcggagcggaagaagcacagcctcaaagaaggcagtccgmtggaggacctggccctcctggaggcactgagtgaagtggtgcagaacactgaaaacctgaaagatgaagtataccatattttaaaggtactctttctctttgagtttgatgaacaaggaagggaattacagaaggcctttgaagatacgctgcagttgatggaaaggtcacttccagaaatttggactcttacttaccagcagaattcagctaccccggttctaggtcccaattctactgcaaatagtatcatggcatcttatcagcaacagaagacttcggttcctgttcttgatgctgagctttttataccaccaaagatcaacagaagaacccagtggaagctgagcctgctagactgagtgactgcagttaggagggatccgacagagaagaccatttccactcattcctgttgtcctaccaccccttgctctttgagggctggctattgagaactggaaagagtaaaatgataacttaccttagcattgccaagaacttcagcagacaacaagcaattctatttattttatgttgtgtatacatcttgatcattagcaagacattaagctttaaccattatggcaccattttgtgagaatgattgttctttcacttgggctgtttgagagcataattatggtaatcatgagattaatgtttcatgatttctacctccaaagtgtgaagacaagtaaaacaatgtttctaaattgtcttattttgttggcggagaagattacaatggctattagtgctacatttggtcaaatgtaatcacttaaatagcttcwtgtcaccttaaactaaagcagaataaaaagtatcctttgaaattataagccctcctttgctgacagctattattttgtaacatcttaccaggtcatgtgctttcagttataactgggctgagcctcctataattacaatgtctatagggactgttttactgcctgtgtattttctgctagagagttagcaatgttagagctagaacagattagaatttctaaacagtatcatgcacagttggtgtgagtgatcagtgtgcattgtatggcatgcatggttgtgaattattctctgttctccaaatactgtttctttaactcagatatttttgttagtgtctaggccacttcatttatttttcgtcatggtactttactgacttctctttattcaattctccacgccctcaccaaaaaaaactgtctcaaaatgagaatattttattttcatggtgagtctagaaaacgcccacttcattctgattaaaaattcttccatgttttaaatatcagaaccagacctttcttactgtgtatcttagcccatttgtgtctctataacaacaaccagctttcaaaggaactaatagagtgaaaactcactcattaccacgaggatggcacaagcgattcacgtaggatctgcccctgtgaccaaaacacctcccattgggccccacttccaacactggtgatcacatttcaacatgaggtttagggaaacaaatgcctaaactacagcactgtacataaactaacaggaaatgctgcttttgatcctcaaagaagtgatatagccaaaattgtaatttaagaagcctttgccagtatagcaagatgttaactatagaatcaatctaggagtattcactgtaaaattcaacttttctgtatgtttgaacattttcacaatctmataggagtttttaaaaagaagagaaagaagatatactttgctttggagaaatctactttttgacttacatgggtttgctgtaattaagtgcccaatattgaaaggctgcaagtactttgtaatcactctttggcatgggtaaataagcatggtaacttatattgaaatatagtgctcttgctttggataactgtaaagggacccatgctgatagactggaaatagaagtaaatgtgtttattgataa

SEQ ID NO: 323 - DNA, 7798 bp, Homo sapiens
actcggtggaaaaataacgaaagaaaggcagagaggaagtagcgagagaagagagaaaatgaagtcggcgctgggggagcctgcaggagggtggccaacagtggaggaaggtggatttggcttcttttccgcaccccgggcgtgaaagccctctccaacgcgaccccaggaaataagtgggtctcgcctgggcagraaaggaaaagaatccaggsgrgagcgcgtcgctcctctgtcactgctgcccccgaggaactccggctrcttctyatcccggccgcctcgcggggccggacgcagtgcccgaggcgccctgcagatggggcgggcagggaacgggcgctccagctgcgggtgacaggcgccggcccgcccgcctgcctgctcagcgcagtgaccgggcgggcagaggatgccaggcggagggacctgggagcgggatctgagactgccggaggcgcgctacgctccaacttgcatggcctagagaccgctccagctcctgggwccgcttcaccgagtggagtgaagctgcgcgcgggacctggaggcggagacctcaggcagcggctgcagaggggcgagccgggcgcaggagggggcgcgctttctccctgcgggtctcagtaatgaggagactgagtttgtggtggctgctgagcagggtctgtctgctgttgccgccgccctgcgcactggtgctggccggggtgcccagctcctcctcgcacccgcagccctgccagatcctcaagcgcatcgggcacgcggtgagggtgggcgcggtgcacttgcagccctggaccaccgccccccgcgcggccagccgcgctccggacgacagccgagcaggagcccagagggatgagccggagccagggactaggcggtccccggcgccctcgccgggcgcacgctggttggggagcaccctgcatggccgggggccgccgggctcccgtaagcccggggagggcgccagggcggaggccctgtggccacgggacgccctcctatttgccgtggacaacctgaaccgcgtggaagggctgctaccctacaacctgtctttggaagtagtgatggccatcgaggcaggcctgggcgatctgccacttttgcccttctcctcccctagttcgccatggagcagtgaccctttctccttcctgcaaagtgtgtgccataccgtggtggtgcaaggggtgtcggcgctgctcgccttcccccagagccagggcgaaatgatggagctcgacttggtcagcttagtcctgcacattccagtgatcagcatcgtgcgccacgagtttccrcgggagagtcagaatccccttcacctacaactgagtttagaaaattcattaagttctgatgctgatgtcactgtctcaatcctgaccatgaacaactggtacaattttagcttgttgctgtgccaggaagactggaacatcaccgacttcctcctccttacccagaataattccaagttccaccttggttctatcatcaayatcaccgctaacctcccctccacccaggacctcttgagcttcctacagatccagcttgagagtattaagaacagcacacccacagtggtgatgtttggctgcgacatggaaagtatccggcggattttcgaaattacaacccagtttggggtcatgccccctgaacttcgttgggtgctgggagattcccagaatrtggaggaactgaggacagagggtctgcccttaggrctcattgctcatggaaaaacaacacagtctgtctttgagcactacgtacaagatgctatggagctggtcgcaagagctgtagccacagccaccatgatccaaccagaacttgctctcattcccagcacgatgaactgcatggaggtggaaactacaaatctcacttcaggacaatatttatcaaggtttctagccaataccactttcagaggcctcagtggttccatyagagtaaaaggttccaccatcgtcagctcagaaaacaactttttcatctggaatcttcaacatgaccccatgggaaagccaatgtggacccrcttgggcagctggcaggggrgaaagattgtcatggactatggaatatggccagagcaggcccagagacacaaaacccacttccaacatccaagtaagctacacttgagagtggttaccctgattgagcatccttttgtcttcacaagggaggtagatgatgaaggcttgtgccctgctggccaactctgtctagaccccatgactaatgactcttccacaytggacagcctttttagcagcctccatagcagtaatgatacagtgcccattaaattcaagaagtgctgctatggatattgcattgatctgctggaaaagatagcagaagacatgaactttgacttcgacctctatattgtaggggatggaaagtatggagcmtggaaaaatgggcactggactgggctagtgggtgatctcctgagagggactgcccacatggcagtcacttcctttagcatcaatactgcacggagccaggtgatagatttcaccagccctttcttctccaccagcttgggcatcttagtgaggacccgagatacagcagctcccattggagccttcatgtggccactccactggacaatgtggctggggatttttgtggctctgcacatcactgccgtcttcctcactctgtatgaatggaagagtccatttggtttgactcccaaggggcgaaatagaagtaaagtcttctccttttcttcagccttgaacatctgttatgccctcttgtttggcagaacagtggccatcaaacctccaaaatgttggactggaaggtttctaatgaacctttgggccattttctgtatgttttgcctttccacatacacggcaaacttggctgctgtcatggtaggtgagaagatctatgaagagctttctggaatacatgaccccaagttacatcatccttcccaaggattccgctttggaactgtccgagaaagcagtgctgaagattatgtgagacaaagtttcccagagatgcatgaatatatgagaaggtacaatgttccagccacccctgatggagtggagtatctgaagaayratccagagaaactagacrccttcatcatggacaaagcccttctggattatgaagtgtcaatagatgctgactgcaaacttctcactgtggggaagccatttgccatagaaggatacggcattggcctcccacccaactctccattgaccgccaacatatccgagctaatcagtcaatacaagtcacatgggtttatggatatgctccatgacaagtggtacagggtggttccctgtggcaagagaagttttgctgtcacggagactttgcaaatgggcatcaaacacttctctgggctctttgtgctgctgtgcattggatttggtctgtccattttgaccaccattggtgagcacatagtatacaggctgctgctaccacgaatcaaaaacaaatccaagctgcaatactggctccacaccagccagagattacacagagcaataaatacatcatttatagaggaaaagcagcagcatttcaagaccaaacgtgtggaaaagaggtctaatgtgggaccccgtcagcttaccgtatggaatacttccaatctgagtcatgacaaccgacggaaatacatctttagtgatgaggaaggacaaaaccagctrggcatccrgatccaccaggacatccccctccctccaaggagaagagagctccctgccttgcggaccaccaatgggaaagcagactccctaaatgtatctcggawctcagtgatgcaggaactctcagagctcgagaagcagattcaggtgatccgtcaggagctgcagctggctgtgagcaggaaaacggagctggaggagtatcaaaggacaagtcggacttgtgagtcctaggtgaccacactgcttccctttctcagttcctgaccttcctctgagcccttgagacactttgtaatgctcttttgtaactatcgacaaaggtgtggggaagctgaggtctaggtcttcttaaaggtcaagtctgctctccctcgcctaaagtgcagcagcagctcctctcaagctcactctctaggtctccagggtaggagtgtttttctagcaagaatcttagtcaggagtaagctctgtgcgagagatctgtgaataaccagataaccccagctgccgttaaccttttcaccaggtgccacagtaatatttctggtttttagccctttctctgcactaccaacaagagataaaattgttactcacacttatgtcttactgggttgctggttttcatcgtaacacagaacgaggttatctagggttgtagcttttgatacaactccccgatctagatttattcctacattctgaatggggagcaggtaagagcagagcacctcccactgggggtggggtatttaaaaattaactcattagtatcataaacgtcaaggattgattggaccaggcaagagccatgtttttgagaaggttctggatctctgactccatcctgactgtttagtaagagcatgcttacaccctactgtgaaaaggggaggggatgtggtaagcrgaaacagaagacaggcagcagaggcattaaaaatgcataccatgctttcagaacaaaagctctgggccagaaaggcaatttggctaaaaaatgaataagactacttctaatgtaactaagcatctccactatggtgtgtgccttttataaaggaaaagagagaaaaaggcaaagcaaggttgtggccttaggttggacctggaatatcccttattgcctataatggaatatgtgacactgtgggtgaaatgttctacacaccacacactaggccattttcagatcagcagtcacccatcgcttagcatagaaatcccaaaacctccagcccgggaacactataagcttcgaccattcaggaatctgccctgcactttgcatatctgtatagaaaatcaagtcaatcccccatcctcacacccactcatctctgaggagctatgaactggttttggtccctctaatgatcctccagcctcatctaatgccccccaaagactgatacaagtaacctcccctctgcttaggtgtcactttctcagcatatcaagtttaggcagcaagggaaaggaatatgggtcagttctcaaatgtcaatgtagataagagtcatctagtagagaactcatcagagtgcggattgccaagacccttctccagagattatggggttgggggtggaggtctagaggtgagctcagaaacctactgttaaccaacacccccaagtgactgacacaggtggtctaaaaattacttttctagaaacaccattctggaagtttggctgcccacaggcaggaggagaagcatgaagagaaaacctgtttgagaagttttgttttgttttgttttgctttttaataattttagcacacatctgctgactctccttcaacatcctcacccccayccctgggcaccatttaggacaagacttccttatttatcaattacttgatttatcttctcaggactcattgttccacccccaaccaatttgaatgcctacaataagttcaggagctgtgccaagcactttcctcttttacagctggagatcactggaaaggtgtctcagtcacaaaacttctccctctactactggatgaaatgtctgcatttccaccaaaatctacccagtcacccagggaataacaacttaagctgtagttagataacacctagtgattaattggctgagaaaaccctggagtggagggaggctcagagatactgatatggatgtgggagggctctaaagttagaggtcaccaactccacagatgaaacagttcaataatgaggaaacaggtgagccctgaaaacacaaaaggacagttctgtgttgaaacaccccatcccctcacgttctcaccccaggcccagaagtaggttgcaactgcctttggaagattttgccccttagccatccccacccacttgtaccagctaagaatgctggagactctgccaccatgctctgcgtgcccctgaacctctgtgcagcccggaaggctgatgtacaggtgtacctcaatccacattacagccatgctcctaatgtacatggacatttttgtaactcagctcatattctgactgtatttgagaagctggctgtttaagggaacccagaagtgaattcttttgtaaagtaaagcacccttttgtaatgcaattaattatcccttaatgtatctgttttgtaagtctgcatttttgtatatcggrtttaccttaagcttctctagtgaggcattctgagcagtggtgatcacatgccagatcgccctgcctatccacaaagtagatgaccaatgcacgctcctcaaacatctttggaggaactacctggccaaaacactggccaggatgcagcaagcagcagcaggggctgacagcaggcttactgccatcaacattgcttgaaatgcctctatgttctgaataaagaaaaaccataattgcttgtggtgaaacgaagcagtcttcatgttaagtagcaatggttatttttattggtagtaactgaacagtgttttgcaatttgtgaaacagtgtattgtgttttgtaaaatgatgtcatgaaatggtgggtccttggaaacctcctttccgttcagctctgcctctgttctttcaactcctttgaggctcaaaaaaaacacaaagatcagaagccttcagatagagggtggtattctggtaaagaagaaagagataagggacgctaccttgcttttctggcacaggaagcacatgataaagcatgctcagakgagctggaacagatatagctacctggttcgtgtaaataagaataatcaaggccccagagtgtgtatgcttccaggtggaggagaaaggggaatctcccaaaatttaaaaacaaattggaagaataaccaggacagccaagtgaagcagccacagggacccaagcagtcgaggtctttaatgtgcctggagatgactctctgctattcatgaatcttgctattgcacaaaccctatcaagagctgctgcttcccttccagccagaaaagtggtaagcggagcaagtgccaagcagaacagaccttatcatctgggtaacagacttctcagtgttggtgctgtgtctgttagagccttagagcaagttaagcacttccttggtgtgggtaaagaataaaggggaaagaaactactttagagcctctttttctcccaactcatatttttgataggaaaaacagaaaacccatccagttcttcagaaattgctttctaggcattaatactactttactatctatactgtttagttattcctttctttacccacctaaactatccatctaatccaggattccctcactctttttttttagttactaatcattttatgaaaataatgtatttataagtattttcttaaggtttgtgaagagtatttgcattgtgtcttcattttaatgtgtttgcaatcgctccgctccaggaagaacggaaatgctgtcttgtgagcatgaagtgaacgggctgttttgctccagccacttttcttgtacaaccacatggatggattagatgtcctcaggtcttttccatcttcagtttctatgactgtggaataaatgttcagatagaaacttc

SEQ ID NO: 324 - DNA, 3394 bp, Homo sapiens
cccgcaggctcggtgaatcgaacgttgagcagggcggtgggtggtgcggagtgccgagcggcctcacccccaaccgtcggcccagtcggacggttccgaggcgttgccgggagccgggcgcggctctgtgtggactcggagaaacgcggggcgtctgcctgagcccgcttttckacaagatgtggggatttttgaagcgccctgtagtggtgacggctgacatcaacttgagccttgtggccctgactgggatggggttactgagccggctgtggcgactcacctacccgcgggctgtggtttttgacgaagtatattatgggcagtacatctctttttacatgaaacaaatcttcttcttggatgacagtgggccgccatttggccacatggtgctggccttgrgaggttatttaggaggattcgatggcaattttttgtggaacagaattggagcagaatacagtagcaacgtgcctgtgtggtccctgcgcctgctgccagcactcgcgggggccttgtcggtccccatggcctaccagatagtgttggagctccacttttctcattgtgccgccatgggagctgctctgttgatgcttatcgagaatgctctcatcactcagtcaaggctaatgcttttggaatcagtgttaatatttttcaatctattggccgtgttgtcctacctgaagttcttcaactgccaaaagcacagccctttttctctgagctggtggttctggctaacactgacaggggtcgcttgttcctgtgcagtgggcatcaagtacatgggtgtgttcacgtacgtgctcgtgctgggtgttgcagctgtccatgcctggcacctgcttggagaccagactttgtccaatgtaggtgctgatgtccagkgctgcatgaggccggcctgtrtggggcagatgyrgatgtcacagggggtctgtgtgttctgtcacttgctcgcccgagcagtggctttgctggtcatcccggtcgtcctgtacttactgttcttctacgtccacttgattctagtcttccgctctgggccccacgaccaaatcatgtccagtgccttcyaggccagcttagagggaggactagctcggatcacycagggtcagccactggaggtggcctttgggtcccagrtcactctgaggaacgtctttgggaaacctgtgccctgctggcttcattcccaccaggacacctaccccatgatatatgagaacggccgaggcagctcccaccagcaacaggtgacctgttaccccttcaaagaygtcaataactggtggattgtaaaggatcccaggaggcacyagctggtggtgagcagccctccgagacctgtgaggcayggggacatggtgcagctggtccacggcatgaccacccgctccctgaacacgcatgatgttgcagcccccctgagcccccattcacaggaggtctcctgctacattgamtataacatctccatgcccgcccagaacctctggagactggarattgtgaacagaggatctgacacagacgtctggaagaccatcctctcagaggtccgctttgtgcacgtgaacacttccgctgtcttaaagctgagcggggctcacctccctgactgggggtatcggcaactggagatcgtcggggagaagctgtcccggggctaccacgggagcacggtgtggaacgtggaggagcaccgatayggcgcgagccaggagcagagggagcgggaacgggagctgcactcacctgcgcaggtggacgtcagcaggaacctcagcttcatggcgagattctcggagctgcagtggaggatgctggcgctgagaagtgatgactcggaacacaagtacagctccagcccactggagtgggtcaccctggacaccaatattgcctactggctgcaccccagraccagcgctcagatccacctacttggaaacatagtgatctgggtttcgggcagcctcgctctggccatctacgccctgctgtccttgtggtacctgctccgacggcgaagaaatgtccatgacctccctcaggatgcctggctgcgctgggtgctggctggggygctgtgtgccggtggctgggcagtgaactacctcccgttcttcctgatggagaagacactcttcctctaccactacctgcccgcactcaccttccaaatccttctgctccctgtggtcctgcagcacatcagcgaccacctgtgcaggtcccagctccagaggagcatcttcagcgccctggtggtggcctggtactcctccgcgtgccacgtgtccaacacgctgcgcccactcacctacggggacaagtcactctcgccacatgaactcaaggcccttcgctggaaagacagctgggacatcttgatccgaaaacactagaacaagagtgtggcaaagaacacccgtgctggggtcgggaygaggttgaagggtcttggtcaatgtacgtaatgagcagggtgggccccacgctgggaggacacgggctgggctgagcagggcctctagtggaacacatgggggtctcattgaaaagctctctgatgagcacctccttttgtgcaaagttaattttttctcgacaataaagatattccgtgtcttyacccctgaactaagacacagggagtatttcagaggccagcgtaggagtcatcgacaacraaaagccgagaacccagggccagcagtggagcctcagcagaccagggcctggtccttgctaattgctgcagggtggagtttgatctggcagacccgatcctccttcatgaacacccagcaacctgagcaagtcccrgccctgccctcagcgagcccggcaggcgtccygggacagctcagtgttggagggccacctgaaccacgagccagggctggggcttgcatgtcattgtctatgacagcgtcaagactggcccttggcaccgtgctgtgtggaaaccctcccctctgagactccactgagacgtggctgagtgaaatyttcctcgtcagtggtcaaggtgtgtcatccatacagctccatgcctttgtcttttttaaatgtaattaaaaaaggaaccaactggcgtttgtagttggkgtttgttatttattgattctccctccaaaggggcctaagctcgacaaaaccgttacagttgtcagaacccagccacagggctcagcccccttcccccacgtcacgtctgcatcactactgtgggtgagcctggacggacgggggctggggctgcccrtggcagcggcaagggatgctttccagagacagccaccackcaggagggaggatcaccccaggcaacccagacacgggtgttcacatgtgaggctgtgagctccacata

SEQ ID NO: 325 - DNA, 3245 bp, Homo sapiens
ggcgtctgcctgagcccgcttttckacaagatgtggggatttttgaagcgccctgtagtggtgacggctgacatcaacttgagccttgtggccctgactgggatggggttactgagccggctgtggcgactcacctacccgcgggctgtggtttttgacgaagtatattatgggcagtacatctctttttacatgaaacaaatcttcttcttggatgacagtgggccgccatttggccacatggtgctggccttgrgaggttatttaggaggattcgatggcaattttttgtggaacagaattggagcagaatacagtagcaacgtgcctgtgtggtccctgcgcctgctgccagcactcgcgggggccttgtcggtccccatggcctaccagatagtgttggagctccacttttctcattgtgccgccatgggagctgctctgttgatgcttatcgagaatgctctcatcactcagtcaaggctaatgcttttggaatcagtgttaatatttttcaatctattggccgtgttgtcctacctgaagttcttcaactgccaaaagcacagccctttttctctgagctggtggttctggctaacactgacaggggtcgcttgttcctgtgcagtgggcatcaagtacatgggtgtgttcacgtacgtgctcgtgctgggtgttgcagctgtccatgcctggcacctgcttggagaccagactttgtccaatgtaggtgctgatgtccagkgctgcatgaggccggcctgtrtggggcagatgyrgatgtcacagggggtctgtgtgttctgtcacttgctcgcccgagcagtggctttgctggtcatcccggtcgtcctgtacttactgttcttctacgtccacttgattctagtcttccgctctgggccccacgaccaaatcatgtccagtgccttcyaggccagcttagagggaggactagctcggatcacycagggtcagccactggaggtggcctttgggtcccagrtcactctgaggaacgtctttgggaaacctgtgccctgctggcttcattcccaccaggacacctaccccatgatatatgagaacggccgaggcagctcccaccagcaacaggtgacctgttaccccttcaaagaygtcaataactggtggattgtaaaggatcccaggaggcacyagctggtggtgagcagccctccgagacctgtgaggcayggggacatggtgcagctggtccacggcatgaccacccgctccctgaacacgcatgatgttgcagcccccctgagcccccattcacaggaggtctcctgctacattgamtataacatctccatgcccgcccagaacctctggagactggarattgtgaacagaggatctgacacagacgtctggaagaccatcctctcagaggtccgctttgtgcacgtgaacacttccgctgtcttaaagctgagcggggctcacctccctgactgggggtatcggcaactggagatcgtcggggagaagctgtcccggggctaccacgggagcacggtgtggaacgtggaggagcaccgatayggcgcgagccaggagcagagggagcgggaacgggagctgcactcacctgcgcaggtggacgtcagcaggaacctcagcttcatggcgagattctcggagctgcagtggaggatgctggcgctgagaagtgatgactcggaacacaagtacagctccagcccactggagtgggtcaccctggacaccaatattgcctactggctgcaccccagraccagcgctcagatccacctacttggaaacatagtgatctgggtttcgggcagcctcgctctggccatctacgccctgctgtccttgtggtacctgctccgacggcgaagaaatgtccatgacctccctcaggatgcctggctgcgctgggtgctggctggggygctgtgtgccggtggctgggcagtgaactacctcccgttcttcctgatggagaagacactcttcctctaccactacctgcccgcactcaccttccaaatccttctgctccctgtggtcctgcagcacatcagcgaccacctgtgcaggtcccagctccagaggagcatcttcagcgccctggtggtggcctggtactcctccgcgtgccacgtgtccaacacgctgcgcccactcacctacggggacaagtcactctcgccacatgaactcaaggcccttcgctggaaagacagctgggacatcttgatccgaaaacactagaacaagagtgtggcaaagaacacccgtgctggggtcgggaygaggttgaagggtcttggtcaatgtacgtaatgagcagggtgggccccacgctgggaggacacgggctgggctgagcagggcctctagtggaacacatgggggtctcattgaaaagctctctgatgagcacctccttttgtgcaaagttaattttttctcgacaataaagatattccgtgtcttyacccctgaactaagacacagggagtatttcagaggccagcgtaggagtcatcgacaacraaaagccgagaacccagggccagcagtggagcctcagcagaccagggcctggtccttgctaattgctgcagggtggagtttgatctggcagacccgatcctccttcatgaacacccagcaacctgagcaagtcccrgccctgccctcagcgagcccggcaggcgtccygggacagctcagtgttggagggccacctgaaccacgagccagggctggggcttgcatgtcattgtctatgacagcgtcaagactggcccttggcaccgtgctgtgtggaaaccctcccctctgagactccactgagacgtggctgagtgaaatyttcctcgtcagtggtcaaggtgtgtcatccatacagctccatgcctttgtcttttttaaatgtaattaaaaaaggaaccaactggcgtttgtagttggkgtttgttatttattgattctccctccaaaggggcctaagctcgacaaaaccgttacagttgtcagaacccagccacagggctcagcccccttcccccacgtcacgtctgcatcactactgtgggtgagcctggacggacgggggctggggctgcccrtggcagcggcaagggatgctttccagagacagccaccackcaggagggaggatcaccccaggcaacccagacacgggtgttcacatgtgaggctgtgagctccacata

SEQ ID NO: 326 - DNA, 3493 bp, Homo sapiens
cgagccccgaagtaagaactccgtggcgcgtgcagccctagggaggaagggcgtgctgcgggtgcagtctcaggggcgtctgcctgagcccgcttttckacaagatgtggggatttttgaagcgccctgtagtggtgacggctgacatcaacttgagccttgtggccctgactgggatggggttactgagccggctgtggcgactcacctacccgcgggctgtggtttttgacgaagtatattatgggcagtacatctctttttacatgaaacaaatcttcttcttggatgacagtgggccgccatttggccacatggtgctggccttgrgaggttatttaggaggattcgatggcaattttttgtggaacagaattggagcagaatacagtagcaacgtgcctgtgtggtccctgcgcctgctgccagcactcgcgggggccttgtcggtccccatggcctaccagatagtgttggagctccacttttctcattgtgccgccatgggagctgctctgttgatgcttatcgagaatgctctcatcactcagtcaaggctaatgcttttggaatcagtgttaatatttttcaatctattggccgtgttgtcctacctgaagttcttcaactgccaaaagcacagccctttttctctgagctggtggttctggctaacactgacaggggtcgcttgttcctgtgcagtgggcatcaagtacatgggtgtgttcacgtacgtgctcgtgctgggtgttgcagctgtccatgcctggcacctgcttggagaccagactttgtccaatgtaggtgctgatgtccagkgctgcatgaggccggcctgtrtggggcagatgyrgatgtcacagggggtctgtgtgttctgtcacttgctcgcccgagcagtggctttgctggtcatcccggtcgtcctgtacttactgttcttctacgtccacttgattctagtcttccgctctgggccccacgaccaaatcatgtccagtgccttcyaggccagcttagagggaggactagctcggatcacycagggtcagccactggaggtggcctttgggtcccagrtcactctgaggaacgtctttgggaaacctgtgccctgctggcttcattcccaccaggacacctaccccatgatatatgagaacggccgaggcagctcccaccagcaacaggtgacctgttaccccttcaaagaygtcaataactggtggattgtaaaggatcccaggaggcacyagctggtggtgagcagccctccgagacctgtgaggcayggggacatggtgcagctggtccacggcatgaccacccgctccctgaacacgcatgatgttgcagcccccctgagcccccattcacaggaggtctcctgctacattgamtataacatctccatgcccgcccagaacctctggagactggarattgtgaacagaggatctgacacagacgtctggaagaccatcctctcagaggtccgctttgtgcacgtgaacacttccgctgtcttaaagctgagcggggctcacctccctgactgggggtatcggcaactggagatcgtcggggagaagctgtcccggggctaccacgggagcacggtgtggaacgtggaggagcaccgatayggcgcgagccaggagcagagggagcgggaacgggagctgcactcacctgcgcaggtggacgtcagcaggaacctcagcttcatggcgagattctcggagctgcagtggaggatgctggcgctgagaagtgatgactcggaacacaagtacagctccagcccactggagtgggtcaccctggacaccaatattgcctactggctgcaccccagraccagcgctcagatccacctacttggaaacatagtgatctgggtttcgggcagcctcgctctggccatctacgccctgctgtccttgtggtacctgctccgacggcgaagaaatgtccatgacctccctcaggatgcctggctgcgctgggtgctggctggggygctgtgtgccggtggctgggcagtgaactacctcccgttcttcctgatggagaagacactcttcctctaccactacctgcccgcactcaccttccaaatccttctgctccctgtggtcctgcagcacatcagcgaccacctgtgcaggtcccagctccagaggagcatcttcagcgccctggtggtggcctggtactcctccgcgtgccacgtgtccaacacgctgcgcccactcacctacggggacaagtcactctcgccacatgaactcaaggcccttcgctggaaagacagctgggacatcttgatccgaaaacactagaacaagagtgtggcaaagaacacccgtgctggggtcgggaygaggttgaagggtcttggtcaatgtacgtaatgagcagggtgggccccacgctgggaggacacgggctgggctgagcagggcctctagtggaacacatgggggtctcattgaaaagctctctgatgagcacctccttttgtgcaaagttaattttttctcgacaataaagatattccgtgtcttyacccctgaactaagacacagggagtatttcagaggccagcgtaggagtcatcgacaacraaaagccgagaacccagggccagcagtggagcctcagcagaccagggcctggtccttgctaattgctgcagggtggagtttgatctggcagacccgatcctccttcatgaacacccagcaacctgagcaagtcccrgccctgccctcagcgagcccggcaggcgtccygggacagctcagtgttggagggccacctgaaccacgagccagggctggggcttgcatgtcattgtctatgacagcgtcaagactggcccttggcaccgtgctgtgtggaaaccctcccctctgagactccactgagacgtggctgagtgaaatyttcctcgtcagtggtcaaggtgtgtcatccatacagctccatgcctttgtcttttttaaatgtaattaaaaaaggaaccaactggcgtttgtagttggkgtttgttatttattgattctccctccaaaggggcctaagctcgacaaaaccgttacagttgtcagaacccagccacagggctcagcccccttcccccacgtcacgtctgcatcactactgtgggtgagcctggacggacgggggctggggctgcccrtggcagcggcaagggatgctttccagagacagccaccackcaggagggaggatcaccccaggcaacccagacacgggtgttcacatgtgaggctgtgagctccacatacagtgggtgtgggtgggcgtccccaggctcagtccctgaacacacatgccgggcgggagacctgccctgaggctcggcagcccctcagtggggtctgctgctggactccaaatgtgaccgtttgccagaggtcrgcatcccagggtggtcccctggctcagaaaaggtccgctt

SEQ ID NO: 327 - DNA, 3427 bp, Homo sapiens
cgagccccgaagtaagaactccgtggcgcgtgcagccctagggaggaagggcgtgctgcgggtgcagtctcaggggcgtctgcctgagcccgcttttckacaagatgtggggatttttgaagcgccctgtagtggtgacggctgacatcaacttgagccttgtggccctgactgggatggggttactgagccggctgtggcgactcacctacccgcgggctgtggtttttgacgaagtatattatgggcagtacatctctttttacatgaaacaaatcttcttcttggatgacagtgggccgccatttggccacatggtgctggccttgrgaggttatttaggaggattcgatggcaattttttgtggaacagaattggagcagaatacagtagcaacgtgcctgtgtggtccctgcgcctgctgccagcactcgcgggggccttgtcggtccccatggcctaccagatagtgttggagctccacttttctcattgtgccgccatgggagctgctctgttgatgcttatcgagaatgctctcatcactcagtcaaggctaatgcttttggaatcagtgttaatatttttcaatctattggccgtgttgtcctacctgaagttcttcaactgccaaaagcacagccctttttctctgagctggtggttctggctaacactgacaggggtcgcttgttcctgtgcagtgggcatcaagtacatgggtgtgttcacgtacgtgctcgtgctgggtgttgcagctgtccatgcctggcacctgcttggagaccagactttgtccaatgtctgtgtgttctgtcacttgctcgcccgagcagtggctttgctggtcatcccggtcgtcctgtacttactgttcttctacgtccacttgattctagtcttccgctctgggccccacgaccaaatcatgtccagtgccttcyaggccagcttagagggaggactagctcggatcacycagggtcagccactggaggtggcctttgggtcccagrtcactctgaggaacgtctttgggaaacctgtgccctgctggcttcattcccaccaggacacctaccccatgatatatgagaacggccgaggcagctcccaccagcaacaggtgacctgttaccccttcaaagaygtcaataactggtggattgtaaaggatcccaggaggcacyagctggtggtgagcagccctccgagacctgtgaggcayggggacatggtgcagctggtccacggcatgaccacccgctccctgaacacgcatgatgttgcagcccccctgagcccccattcacaggaggtctcctgctacattgamtataacatctccatgcccgcccagaacctctggagactggarattgtgaacagaggatctgacacagacgtctggaagaccatcctctcagaggtccgctttgtgcacgtgaacacttccgctgtcttaaagctgagcggggctcacctccctgactgggggtatcggcaactggagatcgtcggggagaagctgtcccggggctaccacgggagcacggtgtggaacgtggaggagcaccgatayggcgcgagccaggagcagagggagcgggaacgggagctgcactcacctgcgcaggtggacgtcagcaggaacctcagcttcatggcgagattctcggagctgcagtggaggatgctggcgctgagaagtgatgactcggaacacaagtacagctccagcccactggagtgggtcaccctggacaccaatattgcctactggctgcaccccagraccagcgctcagatccacctacttggaaacatagtgatctgggtttcgggcagcctcgctctggccatctacgccctgctgtccttgtggtacctgctccgacggcgaagaaatgtccatgacctccctcaggatgcctggctgcgctgggtgctggctggggygctgtgtgccggtggctgggcagtgaactacctcccgttcttcctgatggagaagacactcttcctctaccactacctgcccgcactcaccttccaaatccttctgctccctgtggtcctgcagcacatcagcgaccacctgtgcaggtcccagctccagaggagcatcttcagcgccctggtggtggcctggtactcctccgcgtgccacgtgtccaacacgctgcgcccactcacctacggggacaagtcactctcgccacatgaactcaaggcccttcgctggaaagacagctgggacatcttgatccgaaaacactagaacaagagtgtggcaaagaacacccgtgctggggtcgggaygaggttgaagggtcttggtcaatgtacgtaatgagcagggtgggccccacgctgggaggacacgggctgggctgagcagggcctctagtggaacacatgggggtctcattgaaaagctctctgatgagcacctccttttgtgcaaagttaattttttctcgacaataaagatattccgtgtcttyacccctgaactaagacacagggagtatttcagaggccagcgtaggagtcatcgacaacraaaagccgagaacccagggccagcagtggagcctcagcagaccagggcctggtccttgctaattgctgcagggtggagtttgatctggcagacccgatcctccttcatgaacacccagcaacctgagcaagtcccrgccctgccctcagcgagcccggcaggcgtccygggacagctcagtgttggagggccacctgaaccacgagccagggctggggcttgcatgtcattgtctatgacagcgtcaagactggcccttggcaccgtgctgtgtggaaaccctcccctctgagactccactgagacgtggctgagtgaaatyttcctcgtcagtggtcaaggtgtgtcatccatacagctccatgcctttgtcttttttaaatgtaattaaaaaaggaaccaactggcgtttgtagttggkgtttgttatttattgattctccctccaaaggggcctaagctcgacaaaaccgttacagttgtcagaacccagccacagggctcagcccccttcccccacgtcacgtctgcatcactactgtgggtgagcctggacggacgggggctggggctgcccrtggcagcggcaagggatgctttccagagacagccaccackcaggagggaggatcaccccaggcaacccagacacgggtgttcacatgtgaggctgtgagctccacatacagtgggtgtgggtgggcgtccccaggctcagtccctgaacacacatgccgggcgggagacctgccctgaggctcggcagcccctcagtggggtctgctgctggactccaaatgtgaccgtttgccagaggtcrgcatcccagggtggtcccctggctcagaaaaggtccgctt

SEQ ID NO: 328 - DNA, 3591 bp, Homo sapiens
cccgcaggctcggtgaatcgaacgttgagcagggcggtgggtggtgcggagtgccgagcggcctcacccccaaccgtcggcccagtcggacggttccgaggcgttgccgggagccgggcgcggctctgtgtggactcggagaaacgcggggcgtctgcctgagcccgcttttckacaagatgtggggatttttgaagcgccctgtagtggtgacggctgacatcaacttgagccttgtggccctgactgggatggggttactgagccggctgtggcgactcacctacccgcgggctgtggtttttgacgaagtatattatgggcagtacatctctttttacatgaaacaaatcttcttcttggatgacagtgggccgccatttggccacatggtgctggccttgrgaggttatttaggaggattcgatggcaattttttgtggaacagaattggagcagaatacagtagcaacgtgcctgtgtggtccctgcgcctgctgccagcactcgcgggggccttgtcggtccccatggcctaccagatagtgttggagctccacttttctcattgtgccgccatgggagctgctctgttgatgcttatcgagaatgctctcatcactcagtcaaggctaatgcttttggaatcagtgttaatatttttcaatctattggccgtgttgtcctacctgaagttcttcaactgccaaaagcacagccctttttctctgagctggtggttctggctaacactgacaggggtcgcttgttcctgtgcagtgggcatcaagtacatgggtgtgttcacgtacgtgctcgtgctgggtgttgcagctgtccatgcctggcacctgcttggagaccagactttgtccaatgtaggtgctgatgtccagkgctgcatgaggccggcctgtrtggggcagatgyrgatgtcacagggggtacttggtgaaaagactccaatcctcaatgttttagaagcaggcaggcctgggcagcctcgcctcttggcctctgcaggtgcctctgtatgggaggccagagtttctgtcactaactttttctaagctcacaatgtctagaggtgggtrcgcttttccacgcagtggaacatgacttttctttgaatctctggcaggtctgtgtgttctgtcacttgctcgcccgagcagtggctttgctggtcatcccggtcgtcctgtacttactgttcttctacgtccacttgattctagtcttccgctctgggccccacgaccaaatcatgtccagtgccttcyaggccagcttagagggaggactagctcggatcacycagggtcagccactggaggtggcctttgggtcccagrtcactctgaggaacgtctttgggaaacctgtgccctgctggcttcattcccaccaggacacctaccccatgatatatgagaacggccgaggcagctcccaccagcaacaggtgacctgttaccccttcaaagaygtcaataactggtggattgtaaaggatcccaggaggcacyagctggtggtgagcagccctccgagacctgtgaggcayggggacatggtgcagctggtccacggcatgaccacccgctccctgaacacgcatgatgttgcagcccccctgagcccccattcacaggaggtctcctgctacattgamtataacatctccatgcccgcccagaacctctggagactggarattgtgaacagaggatctgacacagacgtctggaagaccatcctctcagaggtccgctttgtgcacgtgaacacttccgctgtcttaaagctgagcggggctcacctccctgactgggggtatcggcaactggagatcgtcggggagaagctgtcccggggctaccacgggagcacggtgtggaacgtggaggagcaccgatayggcgcgagccaggagcagagggagcgggaacgggagctgcactcacctgcgcaggtggacgtcagcaggaacctcagcttcatggcgagattctcggagctgcagtggaggatgctggcgctgagaagtgatgactcggaacacaagtacagctccagcccactggagtgggtcaccctggacaccaatattgcctactggctgcaccccagraccagcgctcagatccacctacttggaaacatagtgatctgggtttcgggcagcctcgctctggccatctacgccctgctgtccttgtggtacctgctccgacggcgaagaaatgtccatgacctccctcaggatgcctggctgcgctgggtgctggctggggygctgtgtgccggtggctgggcagtgaactacctcccgttcttcctgatggagaagacactcttcctctaccactacctgcccgcactcaccttccaaatccttctgctccctgtggtcctgcagcacatcagcgaccacctgtgcaggtcccagctccagaggagcatcttcagcgccctggtggtggcctggtactcctccgcgtgccacgtgtccaacacgctgcgcccactcacctacggggacaagtcactctcgccacatgaactcaaggcccttcgctggaaagacagctgggacatcttgatccgaaaacactagaacaagagtgtggcaaagaacacccgtgctggggtcgggaygaggttgaagggtcttggtcaatgtacgtaatgagcagggtgggccccacgctgggaggacacgggctgggctgagcagggcctctagtggaacacatgggggtctcattgaaaagctctctgatgagcacctccttttgtgcaaagttaattttttctcgacaataaagatattccgtgtcttyacccctgaactaagacacagggagtatttcagaggccagcgtaggagtcatcgacaacraaaagccgagaacccagggccagcagtggagcctcagcagaccagggcctggtccttgctaattgctgcagggtggagtttgatctggcagacccgatcctccttcatgaacacccagcaacctgagcaagtcccrgccctgccctcagcgagcccggcaggcgtccygggacagctcagtgttggagggccacctgaaccacgagccagggctggggcttgcatgtcattgtctatgacagcgtcaagactggcccttggcaccgtgctgtgtggaaaccctcccctctgagactccactgagacgtggctgagtgaaatyttcctcgtcagtggtcaaggtgtgtcatccatacagctccatgcctttgtcttttttaaatgtaattaaaaaaggaaccaactggcgtttgtagttggkgtttgttatttattgattctccctccaaaggggcctaagctcgacaaaaccgttacagttgtcagaacccagccacagggctcagcccccttcccccacgtcacgtctgcatcactactgtgggtgagcctggacggacgggggctggggctgcccrtggcagcggcaagggatgctttccagagacagccaccackcaggagggaggatcaccccaggcaacccagacacgggtgttcacatgtgaggctgtgagctccacata

SEQ ID NO: 329 - DNA, 3319 bp, Homo sapiens
cgagccccgaagtaagaactccgtggcgcgtgcagccctagggaggaagggcgtgctgcgggtgcagtctcaggggcgtctgcctgagcccgcttttckacaagatgtggggatttttgaagcgccctgtagtggtgacggctgacatcaacttgagccttgtggccctgactgggatggggttactgagccggctgtggcgactcacctacccgcgggctgtggtttttgacgaagtatattatgggcagtacatctctttttacatgaaacaaatcttcttcttggatgacagtgggccgccatttggccacatggtgctggccttgrgaggttatttaggaggattcgatggcaattttttgtggaacagaattggagcagaatacagtagcaacgtgcctgtgtggtccctgcgcctgctgccagcactcgcgggggccttgtcggtccccatggcctaccagatagtgttggagctccacttttctcattgtgccgccatgggagctgctctgttgatgcttatcgagaatgctctcatcactcagtcaaggctaatgcttttggaatcagtgttaatatttttcaatctattggccgtgttgtcctacctgaagttcttcaactgccaaaagcacagccctttttctctgagctggtggttctggctaacactgacaggggtcgcttgttcctgtgcagtgggcatcaagtacatgggtgtgttcacgtacgtgctcgtgctgggtgttgcagctgtccatgcctggcacctgcttggagaccagactttgtccaatgtaggtgctgatgtccagkgctgcatgaggccggcctgtrtggggcagatgyrgatgtcacagggggtctgtgtgttctgtcacttgctcgcccgagcagtggctttgctggtcatcccggtcgtcctgtacttactgttcttctacgtccacttgattctagtcttccgctctgggccccacgaccaaatcatgtccagtgccttcyaggccagcttagagggaggactagctcggatcacycagggtcagccactggaggtggcctttgggtcccagrtcactctgaggaacgtctttgggaaacctgtgccctgctggcttcattcccaccaggacacctaccccatgatatatgagaacggccgaggcagctcccaccagcaacaggtgacctgttaccccttcaaagaygtcaataactggtggattgtaaaggatcccaggaggcacyagctggtggtgagcagccctccgagacctgtgaggcayggggacatggtgcagctggtccacggcatgaccacccgctccctgaacacgcatgatgttgcagcccccctgagcccccattcacaggaggtctcctgctacattgamtataacatctccatgcccgcccagaacctctggagactggarattgtgaacagaggatctgacacagacgtctggaagaccatcctctcagaggtccgctttgtgcacgtgaacacttccgctgtcttaaagctgagcggggctcacctccctgactgggggtatcggcaactggagatcgtcggggagaagctgtcccggggctaccacgggagcacggtgtggaacgtggaggagcaccgatayggcgcgagccaggagcagagggagcgggaacgggagctgcactcacctgcgcaggtggacgtcagcaggaacctcagcttcatggcgagattctcggagctgcagtggaggatgctggcgctgagaagtgatgactcggaacacaagtacagctccagcccactggagtgggtcaccctggacaccaatattgcctactggctgcaccccagraccagcgctcagatccacctacttggaaacatagtgatctgggtttcgggcagcctcgctctggccatctacgccctgctgtccttgtggtacctgctccgacggcgaagaaatgtccatgacctccctcaggatgcctggctgcgctgggtgctggctggggygctgtgtgccggtggctgggcagtgaactacctcccgttcttcctgatggagaagacactcttcctctaccactacctgcccgcactcaccttccaaatccttctgctccctgtggtcctgcagcacatcagcgaccacctgtgcaggtcccagctccagaggagcatcttcagcgccctggtggtggcctggtactcctccgcgtgccacgtgtccaacacgctgcgcccactcacctacggggacaagtcactctcgccacatgaactcaaggcccttcgctggaaagacagctgggacatcttgatccgaaaacactagaacaagagtgtggcaaagaacacccgtgctggggtcgggaygaggttgaagggtcttggtcaatgtacgtaatgagcagggtgggccccacgctgggaggacacgggctgggctgagcagggcctctagtggaacacatgggggtctcattgaaaagctctctgatgagcacctccttttgtgcaaagttaattttttctcgacaataaagatattccgtgtcttyacccctgaactaagacacagggagtatttcagaggccagcgtaggagtcatcgacaacraaaagccgagaacccagggccagcagtggagcctcagcagaccagggcctggtccttgctaattgctgcagggtggagtttgatctggcagacccgatcctccttcatgaacacccagcaacctgagcaagtcccrgccctgccctcagcgagcccggcaggcgtccygggacagctcagtgttggagggccacctgaaccacgagccagggctggggcttgcatgtcattgtctatgacagcgtcaagactggcccttggcaccgtgctgtgtggaaaccctcccctctgagactccactgagacgtggctgagtgaaatyttcctcgtcagtggtcaaggtgtgtcatccatacagctccatgcctttgtcttttttaaatgtaattaaaaaaggaaccaactggcgtttgtagttggkgtttgttatttattgattctccctccaaaggggcctaagctcgacaaaaccgttacagttgtcagaacccagccacagggctcagcccccttcccccacgtcacgtctgcatcactactgtgggtgagcctggacggacgggggctggggctgcccrtggcagcggcaagggatgctttccagagacagccaccackcaggagggaggatcaccccaggcaacccagacacgggtgttcacatgtgaggctgtgagctccacata

SEQ ID NO: 330 - DNA, 3246 bp, Homo sapiens
tggccccgcaggctcggtgaatcgaacgttgagcagggcggtgggtggtgcggagtgccgagcggcctcacccccaaccgtcggcccagtcggacggttccgaggcgttgccgggagccgggcgcggctctgtgtggactcggagaaacgcggttttgacgaagtatattatgggcagtacatctctttttacatgaaacaaatcttcttcttggatgacagtgggccgccatttggccacatggtgctggccttgrgaggttatttaggaggattcgatggcaattttttgtggaacagaattggagcagaatacagtagcaacgtgcctgtgtggtccctgcgcctgctgccagcactcgcgggggccttgtcggtccccatggcctaccagatagtgttggagctccacttttctcattgtgccgccatgggagctgctctgttgatgcttatcgagaatgctctcatcactcagtcaaggctaatgcttttggaatcagtgttaatatttttcaatctattggccgtgttgtcctacctgaagttcttcaactgccaaaagcacagccctttttctctgagctggtggttctggctaacactgacaggggtcgcttgttcctgtgcagtgggcatcaagtacatgggtgtgttcacgtacgtgctcgtgctgggtgttgcagctgtccatgcctggcacctgcttggagaccagactttgtccaatgtaggtgctgatgtccagkgctgcatgaggccggcctgtrtggggcagatgyrgatgtcacagggggtctgtgtgttctgtcacttgctcgcccgagcagtggctttgctggtcatcccggtcgtcctgtacttactgttcttctacgtccacttgattctagtcttccgctctgggccccacgaccaaatcatgtccagtgccttcyaggccagcttagagggaggactagctcggatcacycagggtcagccactggaggtggcctttgggtcccagrtcactctgaggaacgtctttgggaaacctgtgccctgctggcttcattcccaccaggacacctaccccatgatatatgagaacggccgaggcagctcccaccagcaacaggtgacctgttaccccttcaaagaygtcaataactggtggattgtaaaggatcccaggaggcacyagctggtggtgagcagccctccgagacctgtgaggcayggggacatggtgcagctggtccacggcatgaccacccgctccctgaacacgcatgatgttgcagcccccctgagcccccattcacaggaggtctcctgctacattgamtataacatctccatgcccgcccagaacctctggagactggarattgtgaacagaggatctgacacagacgtctggaagaccatcctctcagaggtccgctttgtgcacgtgaacacttccgctgtcttaaagctgagcggggctcacctccctgactgggggtatcggcaactggagatcgtcggggagaagctgtcccggggctaccacgggagcacggtgtggaacgtggaggagcaccgatayggcgcgagccaggagcagagggagcgggaacgggagctgcactcacctgcgcaggtggacgtcagcaggaacctcagcttcatggcgagattctcggagctgcagtggaggatgctggcgctgagaagtgatgactcggaacacaagtacagctccagcccactggagtgggtcaccctggacaccaatattgcctactggctgcaccccagraccagcgctcagatccacctacttggaaacatagtgatctgggtttcgggcagcctcgctctggccatctacgccctgctgtccttgtggtacctgctccgacggcgaagaaatgtccatgacctccctcaggatgcctggctgcgctgggtgctggctggggygctgtgtgccggtggctgggcagtgaactacctcccgttcttcctgatggagaagacactcttcctctaccactacctgcccgcactcaccttccaaatccttctgctccctgtggtcctgcagcacatcagcgaccacctgtgcaggtcccagctccagaggagcatcttcagcgccctggtggtggcctggtactcctccgcgtgccacgtgtccaacacgctgcgcccactcacctacggggacaagtcactctcgccacatgaactcaaggcccttcgctggaaagacagctgggacatcttgatccgaaaacactagaacaagagtgtggcaaagaacacccgtgctggggtcgggaygaggttgaagggtcttggtcaatgtacgtaatgagcagggtgggccccacgctgggaggacacgggctgggctgagcagggcctctagtggaacacatgggggtctcattgaaaagctctctgatgagcacctccttttgtgcaaagttaattttttctcgacaataaagatattccgtgtcttyacccctgaactaagacacagggagtatttcagaggccagcgtaggagtcatcgacaacraaaagccgagaacccagggccagcagtggagcctcagcagaccagggcctggtccttgctaattgctgcagggtggagtttgatctggcagacccgatcctccttcatgaacacccagcaacctgagcaagtcccrgccctgccctcagcgagcccggcaggcgtccygggacagctcagtgttggagggccacctgaaccacgagccagggctggggcttgcatgtcattgtctatgacagcgtcaagactggcccttggcaccgtgctgtgtggaaaccctcccctctgagactccactgagacgtggctgagtgaaatyttcctcgtcagtggtcaaggtgtgtcatccatacagctccatgcctttgtcttttttaaatgtaattaaaaaaggaaccaactggcgtttgtagttggkgtttgttatttattgattctccctccaaaggggcctaagctcgacaaaaccgttacagttgtcagaacccagccacagggctcagcccccttcccccacgtcacgtctgcatcactactgtgggtgagcctggacggacgggggctggggctgcccrtggcagcggcaagggatgctttccagagacagccaccackcaggagggaggatcaccccaggcaacccagacacgggtgttcacatgtgaggctgtgagctccacata

SEQ ID NO: 331 - DNA, 3521 bp, Homo sapiens
cgagccccgaagtaagaactccgtggcgcgtgcagccctagggaggaagggcgtgctgcgggtgcagtctcaggggcgtctgcctgagcccgcttttckacaagatgtggggatttttgaagcgccctgtagtggtgacggctgacatcaacttgagccttgtggccctgactgggatggggttactgagccggctgtggcgactcacctacccgcgggctgtggtttttgacgaagtatattatgggcagtacatctctttttacatgaaacaaatcttcttcttggatgacagtgggccgccatttggccacatggtgctggccttgrgaggttatttaggaggattcgatggcaattttttgtggaacagaattggagcagaatacagtagcaacgtgcctgtgtggtccctgcgcctgctgccagcactcgcgggggccttgtcggtccccatggcctaccagatagtgttggagctccacttttctcattgtgccgccatgggagctgctctgttgatgcttatcgagaatgctctcatcactcagtcaaggctaatgcttttggaatcagtgttaatatttttcaatctattggccgtgttgtcctacctgaagttcttcaactgccaaaagcacagccctttttctctgagctggtggttctggctaacactgacaggggtcgcttgttcctgtgcagtgggcatcaagtacatgggtgtgttcacgtacgtgctcgtgctgggtgttgcagctgtccatgcctggcacctgcttggagaccagactttgtccaatgtaggtgctgatgtccagkgctgcatgaggccggcctgtrtggggcagatgyrgatgtcacagggggtacttggtgaaaagactccaatcctcaatgttttagaagcaggcaggcctgggcagcctcgcctcttggcctctgcaggtgcctctgtatgggaggccagagtttctgtcactaactttttctaagctcacaatgtctagaggtgggtrcgcttttccacgcagtggaacatgacttttctttgaatctctggcaggtctgtgtgttctgtcacttgctcgcccgagcagtggctttgctggtcatcccggtcgtcctgtacttactgttcttctacgtccacttgattctagtcttccgctctgggccccacgaccaaatcatgtccagtgccttcyaggccagcttagagggaggactagctcggatcacycagggtcagccactggaggtggcctttgggtcccagrtcactctgaggaacgtctttgggaaacctgtgccctgctggcttcattcccaccaggacacctaccccatgatgtaagatatgagaacggccgaggcagctcccaccagcaacaggtgacctgttaccccttcaaagaygtcaataactggtggattgtaaaggatcccaggaggcacyagctggtggtgagcagccctccgagacctgtgaggcayggggacatggtgcagctggtccacggcatgaccacccgctccctgaacacgcatgatgttgcagcccccctgagcccccattcacaggaggtctcctgctacattgamtataacatctccatgcccgcccagaacctctggagactggarattgtgaacagaggatctgacacagacgtctggaagaccatcctctcagaggtccgctttgtgcacgtgaacacttccgctgtcttaaagctgagcggggctcacctccctgactgggggtatcggcaactggagatcgtcggggagaagctgtcccggggctaccacgggagcacggtgtggaacgtggaggagcaccgatayggcgcgagccaggagcagagggagcgggaacgggagctgcactcacctgcgcaggtggacgtcagcaggaacctcagcttcatggcgagattctcggagctgcagtggaggatgctggcgctgagaagtgatgactcggaacacaagtacagctccagcccactggagtgggtcaccctggacaccaatattgcctactggctgcaccccagraccagcgctcagatccacctacttggaaacatagtgatctgggtttcgggcagcctcgctctggccatctacgccctgctgtccttgtggtacctgctccgacggcgaagaaatgtccatgacctccctcaggatgcctggctgcgctgggtgctggctggggygctgtgtgccggtggctgggcagtgaactacctcccgttcttcctgatggagaagacactcttcctctaccactacctgcccgcactcaccttccaaatccttctgctccctgtggtcctgcagcacatcagcgaccacctgtgcaggtcccagctccagaggagcatcttcagcgccctggtggtggcctggtactcctccgcgtgccacgtgtccaacacgctgcgcccactcacctacggggacaagtcactctcgccacatgaactcaaggcccttcgctggaaagacagctgggacatcttgatccgaaaacactagaacaagagtgtggcaaagaacacccgtgctggggtcgggaygaggttgaagggtcttggtcaatgtacgtaatgagcagggtgggccccacgctgggaggacacgggctgggctgagcagggcctctagtggaacacatgggggtctcattgaaaagctctctgatgagcacctccttttgtgcaaagttaattttttctcgacaataaagatattccgtgtcttyacccctgaactaagacacagggagtatttcagaggccagcgtaggagtcatcgacaacraaaagccgagaacccagggccagcagtggagcctcagcagaccagggcctggtccttgctaattgctgcagggtggagtttgatctggcagacccgatcctccttcatgaacacccagcaacctgagcaagtcccrgccctgccctcagcgagcccggcaggcgtccygggacagctcagtgttggagggccacctgaaccacgagccagggctggggcttgcatgtcattgtctatgacagcgtcaagactggcccttggcaccgtgctgtgtggaaaccctcccctctgagactccactgagacgtggctgagtgaaatyttcctcgtcagtggtcaaggtgtgtcatccatacagctccatgcctttgtcttttttaaatgtaattaaaaaaggaaccaactggcgtttgtagttggkgtttgttatttattgattctccctccaaaggggcctaagctcgacaaaaccgttacagttgtcagaacccagccacagggctcagcccccttcccccacgtcacgtctgcatcactactgtgggtgagcctggacggacgggggctggggctgcccrtggcagcggcaagggatgctttccagagacagccaccackcaggagggaggatcaccccaggcaacccagacacgggtgttcacatgtgaggctgtgagctccacata

SEQ ID NO: 332 - DNA, 2172 bp, Homo sapiens
gctccagtcgcctccgacctcggcgctgggcgggcgcgccgggcctggggaaggggcgggcgcggggacccgatgcgcgggagcggaggccgagatggcttcggcgggaggcgaagactgcgagagccccgcgccggaggccgaccgtccgcaccagcggcccttcctgataggggtgagcggcggcactgccagcgggaagtcgaccgtgtgtgagaagatcatggagttgctgggacagaacgaggtggaacagcggcagcggaaggtggtcatcctgagccaggacaggttctacaaggtcctgacggcagagcagaaggccaaggccttgaaaggacagtacaattttgaccatccagatgcctttgataatgatttgatgcacaggactctgaagaacatcgtggagggcaaaacggtggaggtgccgacctatgattttgtgacacactcaaggttaccagagaccacggtggtctaccctgcggacgtggttctgtttgagggcatcttggtgttctacagccaggagatccgggacatgttccacctgcgcctcttcgtggacaccgactccgacgtcaggctgtctcgaagagttctccgggacgtgcgccgagggagggacctggagcagattctgacgcagtacaccaccttcgtgaagccggccttcgaggagttctgyctgccgacaaagaagtatgccgatgtgatcatcccrcgaggagtggacaatatggttgccatcaacctgatcgtgcagcacatccaggacattctgaatggtgacatctgcaaatggcaccgaggagggtccaatgggcggagctacaagcggaccttttctgagccaggggaccaccctgggatgcygacctctggcaaacggtcacatttggagtccagcagcagaccccactgaggggctgccgagcctcagggcaggtctcccgcccggcatgtgtgttcagggactgagcctggggacgcccacccacacccactgcttcctctcggcgcaccccaggggagtgttagcagcgaggccttcctcactcaggagtggaaactcagatgtgtcactcagactcaacttgctgggacactgacaggcgttcctgaggttttcagccacttaggctcgttgcggtttaaagatccctctaggtcactgagaaatgccacagaatgtgcaggaagcctgggaggcttctgtgaggaatgtgaggcacattattggggaaattgaggagacagcctagacactggctggcctgatgttttgttgacagtgaacccacagtgggagagagttttttccagtctgatctggttcttacacactcacacacataactcaaaagttttgtgaacaagtactttccttttttacatgttacatgtcctcatgttttctgttttctgtttcataacacaaggctggttgtggcctacaaacctaatttcatgacccagtggtttgcagtccagcgtggcctacacggatatggggagccactgagggatgttttccccccttgcttgtgccttaaaggcagagaagcgaggcggatgccctggaagcacccagcatcacacccaggcttgtgcggggccaggctgggagcccatgcagtagggcagaaggcagcggaggccaggtctgtcccggctggagaacagcgtccacgcagtcctgcctggggtcaggccctcactgaccctcaggggagcccccaaggtgctgtctgtctagacaggctgtcccaccccagggtggctagtggccatatgcagggaatggtgcttctggctgtggcacgcactggatcacccaggtcccagcagacatggccgcccaaagtcagcaagcctcytttgtgctatgtggagctcacagcctcacatgtgaacacccgtgtctgggttgcctggggtgatcctccctcctgmgtggtggctgtctctggaaagcatcccttgccgctgccaygggcagccccagcccccgtccgtccaggctcacccacagtagtgatgcagacgtgacgtgggggaagggggctgagccctgtggctgggttctgacaactgtaacggttttgtcgagcttaggcccctttggagggagaatcaataaataacaaacmccaactacaaacgcca

SEQ ID NO: 333 - DNA, 1447 bp, Homo sapiens
gctccagtcgcctccgacctcggcgctgggcgggcgcgccgggcctggggaaggggcgggcgcggggacccgatgcgcgggagcggaggccgagatggcttcggcgggaggcgaagactgcgagagccccgcgccggaggccgaccgtccgcaccagcggcccttcctgataggggtgagcggcggcactgccagcgggaagtcgaccgtgtgtgagaagatcatggagttgctgggacagaacgaggtggaacagcggcagcggaaggtggtcatcctgagccaggacaggttctacaaggtcctgacggcagagcagaaggccaaggccttgaaaggacagtacaattttgaccatccagatgcctttgataatgatttgatgcacaggactctgaagaacatcgtggagggcaaaacggtggaggtgccgacctatgattttgtgacacactcaaggttaccagagaccacggtggtctaccctgcggacgtggttctgtttgagggcatcttggtgttctacagccaggagatccgggacatgttccacctgcgcctcttcgtggacaccgactccgacgtcaggctgtctcgaagagacaaagaagtatgccgatgtgatcatcccrcgaggagtggacaatatggttgccatcaacctgatcgtgcagcacatccaggacattctgaatggtgacatctgcaaatggcaccgaggagggtccaatgggcggagctacaagcygacctctggcaaacggtcacatttggagtccagcagcagaccccactgaggggctgccgagcctcagggcaggtctcccgcccggcatgtgtgttcagggactgagcctggggacgcccacccacacccactgcttcctctcggcgcaccccaggggagtgttagcagcgaggccttcctcactcaggagtggaaactcagatgtgtcactcagactcaacttgctgggacactgacaggcgttcctgaggttttcagccacttaggctcgttgcggtttaaagatccctctaggtcactgagaaatgccacagaatgtgcaggaagcctgggaggcttctgtgaggaatgtgaggcacattattggggaaattgaggagacagcctagacactggctggcctgatgttttgttgacagtgaacccacagtgggagagagttttttccagtctgatctggttcttacacactcacacacataactcaaaagttttgtgaacaagtactttccttttttacatgttacatgtcctcatgttttctgttttctgtttcataacacaaggctggttgtggcctacaaacctaatttcatgacccagtggtttgcagtccagcgtggcctacacggatatggggagccactgagggatgttttccccccttgcttgtgccttaaaggcagagaagcgaggcgg

SEQ ID NO: 334 - DNA, 7044 bp, Homo sapiens
gcgagtggcgaaggtggcggcagcggcggcgggggcagtcaccggctagggcgacggctccgaggccgagtggcggtccgacagagtcctccgtgtcctcccccgcatgacccccttggggtaagtgtactggagagagttggttatacattctaggaatctcaaagggtctggctctgtcacccaggctggagtgcagtgacacgatctcagctcactgtaacctccgcctcccgggttcaagcgatcctcccatctgaccctcccaagtagctggcattcagtgatcagcctttgagcctttcccacattgaagatggtgaaactagatattcatactctggctcatcacctcaagcaggaacgcttatatgtaaactctgagaaacagctcattcagaggctcaatgcagatgtacttaagacagctgaaaagttgtatcgtacagcatggattgcgaagcaacagagaatcaatttggatcggcttatcataaccagtgctgaagcttcccctgctgaatgttgccaacatgccaaaattttggaagatacacaatttgttgatgggtataagcaattgggatttcaggagactgcttatggagaattcttgagtcgattgagggaaaatcctcgtcttattgcctcctctttggttgctggagagaaacttaatcaggagaacacacaaagtgttatttacacagtttttacctccctgtatggcaattgcatcatgcaagaagatgaaagctacctccttcaggttttgcgatacttgattgaatttgaacttaaagaaagtgacaaccctaggcgacttttgaggagaggaacttgtgccttcagcatcttatttaaacttttttctgaaggactgttttctgccaaacttttcctcacagccactttacatgagccaattatgcaactgcttgttgaagatgaagatcacctggaaacagatccaaacaagctaattgagaggttctctccatctcagcaggaaaaactctttggagagaagggctcagatagattcaggcaaaaagttcaagaaatggtggagtccaatgaagcaaagytagtggctttggtgaacaaatttattggttatctcaaacagaacacatattgttttccacatagtttaaggtggatcgtgtctcagatgtacaaaaccctctcctgygtagataggctggaagttggggaggtcagggcaatgtgtactgatctcctgttggcctgcttcatttgtcctgcagttgtcaatccagaacaatatggaataatttccgatgctcctattaatgaagtagcacgatttaatctgatgcaggtaggccgccttttgcagcagttagcaatgactggctctgaagagggagatccccgaacaaagagcagccttggaaartttgacaaaagctgtgttgcmgctttccttgatgttgtgattgggggccgtgcagtggagacccctccattgtcttccgtcaatcttctggaaggattgagcagaactgtggtttatataacctacagtcagcttattactctggtgaattttatgaagagtgtgatgtctggagatcaactgagagaagatagaatggctcttgacaatttattggcaaacctacccccggccaagccaggaaaaagtagcagtttagaaatgactccctacaatacacctcagctatctccagcaaccactccagcaaataaaaagaatcgattacctatagcaactcggagcagaagccgcaccaatatgctaatggacctacatatggaccatgaargatcatctcaagaaaccatycaggaggtgcaaccagaagaggtgttggtcatttccttaggtacaggtccccagcttactccagggatgatgtcagaaaatgaggtcctaaacatgcagctttcggatggaggacaaggagatgtccctgttgatgaaaacaaactccatggtaaacctgataaaaccttgcgcttttccctctgcagtgataatctggaaggaatatctgaaggtccttcaaatcgctccaattcagtgtcctccctagacctagaaggagagtctgtgtcagaacttggagcaggaccttctggcagtaatggagttgaagctctacagctgttagaacatgagcaagctacaacacaggataaccttgatgataagctaaggaagtttgaaattcgtgacatgatgggattaacagatgatagggacatatcagaaacagtgagtgagacctggagtacagacgtcttgggaagtgactttgaccctaatattgatgaagatcgcttgcaagaaattgcaggtgctgcagcagagaacatgttaggcagtttgctgtgcctcccaggttcagggtcagtgcttcttgacccctgcactggttctaccatatcagagacaacaagtgaagcttggagtgtagaggtattgccaagtgactcagaggccccagacctaaagcaggaggagcgtctgcaagaactggagagctgttctggactgggtagcacatctgatgatacggatgtcagggaggtcagttcccgccccagcacaccaggcctcagtgttgtgtccggcataagtgcaacctctgaggatattcccaataagattgaagacctgagatctgagtgcagctctgattttgggggtaaagattctgtcactagtccagacatggatgaaataactcacgattttctttatatacttcagccaaaacaacattttcaacacattgaagcagaagcagacatgagaatccagctgtcttctagtgcccaccagctgacctctcctccttctcagtcagagtctctgctggccatgtttgatccactgtcttcacatgaaggggcttctgctgtggtaaggccaaaggttcactatgctaggccatcgcatccaccaccagatcccccaatcctggaaggagctgtgggaggaaatgaggccaggttgccaaactttggttcccatgttttaactccagctgaaatggaggcattcaagcaaaggcattcttaccctgagagactagttcgaagcaggagctctgatatagtatcttctgtccggagacccatgagtgaccccagctggaaccggcgtccaggaaatgaagagcgagaactccctycagctgcagccattggtgctacttctttggtggctgcacctcattcatcatcttcatccccgagtaaggactcctcaagaggagagactgaagaacgcaaagatagrgatgatgagaaatcagacaggaacagaccttggtggagaaaacgttttgtttcagccatgcctaaagctcctataccatttagaaagaaagaaaaacaagaaaaagacaaagatgatctggggcctgacagattctcaacactcacagatgatcccagccctagactcagtgcacaagctcaggtggctgaggatattctggacaaatacaggaatgccattaaacggaccagccccagtgatggagcaatggcaaactatgaaagtacagaggttatgggtgatggtgaaagtgcacatgattctccccgtgacgaagcactgcagaacatctcggctgatgatctcccagactctgcaagccaagcagcccacccgcaggattcagctttctcttacagagatgcaaaaaagaaactgaggcttgctctttgctctgcggactctgttgccttcccagtgctgacccattcaacaaggaatggtttaccagaccacacagacccagaagacaatgaaattgtatgcttcttaaaagttcaaatagctgaagcaattaatttacaagataagaatctaatggctcaacttcaagaaacaatgcgctgtgtgtgccgttttgataataggacttgtaggaaactgctggcttcgattgctgaggactacagaaaaagagccccatatattgcttatctcactcgttgtcgacaaggactacagaccacacaggctcacctggaaaggctattgcaaagagttttgcgggacaaagaagtggccaatcgatactttaccactgtctgtgtgagattactgcttgagagcaaagaaaagaagatcagggaattcattcaagactttcagaaactcaccgcagctgacgataaaactgctcaggtagaagattttctgcagtttctttatggtgcaatggcccaggatgtcatatggcaaaacgcgagtgaagaacagcttcaagatgcacagctggccattgagcgaagcgtgatgaaccggattttcaagctcgccttctaccctaatcaagatggggacatacttcgcgaccaggttcttcatgaacatatccagagattgtctaaagtagtgactgcaaatcacagagctcttcagataccagaggtttatcttcgagaagcaccatggccatctgcacaatcagaaatcaggacaataagtgcttataaaaccccccgggacaaagtgcagtgcatcctgagaatgtgctctacgattatgaacctcctgagcctggccaatgaggactctgtccctggagcggatgactttgttcctgtgttggtgtttgtgttgataaaggcaaatccaccctgtttgctgtctactgtgcagtatatcagtagcttttatgctagctgtctgtctggagaggagtcctattggtggatgcagttcacagcagcagtagaattcattaaaaccatcgatgaccgaaagtgaccaagaccaaggcccaccaaggcagcagactgttaatcagacaaacagatctctgagaaggtgcatcagctgctttgaaggctgaagattgttttgtatgatactgcacagcatcaggcattttaaagcagatctttactaaacaggttaatgagctaacaagcaggttctctcgtctttgggctctttcctttctgagttgcatattctattttcttgtccccaagtagagactagtactacaaaaagggaccacatttttcaagtatttctaagtataaaaaacaaaacaaaaatctcttaggaaatgtctagacctccattcttggattccctttctttccttttattttaaaaaagaacagtacccctcttttaagatgctgtcttacattaatgagcatctaatggaaagaaggtatgagttgcactgaggattagaatagtggtgcgttagtggcattatctataaatacactcacctaaattgaaagctaagaaggaaatgtaaatataatatatatttatatttgatgtaatatggacatctgcagattctaataaacaaggactattgctgatagtaggctgtgacatactgtcttgtgaaatggtttccttgacaaaatttaagctgagcttaaaagcaaaaaacaaaaagtacacagaaatatttattaaaatgtaatacagtttattgaactttctaggtatggagtttgatrgacagggctgcctttaatgagtgtgaaggtcactaagtcacttagacatctcaccgtggaagtttgtgagcctgcattaggagatagactgattaccatacatgacataaaaaggaacagtggatagctcatactttatggtggttcttctcctccgaaataatatactgcagaaatcccagacagagctccttacaaacctttaattgtaatatatttttgatgattattcacattgaatgcacagaccaagaattcagtgaatgtcattttttaaaaaactaatttgtattgtctgctctagtgatacaagttttactagtgataaactattttaatcaaccatactattcttatggaaaaaaatatctattttggcaggtttctgtgcctttatttccctcttctgaaaaaaagtctgtgttttcatagtttggtttgcattgtatatcaataattaatcaggaatgggttttggtgcctgaaaaattggccatggaggcacaccaaagcttcaagcacaagtcttgtacatgggccatcactgtctggtttcacttcgtgtgtttcctaaacacatttagctgcttttttaacaaactcagccccatacttgagtcccttgttgttgggagcatttccaggcatcttttaagggaactgtgacaaacagcctcgggcagatgaacacggaggctctctgttgtctgtctctgagatctttgtgtctgggaatgcctaaagattttatttttttttctttgtttttattttattttattttatttttttgagacagagtctcaccctgttgcccaggctggagtgcaatggtgcgatcttggctcactgcaacctccacctcccagttcaagtgattcccctgcctcagcctcscgagtagctaggactacaggcgcatgtcaccaagcccggctaatttttgtatttttagtagaaacggggtttcaccatgttggccaggatgatcctcaatctcctgacctcgtgatccacccgccttggcctcccaaagtgcgggattacaagcgtgaaccaccctgcccagccagaaactagattttctttatgcctccaccccttcttattcatttactttacaataccaaaataacaaattgcataggagtgtgggatgtggtttctgccttctagakagagatcagaattaaactagtactatgaaatgtccttttgaatgttaggtcaagaaatccatgtacagagtcgtgcacttcattggctgtaactgtcaaacttgccttgtattagaagttaaatcccatcgtaaatacatcacgaggccagctgtgtgatttctgagacctagatgagagtccatttacttcagcctttgattcagtaaatgttaagcagcagaagacttcgaatggttgaaattcattgttacaggatttaactcataaaccaatgagagattttttttttctctgcaatggttgctaagtctattccatgttaacactgtggaaataaatatgaagatgtggacattgc

SEQ ID NO: 335 - DNA, 6782 bp, Homo sapiens
gcgagtggcgaaggtggcggcagcggcggcgggggcagtcaccggctagggcgacggctccgaggccgagtggcggtccgacagagtcctccgtgtcctcccccgcatgacccccttggggtaagtgtactggagagagttggttatacattctaggaatctcaaagggtctggctctgtcacccaggctggagtgcagtgacacgatctcagctcactgtaacctccgcctcccgggttcaagcgatcctcccatctgaccctcccaagtagctggcattcagtgatcagcctttgagcctttcccacattgaagatggtgaaactagatattcatactctggctcatcacctcaagcaggaacgcttatatgtaaactctgagaaacagctcattcagaggctcaatgcagatgtacttaagacagctgaaaagttgtatcgtacagcatggattgcgaagcaacagagaatcaatttggatcggcttatcataaccagtgctgaagcttcccctgctgaatgttgccaacatgccaaaattttggaagatacacaatttgttgatgggtataagcaattgggatttcaggagactgcttatggagaattcttgagtcgattgagggaaaatcctcgtcttattgcctcctctttggttgctggagagaaacttaatcaggagaacacacaaagtgttatttacacagtttttacctccctgtatggcaattgcatcatgcaagaagatgaaagctacctccttcaggttttgcgatacttgattgaatttgaacttaaagaaagtgacaaccctaggcgacttttgaggagaggaacttgtgccttcagcatcttatttaaacttttttctgaaggactgttttctgccaaacttttcctcacagccactttacatgagccaattatgcaactgcttgttgaagatgaagatcacctggaaacagatccaaacaagctaattgagaggttctctccatctcagcaggaaaaactctttggagagaagggctcagatagattcaggcaaaaagttcaagaaatggtggagtccaatgaagcaaagytagtggctttggtgaacaaatttattggttatctcaaacagaacacatattgttttccacatagtttaaggtggatcgtgtctcagatgtacaaaaccctctcctgygtagataggctggaagttggggaggtcagggcaatgtgtactgatctcctgttggcctgcttcatttgtcctgcagttgtcaatccagaacaatatggaataatttccgatgctcctattaatgaagtagcacgatttaatctgatgcaggtaggccgccttttgcagcagttagcaatgactggctctgaagagggagatccccgaacaaagagcagccttggaaartttgacaaaagctgtgttgcmgctttccttgatgttgtgattgggggccgtgcagtggagacccctccattgtcttccgtcaatcttctggaaggattgagcagaactgtggtttatataacctacagtcagcttattactctggtgaattttatgaagagtgtgatgtctggagatcaactgagagaagatagaatggctcttgacaatttattggcaaacctacccccggccaagccaggaaaaagtagcagtttagaaatgactccctacaatacacctcagctatctccagcaaccactccagcaaataaaaagaatcgattacctatagcaactcggagcagaagccgcaccaatatgctaatggacctacatatggaccatgaargatcatctcaagaaaccatycaggaggtgcaaccagaagaggtgttggtcatttccttaggtacaggtccccagcttactccagggatgatgtcagaaaatgaggtcctaaacatgcagctttcggatggaggacaaggagatgtccctgttgatgaaaacaaactccatggtaaacctgataaaaccttgcgcttttccctctgcagtgataatctggaaggaatatctgaaggtccttcaaatcgctccaattcagtgtcctccctagacctagaaggagagtctgtgtcagaacttggagcaggaccttctggcagtaatggagttgaagctctacagctgttagaacatgagcaagctacaacacaggataaccttgatgataagctaaggaagtttgaaattcgtgacatgatgggattaacagatgatagggacatatcagaaacagtgagtgagacctggagtacagacgtcttgggaagtgactttgaccctaatattgatgaagatcgcttgcaagaaattgcaggtgctgcagcagagaacatgttaggcagtttgctgtgcctcccaggttcagggtcagtgcttcttgacccctgcactggttctaccatatcagagacaacaagtgaagcttggagtgtagaggtattgccaagtgactcagaggccccagacctaaagcaggaggagcgtctgcaagaactggagagctgttctggactgggtagcacatctgatgatacggatgtcagggaggtcagttcccgccccagcacaccaggcctcagtgttgtgtccggcataagtgcaacctctgaggatattcccaataagattgaagacctgagatctgagtgcagctctgattttgggggtaaagattctgtcactagtccagacatggatgaaataactcacggtgcccaccagctgacctctcctccttctcagtcagagtctctgctggccatgtttgatccactgtcttcacatgaaggggcttctgctgtggtaaggccaaaggttcactatgctaggccatcgcatccaccaccagatcccccaatcctggaaggagctgtgggaggaaatgaggccaggttgccaaactttggttcccatgttttaactccagctgaaatggaggcattcaagcaaaggcattcttaccctgagagactagttcgaagcaggagctctgatatagtatcttctgtccggagacccatgagtgaccccagctggaaccggcgtccaggaaatgaagagcgagaactccctycagctgcagccattggtgctacttctttggtggctgcacctcattcatcatcttcatccccgagtaaggactcctcaagaggagagactgaagaacgcaaagatagrgatgatgagaaatcagacaggaacagaccttggtggagaaaacgttttgtttcagccatgcctaaagctcctataccatttagaaagaaagaaaaacaagaaaaagacaaagatgatctggggcctgacagattctcaacactcacagatgatcccagccctagactcagtgcacaagctcaggtggctgaggatattctggacaaatacaggaatgccattaaacggaccagccccagtgatggagcaatggcaaactatgaaagtacagaggttatgggtgatggtgaaagtgcacatgattctccccgtgacgaagcactgcagaacatctcggctgatgatctcccagactctgcaagccaagcagcccacccgcaggattcagctttctcttacagagatgcaaaaaagaaactgaggcttgctctttgctctgcggactctgttgccttcccagtgctgacccattcaacaaggaatggtttaccagaccacacagacccagaagacaatgaaattgtatgcttcttaaaagttcaaatagctgaagcaattaatttacaagataagaatctaatggctcaacttcaagaaacaatgcgctgtgtgtgccgttttgataataggacttgtaggaaactgctggcttcgattgctgaggactacagaaaaagagccccatatattgcttatctcactcgttgtcgacaaggactacagaccacacaggctcacctggaaaggctattgcaaagagttttgcgggacaaagaagtggccaatcgatactttaccactgtctgtgtgagattactgcttgagagcaaagaaaagaagatcagggaattcattcaagactttcagaaactcaccgcagctgacgataaaactgctcaggtagaagattttctgcagtttctttatggtgcaatggcccaggatgtcatatggcaaaacgcgagtgaagaacagcttcaagatgcacagctggccattgagcgaagcgtgatgaaccggattttcaagctcgccttctaccctaatcaagatggggacatacttcgcgaccaggttcttcatgaacatatccagagattgtctaaagtagtgactgcaaatcacagagctcttcagataccagaggtttatcttcgagaagcaccatggccatctgcacaatcagaaatcaggacaataagtgcttataaaaccccccgggacaaagtgcagtgcatcctgagaatgtgctctacgattatgaacctcctgagcctggccaatgaggactctgtccctggagcggatgactttgttcctgtgttggtgtttgtgttgataaaggcaaatccaccctgtttgctgtctactgtgcagtatatcagtagcttttatgctagctgtctgtctggagaggagtcctattggtggatgcagttcacagcagcagtagaattcattaaaaccatcgatgaccgaaagtgaccaagaccaaggcccaccaaggcagcagactgttaatcagacaaacagatctctgagaaggtgcatcagctgctttgaaggctgaagattgttttgtatgatactgcacagcatcaggcattttaaagcagatctttactaaacaggttaatgagctaacaagcaggttctctcgtctttgggctctttcctttctgagttgcatattctattttcttgtccccaagtagagactagtactacaaaaagggaccacatttttcaagtatttctaagtataaaaaacaaaacaaaaatctcttaggaaatgtctagacctccattcttggattccctttctttccttttattttaaaaaagaacagtacccctcttttaagatgctgtcttacattaatgagcatctaatggaaagaaggtatgagttgcactgaggattagaatagtggtgcgttagtggcattatctataaatacactcacctaaattgaaagctaagaaggaaatgtaaatataatatatatttatatttgatgtaatatggacatctgcagattctaataaacaaggactattgctgatagtaggctgtgacatactgtcttgtgaaatggtttccttgacaaaatttaagctgagcttaaaagcaaaaaacaaaaagtacacagaaatatttattaaaatgtaatacagtttattgaactttctaggtatggagtttgatrgacagggctgcctttaatgagtgtgaaggtcactaagtcacttagacatctcaccgtggaagtttgtgagcctgcattaggagatagactgattaccatacatgacataaaaaggaacagtggatagctcatactttatggtggttcttctcctccgaaataatatactgcagaaatcccagacagagctccttacaaacctttaattgtaatatatttttgatgattattcacattgaatgcacagaccaagaattcagtgaatgtcattttttaaaaaactaatttgtattgtctgctctagtgatacaagttttactagtgataaactattttaatcaaccatactattcttatggaaaaaaatatctattttggcaggtttctgtgcctttatttccctcttctgaaaaaaagtctgtgttttcatagtttggtttgcattgtatatcaataattaatcaggaatgggttttggtgcctgaaaaattggccatggaggcacaccaaagcttcaagcacaagtcttgtacatgggccatcactgtctggtttcacttcgtgtgtttcctaaacacatttagctgcttttttaacaaactcagccccatacttgagtcccttgttgttgggagcatttccaggcatcttttaagggaactgtgacaaacagcctcgggcagatgaacacggaggctctctgttgtctgtctctgagatctttgtgtctgggaatgcctaaagattttatttttttttctttgtttttattttattttattttatttttttgagacagagtctcaccctgttgcccaggctggagtgcaatggtgcgatcttggctcactgcaacctccacctcccagttcaagtgattcccctgcctcagcctcscgagtagctaggactacaggcgcatgtcaccaagcccggctaatttttgtatttttagtagaaacggggtttcaccatgttggccaggatgatccctccaccccttcttattcatttactttacaataccaaaataacaaattgcataggagtgtgggatgtggtttctgccttctagakagagatcagaattaaactagtactatgaaatgtccttttgaatgttaggtcaagaaatccatgtacagagtcgtgcacttcattggctgtaactgtcaaacttgccttgtattagaagttaaatcccatcgtaaatacatcacgaggccagctgtgtgatttctgagacctagatgagagtccatttacttcagcctttgattcagtaaatgttaagcagcagaagacttcgaatggttgaaattcattgttacaggatttaactcataaaccaatgagag

SEQ ID NO: 336 - DNA, 6863 bp, Homo sapiens
gcgagtggcgaaggtggcggcagcggcggcgggggcagtcaccggctagggcgacggctccgaggccgagtggcggtccgacagagtcctccgtgtcctcccccgcatgacccccttggggtaagtgtactggagagagttggttatacattctaggaatctcaaagggtctggctctgtcacccaggctggagtgcagtgacacgatctcagctcactgtaacctccgcctcccgggttcaagcgatcctcccatctgaccctcccaagtagctggcattcagtgatcagcctttgagcctttcccacattgaagatggtgaaactagatattcatactctggctcatcacctcaagcaggaacgcttatatgtaaactctgagaaacagctcattcagaggctcaatgcagatgtacttaagacagctgaaaagttgtatcgtacagcatggattgcgaagcaacagagaatcaatttggatcggcttatcataaccagtgctgaagcttcccctgctgaatgttgccaacatgccaaaattttggaagatacacaatttgttgatgggtataagcaattgggatttcaggagactgcttatggagaattcttgagtcgattgagggaaaatcctcgtcttattgcctcctctttggttgctggagagaaacttaatcaggagaacacacaaagtgttatttacacagtttttacctccctgtatggcaattgcatcatgcaagaagatgaaagctacctccttcaggttttgcgatacttgattgaatttgaacttaaagaaagtgacaaccctaggcgacttttgaggagaggaacttgtgccttcagcatcttatttaaacttttttctgaaggactgttttctgccaaacttttcctcacagccactttacatgagccaattatgcaactgcttgttgaagatgaagatcacctggaaacagatccaaacaagctaattgagaggttctctccatctcagcaggaaaaactctttggagagaagggctcagatagattcaggcaaaaagttcaagaaatggtggagtccaatgaagcaaagytagtggctttggtgaacaaatttattggttatctcaaacagaacacatattgttttccacatagtttaaggtggatcgtgtctcagatgtacaaaaccctctcctgygtagataggctggaagttggggaggtcagggcaatgtgtactgatctcctgttggcctgcttcatttgtcctgcagttgtcaatccagaacaatatggaataatttccgatgctcctattaatgaagtagcacgatttaatctgatgcaggtaggccgccttttgcagcagttagcaatgactggctctgaagagggagatccccgaacaaagagcagccttggaaartttgacaaaagctgtgttgcmgctttccttgatgttgtgattgggggccgtgcagtggagacccctccattgtcttccgtcaatcttctggaaggattgagcagaactgtggtttatataacctacagtcagcttattactctggtgaattttatgaagagtgtgatgtctggagatcaactgagagaagatagaatggctcttgacaatttattggcaaacctacccccggccaagccaggaaaaagtagcagtttagaaatgactccctacaatacacctcagctatctccagcaaccactccagcaaataaaaagaatcgattacctatagcaactcggagcagaagccgcaccaatatgctaatggacctacatatggaccatgaargatcatctcaagaaaccatycaggaggtgcaaccagaagaggtgttggtcatttccttaggtacaggtccccagcttactccagggatgatgtcagaaaatgaggtcctaaacatgcagctttcggatggaggacaaggagatgtccctgttgatgaaaacaaactccatggtaaacctgataaaaccttgcgcttttccctctgcagtgataatctggaaggaatatctgaaggtccttcaaatcgctccaattcagtgtcctccctagacctagaaggagagtctgtgtcagaacttggagcaggaccttctggcagtaatggagttgaagctctacagctgttagaacatgagcaagctacaacacaggataaccttgatgataagctaaggaagtttgaaattcgtgacatgatgggattaacagatgatagggacatatcagaaacagtgagtgagacctggagtacagacgtcttgggaagtgactttgaccctaatattgatgaagatcgcttgcaagaaattgcaggtgctgcagcagagaacatgttaggcagtttgctgtgcctcccaggttcagggtcagtgcttcttgacccctgcactggttctaccatatcagagacaacaagtgaagcttggagtgtagaggtattgccaagtgactcagaggccccagacctaaagcaggaggagcgtctgcaagaactggagagctgttctggactgggtagcacatctgatgatacggatgtcagggaggtcagttcccgccccagcacaccaggcctcagtgttgtgtccggcataagtgcaacctctgaggatattcccaataagattgaagacctgagatctgagtgcagctctgattttgggggtaaagattctgtcactagtccagacatggatgaaataactcacgattttctttatatacttcagccaaaacaacattttcaacacattgaagcagaagcagacatgagaatccagctgtcttctagtgcccaccagctgacctctcctccttctcagtcagagtctctgctggccatgtttgatccactgtcttcacatgaaggggcttctgctgtggtaaggccaaaggttcactatgctaggccatcgcatccaccaccagatcccccaatcctggaaggagctgtgggaggaaatgaggccaggttgccaaactttggttcccatgttttaactccagctgaaatggaggcattcaagcaaaggcattcttaccctgagagactagttcgaagcaggagctctgatatagtatcttctgtccggagacccatgagtgaccccagctggaaccggcgtccaggaaatgaagagcgagaactccctycagctgcagccattggtgctacttctttggtggctgcacctcattcatcatcttcatccccgagtaaggactcctcaagaggagagactgaagaacgcaaagatagrgatgatgagaaatcagacaggaacagaccttggtggagaaaacgttttgtttcagccatgcctaaagctcctataccatttagaaagaaagaaaaacaagaaaaagacaaagatgatctggggcctgacagattctcaacactcacagatgatcccagccctagactcagtgcacaagctcaggtggctgaggatattctggacaaatacaggaatgccattaaacggaccagccccagtgatggagcaatggcaaactatgaaagtacagaggttatgggtgatggtgaaagtgcacatgattctccccgtgacgaagcactgcagaacatctcggctgatgatctcccagactctgcaagccaagcagcccacccgcaggattcagctttctcttacagagatgcaaaaaagaaactgaggcttgctctttgctctgcggactctgttgccttcccagtgctgacccattcaacaaggaatggtttaccagaccacacagacccagaagacaatgaaattgtatgcttcttaaaagttcaaatagctgaagcaattaatttacaagataagaatctaatggctcaacttcaagaaacaatgcgctgtgtgtgccgttttgataataggacttgtaggaaactgctggcttcgattgctgaggactacagaaaaagagccccatatattgcttatctcactcgttgtcgacaaggactacagaccacacaggctcacctggaaaggctattgcaaagagttttgcgggacaaagaagtggccaatcgatactttaccactgtctgtgtgagattactgcttgagagcaaagaaaagaagatcagggaattcattcaagactttcagaaactcaccgcagctgacgataaaactgctcaggtagaagattttctgcagtttctttatggtgcaatggcccaggatgtcatatggcaaaacgcgagtgaagaacagcttcaagatgcacagctggccattgagcgaagcgtgatgaaccggattttcaagctcgccttctaccctaatcaagatggggacatacttcgcgaccaggttcttcatgaacatatccagagattgtctaaagtagtgactgcaaatcacagagctcttcagataccagaggtttatcttcgagaagcaccatggccatctgcacaatcagaaatcaggacaataagtgcttataaaaccccccgggacaaagtgcagtgcatcctgagaatgtgctctacgattatgaacctcctgagcctggccaatgaggactctgtccctggagcggatgactttgttcctgtgttggtgtttgtgttgataaaggcaaatccaccctgtttgctgtctactgtgcagtatatcagtagcttttatgctagctgtctgtctggagaggagtcctattggtggatgcagttcacagcagcagtagaattcattaaaaccatcgatgaccgaaagtgaccaagaccaaggcccaccaaggcagcagactgttaatcagacaaacagatctctgagaaggtgcatcagctgctttgaaggctgaagattgttttgtatgatactgcacagcatcaggcattttaaagcagatctttactaaacaggttaatgagctaacaagcaggttctctcgtctttgggctctttcctttctgagttgcatattctattttcttgtccccaagtagagactagtactacaaaaagggaccacatttttcaagtatttctaagtataaaaaacaaaacaaaaatctcttaggaaatgtctagacctccattcttggattccctttctttccttttattttaaaaaagaacagtacccctcttttaagatgctgtcttacattaatgagcatctaatggaaagaaggtatgagttgcactgaggattagaatagtggtgcgttagtggcattatctataaatacactcacctaaattgaaagctaagaaggaaatgtaaatataatatatatttatatttgatgtaatatggacatctgcagattctaataaacaaggactattgctgatagtaggctgtgacatactgtcttgtgaaatggtttccttgacaaaatttaagctgagcttaaaagcaaaaaacaaaaagtacacagaaatatttattaaaatgtaatacagtttattgaactttctaggtatggagtttgatrgacagggctgcctttaatgagtgtgaaggtcactaagtcacttagacatctcaccgtggaagtttgtgagcctgcattaggagatagactgattaccatacatgacataaaaaggaacagtggatagctcatactttatggtggttcttctcctccgaaataatatactgcagaaatcccagacagagctccttacaaacctttaattgtaatatatttttgatgattattcacattgaatgcacagaccaagaattcagtgaatgtcattttttaaaaaactaatttgtattgtctgctctagtgatacaagttttactagtgataaactattttaatcaaccatactattcttatggaaaaaaatatctattttggcaggtttctgtgcctttatttccctcttctgaaaaaaagtctgtgttttcatagtttggtttgcattgtatatcaataattaatcaggaatgggttttggtgcctgaaaaattggccatggaggcacaccaaagcttcaagcacaagtcttgtacatgggccatcactgtctggtttcacttcgtgtgtttcctaaacacatttagctgcttttttaacaaactcagccccatacttgagtcccttgttgttgggagcatttccaggcatcttttaagggaactgtgacaaacagcctcgggcagatgaacacggaggctctctgttgtctgtctctgagatctttgtgtctgggaatgcctaaagattttatttttttttctttgtttttattttattttattttatttttttgagacagagtctcaccctgttgcccaggctggagtgcaatggtgcgatcttggctcactgcaacctccacctcccagttcaagtgattcccctgcctcagcctcscgagtagctaggactacaggcgcatgtcaccaagcccggctaatttttgtatttttagtagaaacggggtttcaccatgttggccaggatgatccctccaccccttcttattcatttactttacaataccaaaataacaaattgcataggagtgtgggatgtggtttctgccttctagakagagatcagaattaaactagtactatgaaatgtccttttgaatgttaggtcaagaaatccatgtacagagtcgtgcacttcattggctgtaactgtcaaacttgccttgtattagaagttaaatcccatcgtaaatacatcacgaggccagctgtgtgatttctgagacctagatgagagtccatttacttcagcctttgattcagtaaatgttaagcagcagaagacttcgaatggttgaaattcattgttacaggatttaactcataaaccaatgagag

SEQ ID NO: 337 - DNA, 6701 bp, Homo sapiens
gcgagtggcgaaggtggcggcagcggcggcgggggcagtcaccggctagggcgacggctccgaggccgagtggcggtccgacagagtcctccgtgtcctcccccgcatgacccccttggggtaagtgtactggagagagttggttatacattctaggaatctcaaagggtctggctctgtcacccaggctggagtgcagtgacacgatctcagctcactgtaacctccgcctcccgggttcaagcgatcctcccatctgaccctcccaagtagctggcattcagtgatcagcctttgagcctttcccacattgaagatggtgaaactagatattcatactctggctcatcacctcaagcaggaacgcttatatgtaaactctgagaaacagctcattcagaggctcaatgcagatgtacttaagacagctgaaaagttgtatcgtacagcatggattgcgaagcaacagagaatcaatttggatcggcttatcataaccagtgctgaagcttcccctgctgaatgttgccaacatgccaaaattttggaagatacacaatttgttgatgggtataagcaattgggatttcaggagactgcttatggagaattcttgagtcgattgagggaaaatcctcgtcttattgcctcctctttggttgctggagagaaacttaatcaggagaacacacaaagtgttatttacacagtttttacctccctgtatggcaattgcatcatgcaagaagatgaaagctacctccttcaggttttgcgatacttgattgaatttgaacttaaagaaagtgacaaccctaggcgacttttgaggagaggaacttgtgccttcagcatcttatttaaacttttttctgaaggactgttttctgccaaacttttcctcacagccactttacatgagccaattatgcaactgcttgttgaagatgaagatcacctggaaacagatccaaacaagctaattgagaggttctctccatctcagcaggaaaaactctttggagagaagggctcagatagattcaggcaaaaagttcaagaaatggtggagtccaatgaagcaaagytagtggctttggtgaacaaatttattggttatctcaaacagaacacatattgttttccacatagtttaaggtggatcgtgtctcagatgtacaaaaccctctcctgygtagataggctggaagttggggaggtcagggcaatgtgtactgatctcctgttggcctgcttcatttgtcctgcagttgtcaatccagaacaatatggaataatttccgatgctcctattaatgaagtagcacgatttaatctgatgcaggtaggccgccttttgcagcagttagcaatgactggctctgaagagggagatccccgaacaaagagcagccttggaaartttgacaaaagctgtgttgcmgctttccttgatgttgtgattgggggccgtgcagtggagacccctccattgtcttccgtcaatcttctggaaggattgagcagaactgtggtttatataacctacagtcagcttattactctggtgaattttatgaagagtgtgatgtctggagatcaactgagagaagatagaatggctcttgacaatttattggcaaacctacccccggccaagccaggaaaaagtagcagtttagaaatgactccctacaatacacctcagctatctccagcaaccactccagcaaataaaaagaatcgattacctatagcaactcggagcagaagccgcaccaatatgctaatggacctacatatggaccatgaargatcatctcaagaaaccatycaggaggtgcaaccagaagaggtgttggtcatttccttaggtacaggtccccagcttactccagggatgatgtcagaaaatgaggtcctaaacatgcagctttcggatggaggacaaggagatgtccctgttgatgaaaacaaactccatggtaaacctgataaaaccttgcgcttttccctctgcagtgataatctggaaggaatatctgaaggtccttcaaatcgctccaattcagtgtcctccctagacctagaaggagagtctgtgtcagaacttggagcaggaccttctggcagtaatggagttgaagctctacagctgttagaacatgagcaagctacaacacaggataaccttgatgataagctaaggaagtttgaaattcgtgacatgatgggattaacagatgatagggacatatcagaaacagtgagtgagacctggagtacagacgtcttgggaagtgactttgaccctaatattgatgaagatcgcttgcaagaaattgcaggtgctgcagcagagaacatgttaggcagtttgctgtgcctcccaggttcagggtcagtgcttcttgacccctgcactggttctaccatatcagagacaacaagtgaagcttggagtgtagaggtattgccaagtgactcagaggccccagacctaaagcaggaggagcgtctgcaagaactggagagctgttctggactgggtagcacatctgatgatacggatgtcagggaggtcagttcccgccccagcacaccaggcctcagtgttgtgtccggcataagtgcaacctctgaggatattcccaataagattgaagacctgagatctgagtgcagctctgattttgggggtaaagattctgtcactagtccagacatggatgaaataactcacggtgcccaccagctgacctctcctccttctcagtcagagtctctgctggccatgtttgatccactgtcttcacatgaaggggcttctgctgtggtaaggccaaaggttcactatgctaggccatcgcatccaccaccagatcccccaatcctggaaggagctgtgggaggaaatgaggccaggttgccaaactttggttcccatgttttaactccagctgaaatggaggcattcaagcaaaggcattcttaccctgagagactagttcgaagcaggagctctgatatagtatcttctgtccggagacccatgagtgaccccagctggaaccggcgtccaggaaatgaagagcgagaactccctycagctgcagccattggtgctacttctttggtggctgcacctcattcatcatcttcatccccgagtaaggactcctcaagaggagagactgaagaacgcaaagatagrgatgatgagaaatcagacaggaacagaccttggtggagaaaacgttttgtttcagccatgcctaaagatgatcccagccctagactcagtgcacaagctcaggtggctgaggatattctggacaaatacaggaatgccattaaacggaccagccccagtgatggagcaatggcaaactatgaaagtacagaggttatgggtgatggtgaaagtgcacatgattctccccgtgacgaagcactgcagaacatctcggctgatgatctcccagactctgcaagccaagcagcccacccgcaggattcagctttctcttacagagatgcaaaaaagaaactgaggcttgctctttgctctgcggactctgttgccttcccagtgctgacccattcaacaaggaatggtttaccagaccacacagacccagaagacaatgaaattgtatgcttcttaaaagttcaaatagctgaagcaattaatttacaagataagaatctaatggctcaacttcaagaaacaatgcgctgtgtgtgccgttttgataataggacttgtaggaaactgctggcttcgattgctgaggactacagaaaaagagccccatatattgcttatctcactcgttgtcgacaaggactacagaccacacaggctcacctggaaaggctattgcaaagagttttgcgggacaaagaagtggccaatcgatactttaccactgtctgtgtgagattactgcttgagagcaaagaaaagaagatcagggaattcattcaagactttcagaaactcaccgcagctgacgataaaactgctcaggtagaagattttctgcagtttctttatggtgcaatggcccaggatgtcatatggcaaaacgcgagtgaagaacagcttcaagatgcacagctggccattgagcgaagcgtgatgaaccggattttcaagctcgccttctaccctaatcaagatggggacatacttcgcgaccaggttcttcatgaacatatccagagattgtctaaagtagtgactgcaaatcacagagctcttcagataccagaggtttatcttcgagaagcaccatggccatctgcacaatcagaaatcaggacaataagtgcttataaaaccccccgggacaaagtgcagtgcatcctgagaatgtgctctacgattatgaacctcctgagcctggccaatgaggactctgtccctggagcggatgactttgttcctgtgttggtgtttgtgttgataaaggcaaatccaccctgtttgctgtctactgtgcagtatatcagtagcttttatgctagctgtctgtctggagaggagtcctattggtggatgcagttcacagcagcagtagaattcattaaaaccatcgatgaccgaaagtgaccaagaccaaggcccaccaaggcagcagactgttaatcagacaaacagatctctgagaaggtgcatcagctgctttgaaggctgaagattgttttgtatgatactgcacagcatcaggcattttaaagcagatctttactaaacaggttaatgagctaacaagcaggttctctcgtctttgggctctttcctttctgagttgcatattctattttcttgtccccaagtagagactagtactacaaaaagggaccacatttttcaagtatttctaagtataaaaaacaaaacaaaaatctcttaggaaatgtctagacctccattcttggattccctttctttccttttattttaaaaaagaacagtacccctcttttaagatgctgtcttacattaatgagcatctaatggaaagaaggtatgagttgcactgaggattagaatagtggtgcgttagtggcattatctataaatacactcacctaaattgaaagctaagaaggaaatgtaaatataatatatatttatatttgatgtaatatggacatctgcagattctaataaacaaggactattgctgatagtaggctgtgacatactgtcttgtgaaatggtttccttgacaaaatttaagctgagcttaaaagcaaaaaacaaaaagtacacagaaatatttattaaaatgtaatacagtttattgaactttctaggtatggagtttgatrgacagggctgcctttaatgagtgtgaaggtcactaagtcacttagacatctcaccgtggaagtttgtgagcctgcattaggagatagactgattaccatacatgacataaaaaggaacagtggatagctcatactttatggtggttcttctcctccgaaataatatactgcagaaatcccagacagagctccttacaaacctttaattgtaatatatttttgatgattattcacattgaatgcacagaccaagaattcagtgaatgtcattttttaaaaaactaatttgtattgtctgctctagtgatacaagttttactagtgataaactattttaatcaaccatactattcttatggaaaaaaatatctattttggcaggtttctgtgcctttatttccctcttctgaaaaaaagtctgtgttttcatagtttggtttgcattgtatatcaataattaatcaggaatgggttttggtgcctgaaaaattggccatggaggcacaccaaagcttcaagcacaagtcttgtacatgggccatcactgtctggtttcacttcgtgtgtttcctaaacacatttagctgcttttttaacaaactcagccccatacttgagtcccttgttgttgggagcatttccaggcatcttttaagggaactgtgacaaacagcctcgggcagatgaacacggaggctctctgttgtctgtctctgagatctttgtgtctgggaatgcctaaagattttatttttttttctttgtttttattttattttattttatttttttgagacagagtctcaccctgttgcccaggctggagtgcaatggtgcgatcttggctcactgcaacctccacctcccagttcaagtgattcccctgcctcagcctcscgagtagctaggactacaggcgcatgtcaccaagcccggctaatttttgtatttttagtagaaacggggtttcaccatgttggccaggatgatccctccaccccttcttattcatttactttacaataccaaaataacaaattgcataggagtgtgggatgtggtttctgccttctagakagagatcagaattaaactagtactatgaaatgtccttttgaatgttaggtcaagaaatccatgtacagagtcgtgcacttcattggctgtaactgtcaaacttgccttgtattagaagttaaatcccatcgtaaatacatcacgaggccagctgtgtgatttctgagacctagatgagagtccatttacttcagcctttgattcagtaaatgttaagcagcagaagacttcgaatggttgaaattcattgttacaggatttaactcataaaccaatgagag

SEQ ID NO: 338 - DNA, 6737 bp, Homo sapiens
aggacgcagggaagccaacaggcgagtggcgaaggtggcggcagcggcggcgggggcagtcaccggctagggcgacggctccgaggccgagtggcggtccgacagagtcctccgtgtcctcccccgcatgacccccttgtgatcagcctttgagcctttcccacattgaagatggtgaaactagatattcatactctggctcatcacctcaagcaggaacgcttatatgtaaactctgagaaacagctcattcagaggctcaatgcagatgtacttaagacagctgaaaagttgtatcgtacagcatggattgcgaagcaacagagaatcaatttggatcggcttatcataaccagtgctgaagcttcccctgctgaatgttgccaacatgccaaaattttggaagatacacaatttgttgatgggtataagcaattgggatttcaggagactgcttatggagaattcttgagtcgattgagggaaaatcctcgtcttattgcctcctctttggttgctggagagaaacttaatcaggagaacacacaaagtgttatttacacagtttttacctccctgtatggcaattgcatcatgcaagaagatgaaagctacctccttcaggttttgcgatacttgattgaatttgaacttaaagaaagtgacaaccctaggcgacttttgaggagaggaacttgtgccttcagcatcttatttaaacttttttctgaaggactgttttctgccaaacttttcctcacagccactttacatgagccaattatgcaactgcttgttgaagatgaagatcacctggaaacagatccaaacaagctaattgagaggttctctccatctcagcaggaaaaactctttggagagaagggctcagatagattcaggcaaaaagttcaagaaatggtggagtccaatgaagcaaagytagtggctttggtgaacaaatttattggttatctcaaacagaacacatattgttttccacatagtttaaggtggatcgtgtctcagatgtacaaaaccctctcctgygtagataggctggaagttggggaggtcagggcaatgtgtactgatctcctgttggcctgcttcatttgtcctgcagttgtcaatccagaacaatatggaataatttccgatgctcctattaatgaagtagcacgatttaatctgatgcaggtaggccgccttttgcagcagttagcaatgactggctctgaagagggagatccccgaacaaagagcagccttggaaartttgacaaaagctgtgttgcmgctttccttgatgttgtgattgggggccgtgcagtggagacccctccattgtcttccgtcaatcttctggaaggattgagcagaactgtggtttatataacctacagtcagcttattactctggtgaattttatgaagagtgtgatgtctggagatcaactgagagaagatagaatggctcttgacaatttattggcaaacctacccccggccaagccaggaaaaagtagcagtttagaaatgactccctacaatacacctcagctatctccagcaaccactccagcaaataaaaagaatcgattacctatagcaactcggagcagaagccgcaccaatatgctaatggacctacatatggaccatgaargatcatctcaagaaaccatycaggaggtgcaaccagaagaggtgttggtcatttccttaggtacaggtccccagcttactccagggatgatgtcagaaaatgaggtcctaaacatgcagctttcggatggaggacaaggagatgtccctgttgatgaaaacaaactccatggtaaacctgataaaaccttgcgcttttccctctgcagtgataatctggaaggaatatctgaaggtccttcaaatcgctccaattcagtgtcctccctagacctagaaggagagtctgtgtcagaacttggagcaggaccttctggcagtaatggagttgaagctctacagctgttagaacatgagcaagctacaacacaggataaccttgatgataagctaaggaagtttgaaattcgtgacatgatgggattaacagatgatagggacatatcagaaacagtgagtgagacctggagtacagacgtcttgggaagtgactttgaccctaatattgatgaagatcgcttgcaagaaattgcaggtgctgcagcagagaacatgttaggcagtttgctgtgcctcccaggttcagggtcagtgcttcttgacccctgcactggttctaccatatcagagacaacaagtgaagcttggagtgtagaggtattgccaagtgactcagaggccccagacctaaagcaggaggagcgtctgcaagaactggagagctgttctggactgggtagcacatctgatgatacggatgtcagggaggtcagttcccgccccagcacaccaggcctcagtgttgtgtccggcataagtgcaacctctgaggatattcccaataagattgaagacctgagatctgagtgcagctctgattttgggggtaaagattctgtcactagtccagacatggatgaaataactcacggtgcccaccagctgacctctcctccttctcagtcagagtctctgctggccatgtttgatccactgtcttcacatgaaggggcttctgctgtggtaaggccaaaggttcactatgctaggccatcgcatccaccaccagatcccccaatcctggaaggagctgtgggaggaaatgaggccaggttgccaaactttggttcccatgttttaactccagctgaaatggaggcattcaagcaaaggcattcttaccctgagagactagttcgaagcaggagctctgatatagtatcttctgtccggagacccatgagtgaccccagctggaaccggcgtccaggaaatgaagagcgagaactccctycagctgcagccattggtgctacttctttggtggctgcacctcattcatcatcttcatccccgagtaaggactcctcaagaggagagactgaagaacgcaaagatagrgatgatgagaaatcagacaggaacagaccttggtggagaaaacgttttgtttcagccatgcctaaagatgatcccagccctagactcagtgcacaagctcaggtggctgaggatattctggacaaatacaggaatgccattaaacggaccagccccagtgatggagcaatggcaaactatgaaagtacagaggttatgggtgatggtgaaagtgcacatgattctccccgtgacgaagcactgcagaacatctcggctgatgatctcccagactctgcaagccaagcagcccacccgcaggattcagctttctcttacagagatgcaaaaaagaaactgaggcttgctctttgctctgcggactctgttgccttcccagtgctgacccattcaacaaggaatggtttaccagaccacacagacccagaagacaatgaaattgtatgcttcttaaaagttcaaatagctgaagcaattaatttacaagataagaatctaatggctcaacttcaagaaacaatgcgctgtgtgtgccgttttgataataggacttgtaggaaactgctggcttcgattgctgaggactacagaaaaagagccccatatattgcttatctcactcgttgtcgacaaggactacagaccacacaggctcacctggaaaggctattgcaaagagttttgcgggacaaagaagtggccaatcgatactttaccactgtctgtgtgagattactgcttgagagcaaagaaaagaagatcagggaattcattcaagactttcagaaactcaccgcagctgacgataaaactgctcaggtagaagattttctgcagtttctttatggtgcaatggcccaggatgtcatatggcaaaacgcgagtgaagaacagcttcaagatgcacagctggccattgagcgaagcgtgatgaaccggattttcaagctcgccttctaccctaatcaagatggggacatacttcgcgaccaggttcttcatgaacatatccagagattgtctaaagtagtgactgcaaatcacagagctcttcagataccagaggtttatcttcgagaagcaccatggccatctgcacaatcagaaatcaggacaataagtgcttataaaaccccccgggacaaagtgcagtgcatcctgagaatgtgctctacgattatgaacctcctgagcctggccaatgaggactctgtccctggagcggatgactttgttcctgtgttggtgtttgtgttgataaaggcaaatccaccctgtttgctgtctactgtgcagtatatcagtagcttttatgctagctgtctgtctggagaggagtcctattggtggatgcagttcacagcagcagtagaattcattaaaaccatcgatgaccgaaagtgaccaagaccaaggcccaccaaggcagcagactgttaatcagacaaacagatctctgagaaggtgcatcagctgctttgaaggctgaagattgttttgtatgatactgcacagcatcaggcattttaaagcagatctttactaaacaggttaatgagctaacaagcaggttctctcgtctttgggctctttcctttctgagttgcatattctattttcttgtccccaagtagagactagtactacaaaaagggaccacatttttcaagtatttctaagtataaaaaacaaaacaaaaatctcttaggaaatgtctagacctccattcttggattccctttctttccttttattttaaaaaagaacagtacccctcttttaagatgctgtcttacattaatgagcatctaatggaaagaaggtatgagttgcactgaggattagaatagtggtgcgttagtggcattatctataaatacactcacctaaattgaaagctaagaaggaaatgtaaatataatatatatttatatttgatgtaatatggacatctgcagattctaataaacaaggactattgctgatagtaggctgtgacatactgtcttgtgaaatggtttccttgacaaaatttaagctgagcttaaaagcaaaaaacaaaaagtacacagaaatatttattaaaatgtaatacagtttattgaactttctaggtatggagtttgatrgacagggctgcctttaatgagtgtgaaggtcactaagtcacttagacatctcaccgtggaagtttgtgagcctgcattaggagatagactgattaccatacatgacataaaaaggaacagtggatagctcatactttatggtggttcttctcctccgaaataatatactgcagaaatcccagacagagctccttacaaacctttaattgtaatatatttttgatgattattcacattgaatgcacagaccaagaattcagtgaatgtcattttttaaaaaactaatttgtattgtctgctctagtgatacaagttttactagtgataaactattttaatcaaccatactattcttatggaaaaaaatatctattttggcaggtttctgtgcctttatttccctcttctgaaaaaaagtctgtgttttcatagtttggtttgcattgtatatcaataattaatcaggaatgggttttggtgcctgaaaaattggccatggaggcacaccaaagcttcaagcacaagtcttgtacatgggccatcactgtctggtttcacttcgtgtgtttcctaaacacatttagctgcttttttaacaaactcagccccatacttgagtcccttgttgttgggagcatttccaggcatcttttaagggaactgtgacaaacagcctcgggcagatgaacacggaggctctctgttgtctgtctctgagatctttgtgtctgggaatgcctaaagattttatttttttttctttgtttttattttattttattttatttttttgagacagagtctcaccctgttgcccaggctggagtgcaatggtgcgatcttggctcactgcaacctccacctcccagttcaagtgattcccctgcctcagcctcscgagtagctaggactacaggcgcatgtcaccaagcccggctaatttttgtatttttagtagaaacggggtttcaccatgttggccaggatgatcctcaatctcctgacctcgtgatccacccgccttggcctcccaaagtgcgggattacaagcgtgaaccaccctgcccagccagaaactagattttctttatgcctccaccccttcttattcatttactttacaataccaaaataacaaattgcataggagtgtgggatgtggtttctgccttctagakagagatcagaattaaactagtactatgaaatgtccttttgaatgttaggtcaagaaatccatgtacagagtcgtgcacttcattggctgtaactgtcaaacttgccttgtattagaagttaaatcccatcgtaaatacatcacgaggccagctgtgtgatttctgagacctagatgagagtccatttacttcagcctttgattcagtaaatgttaagcagcagaagacttcgaatggttgaaattcattgttacaggatttaactcataaaccaatgagagattttttttttctctgcaatggttgctaagtctattccatgttaacactgtggaaataaatatgaagatgtggacattgc

SEQ ID NO: 339 - DNA, 6704 bp, Homo sapiens
gcgagtggcgaaggtggcggcagcggcggcgggggcagtcaccggctagggcgacggctccgaggccgagtggcggtccgacagagtcctccgtgtcctcccccgcatgacccccttggggtaagtgtactggagagagttggttatacattctaggaatctcaaagggtctggctctgtcacccaggctggagtgcagtgacacgatctcagctcactgtaacctccgcctcccgggttcaagcgatcctcccatctgaccctcccaagtagctggcattcagtgatcagcctttgagcctttcccacattgaagatggtgaaactagatattcatactctggctcatcacctcaagcaggaacgcttatatgtaaactctgagaaacagctcattcagaggctcaatgcagatgtacttaagacagctgaaaagttgtatcgtacagcatggattgcgaagcaacagagaatcaatttggatcggcttatcataaccagtgctgaagcttcccctgctgaatgttgccaacatgccaaaattttggaagatacacaatttgttgatgggtataagcaattgggatttcaggagactgcttatggagaattcttgagtcgattgagggaaaatcctcgtcttattgcctcctctttggttgctggagagaaacttaatcaggagaacacacaaagtgttatttacacagtttttacctccctgtatggcaattgcatcatgcaagaagatgaaagctacctccttcaggttttgcgatacttgattgaatttgaacttaaagaaagtgacaaccctaggcgacttttgaggagaggaacttgtgccttcagcatcttatttaaacttttttctgaaggactgttttctgccaaacttttcctcacagccactttacatgagccaattatgcaactgcttgttgaagatgaagatcacctggaaacagatccaaacaagctaattgagaggttctctccatctcagcaggaaaaactctttggagagaagggctcagatagattcaggcaaaaagttcaagaaatggtggagtccaatgaagcaaagytagtggctttggtgaacaaatttattggttatctcaaacagaacacatattgttttccacatagtttaaggtggatcgtgtctcagatgtacaaaaccctctcctgygtagataggctggaagttggggaggtcagggcaatgtgtactgatctcctgttggcctgcttcatttgtcctgcagttgtcaatccagaacaatatggaataatttccgatgctcctattaatgaagtagcacgatttaatctgatgcaggtaggccgccttttgcagcagttagcaatgactggctctgaagagggagatccccgaacaaagagcagccttggaaartttgacaaaagctgtgttgcmgctttccttgatgttgtgattgggggccgtgcagtggagacccctccattgtcttccgtcaatcttctggaaggattgagcagaactgtggtttatataacctacagtcagcttattactctggtgaattttatgaagagtgtgatgtctggagatcaactgagagaagatagaatggctcttgacaatttattggcaaacctacccccggccaagccaggaaaaagtagcagtttagaaatgactccctacaatacacctcagctatctccagcaaccactccagcaaataaaaagaatcgattacctatagcaactcggagcagaagccgcaccaatatgctaatggacctacatatggaccatgaargatcatctcaagaaaccatycaggaggtgcaaccagaagaggtgttggtcatttccttaggtacaggtccccagcttactccagggatgatgtcagaaaatgaggtcctaaacatgcagctttcggatggaggacaaggagatgtccctgttgatgaaaacaaactccatggtaaacctgataaaaccttgcgcttttccctctgcagtgataatctggaaggaatatctgaaggtccttcaaatcgctccaattcagtgtcctccctagacctagaaggagagtctgtgtcagaacttggagcaggaccttctggcagtaatggagttgaagctctacagctgttagaacatgagcaagctacaacacaggataaccttgatgataagctaaggaagtttgaaattcgtgacatgatgggattaacagatgatagggacatatcagaaacagtgagtgagacctggagtacagacgtcttgggaagtgactttgaccctaatattgatgaagatcgcttgcaagaaattgcaggtgctgcagcagagaacatgttaggcagtttgctgtgcctcccaggttcagggtcagtgcttcttgacccctgcactggttctaccatatcagagacaacaagtgaagcttggagtgtagaggtattgccaagtgactcagaggccccagacctaaagcaggaggagcgtctgcaagaactggagagctgttctggactgggtagcacatctgatgatacggatgtcagggaggtcagttcccgccccagcacaccaggcctcagtgttgtgtccggcataagtgcaacctctgaggatattcccaataagattgaagacctgagatctgagtgcagctctgattttgggggtaaagattctgtcactagtccagacatggatgaaataactcacggggcttctgctgtggtaaggccaaaggttcactatgctaggccatcgcatccaccaccagatcccccaatcctggaaggagctgtgggaggaaatgaggccaggttgccaaactttggttcccatgttttaactccagctgaaatggaggcattcaagcaaaggcattcttaccctgagagactagttcgaagcaggagctctgatatagtatcttctgtccggagacccatgagtgaccccagctggaaccggcgtccaggaaatgaagagcgagaactccctycagctgcagccattggtgctacttctttggtggctgcacctcattcatcatcttcatccccgagtaaggactcctcaagaggagagactgaagaacgcaaagatagrgatgatgagaaatcagacaggaacagaccttggtggagaaaacgttttgtttcagccatgcctaaagctcctataccatttagaaagaaagaaaaacaagaaaaagacaaagatgatctggggcctgacagattctcaacactcacagatgatcccagccctagactcagtgcacaagctcaggtggctgaggatattctggacaaatacaggaatgccattaaacggaccagccccagtgatggagcaatggcaaactatgaaagtacagaggttatgggtgatggtgaaagtgcacatgattctccccgtgacgaagcactgcagaacatctcggctgatgatctcccagactctgcaagccaagcagcccacccgcaggattcagctttctcttacagagatgcaaaaaagaaactgaggcttgctctttgctctgcggactctgttgccttcccagtgctgacccattcaacaaggaatggtttaccagaccacacagacccagaagacaatgaaattgtatgcttcttaaaagttcaaatagctgaagcaattaatttacaagataagaatctaatggctcaacttcaagaaacaatgcgctgtgtgtgccgttttgataataggacttgtaggaaactgctggcttcgattgctgaggactacagaaaaagagccccatatattgcttatctcactcgttgtcgacaaggactacagaccacacaggctcacctggaaaggctattgcaaagagttttgcgggacaaagaagtggccaatcgatactttaccactgtctgtgtgagattactgcttgagagcaaagaaaagaagatcagggaattcattcaagactttcagaaactcaccgcagctgacgataaaactgctcaggtagaagattttctgcagtttctttatggtgcaatggcccaggatgtcatatggcaaaacgcgagtgaagaacagcttcaagatgcacagctggccattgagcgaagcgtgatgaaccggattttcaagctcgccttctaccctaatcaagatggggacatacttcgcgaccaggttcttcatgaacatatccagagattgtctaaagtagtgactgcaaatcacagagctcttcagataccagaggtttatcttcgagaagcaccatggccatctgcacaatcagaaatcaggacaataagtgcttataaaaccccccgggacaaagtgcagtgcatcctgagaatgtgctctacgattatgaacctcctgagcctggccaatgaggactctgtccctggagcggatgactttgttcctgtgttggtgtttgtgttgataaaggcaaatccaccctgtttgctgtctactgtgcagtatatcagtagcttttatgctagctgtctgtctggagaggagtcctattggtggatgcagttcacagcagcagtagaattcattaaaaccatcgatgaccgaaagtgaccaagaccaaggcccaccaaggcagcagactgttaatcagacaaacagatctctgagaaggtgcatcagctgctttgaaggctgaagattgttttgtatgatactgcacagcatcaggcattttaaagcagatctttactaaacaggttaatgagctaacaagcaggttctctcgtctttgggctctttcctttctgagttgcatattctattttcttgtccccaagtagagactagtactacaaaaagggaccacatttttcaagtatttctaagtataaaaaacaaaacaaaaatctcttaggaaatgtctagacctccattcttggattccctttctttccttttattttaaaaaagaacagtacccctcttttaagatgctgtcttacattaatgagcatctaatggaaagaaggtatgagttgcactgaggattagaatagtggtgcgttagtggcattatctataaatacactcacctaaattgaaagctaagaaggaaatgtaaatataatatatatttatatttgatgtaatatggacatctgcagattctaataaacaaggactattgctgatagtaggctgtgacatactgtcttgtgaaatggtttccttgacaaaatttaagctgagcttaaaagcaaaaaacaaaaagtacacagaaatatttattaaaatgtaatacagtttattgaactttctaggtatggagtttgatrgacagggctgcctttaatgagtgtgaaggtcactaagtcacttagacatctcaccgtggaagtttgtgagcctgcattaggagatagactgattaccatacatgacataaaaaggaacagtggatagctcatactttatggtggttcttctcctccgaaataatatactgcagaaatcccagacagagctccttacaaacctttaattgtaatatatttttgatgattattcacattgaatgcacagaccaagaattcagtgaatgtcattttttaaaaaactaatttgtattgtctgctctagtgatacaagttttactagtgataaactattttaatcaaccatactattcttatggaaaaaaatatctattttggcaggtttctgtgcctttatttccctcttctgaaaaaaagtctgtgttttcatagtttggtttgcattgtatatcaataattaatcaggaatgggttttggtgcctgaaaaattggccatggaggcacaccaaagcttcaagcacaagtcttgtacatgggccatcactgtctggtttcacttcgtgtgtttcctaaacacatttagctgcttttttaacaaactcagccccatacttgagtcccttgttgttgggagcatttccaggcatcttttaagggaactgtgacaaacagcctcgggcagatgaacacggaggctctctgttgtctgtctctgagatctttgtgtctgggaatgcctaaagattttatttttttttctttgtttttattttattttattttatttttttgagacagagtctcaccctgttgcccaggctggagtgcaatggtgcgatcttggctcactgcaacctccacctcccagttcaagtgattcccctgcctcagcctcscgagtagctaggactacaggcgcatgtcaccaagcccggctaatttttgtatttttagtagaaacggggtttcaccatgttggccaggatgatccctccaccccttcttattcatttactttacaataccaaaataacaaattgcataggagtgtgggatgtggtttctgccttctagakagagatcagaattaaactagtactatgaaatgtccttttgaatgttaggtcaagaaatccatgtacagagtcgtgcacttcattggctgtaactgtcaaacttgccttgtattagaagttaaatcccatcgtaaatacatcacgaggccagctgtgtgatttctgagacctagatgagagtccatttacttcagcctttgattcagtaaatgttaagcagcagaagacttcgaatggttgaaattcattgttacaggatttaactcataaaccaatgagag

SEQ ID NO: 340 - DNA, 6899 bp, Homo sapiens
aggacgcagggaagccaacaggcgagtggcgaaggtggcggcagcggcggcgggggcagtcaccggctagggcgacggctccgaggccgagtggcggtccgacagagtcctccgtgtcctcccccgcatgacccccttgtgatcagcctttgagcctttcccacattgaagatggtgaaactagatattcatactctggctcatcacctcaagcaggaacgcttatatgtaaactctgagaaacagctcattcagaggctcaatgcagatgtacttaagacagctgaaaagttgtatcgtacagcatggattgcgaagcaacagagaatcaatttggatcggcttatcataaccagtgctgaagcttcccctgctgaatgttgccaacatgccaaaattttggaagatacacaatttgttgatgggtataagcaattgggatttcaggagactgcttatggagaattcttgagtcgattgagggaaaatcctcgtcttattgcctcctctttggttgctggagagaaacttaatcaggagaacacacaaagtgttatttacacagtttttacctccctgtatggcaattgcatcatgcaagaagatgaaagctacctccttcaggttttgcgatacttgattgaatttgaacttaaagaaagtgacaaccctaggcgacttttgaggagaggaacttgtgccttcagcatcttatttaaacttttttctgaaggactgttttctgccaaacttttcctcacagccactttacatgagccaattatgcaactgcttgttgaagatgaagatcacctggaaacagatccaaacaagctaattgagaggttctctccatctcagcaggaaaaactctttggagagaagggctcagatagattcaggcaaaaagttcaagaaatggtggagtccaatgaagcaaagytagtggctttggtgaacaaatttattggttatctcaaacagaacacatattgttttccacatagtttaaggtggatcgtgtctcagatgtacaaaaccctctcctgygtagataggctggaagttggggaggtcagggcaatgtgtactgatctcctgttggcctgcttcatttgtcctgcagttgtcaatccagaacaatatggaataatttccgatgctcctattaatgaagtagcacgatttaatctgatgcaggtaggccgccttttgcagcagttagcaatgactggctctgaagagggagatccccgaacaaagagcagccttggaaartttgacaaaagctgtgttgcmgctttccttgatgttgtgattgggggccgtgcagtggagacccctccattgtcttccgtcaatcttctggaaggattgagcagaactgtggtttatataacctacagtcagcttattactctggtgaattttatgaagagtgtgatgtctggagatcaactgagagaagatagaatggctcttgacaatttattggcaaacctacccccggccaagccaggaaaaagtagcagtttagaaatgactccctacaatacacctcagctatctccagcaaccactccagcaaataaaaagaatcgattacctatagcaactcggagcagaagccgcaccaatatgctaatggacctacatatggaccatgaargatcatctcaagaaaccatycaggaggtgcaaccagaagaggtgttggtcatttccttaggtacaggtccccagcttactccagggatgatgtcagaaaatgaggtcctaaacatgcagctttcggatggaggacaaggagatgtccctgttgatgaaaacaaactccatggtaaacctgataaaaccttgcgcttttccctctgcagtgataatctggaaggaatatctgaaggtccttcaaatcgctccaattcagtgtcctccctagacctagaaggagagtctgtgtcagaacttggagcaggaccttctggcagtaatggagttgaagctctacagctgttagaacatgagcaagctacaacacaggataaccttgatgataagctaaggaagtttgaaattcgtgacatgatgggattaacagatgatagggacatatcagaaacagtgagtgagacctggagtacagacgtcttgggaagtgactttgaccctaatattgatgaagatcgcttgcaagaaattgcaggtgctgcagcagagaacatgttaggcagtttgctgtgcctcccaggttcagggtcagtgcttcttgacccctgcactggttctaccatatcagagacaacaagtgaagcttggagtgtagaggtattgccaagtgactcagaggccccagacctaaagcaggaggagcgtctgcaagaactggagagctgttctggactgggtagcacatctgatgatacggatgtcagggaggtcagttcccgccccagcacaccaggcctcagtgttgtgtccggcataagtgcaacctctgaggatattcccaataagattgaagacctgagatctgagtgcagctctgattttgggggtaaagattctgtcactagtccagacatggatgaaataactcacgattttctttatatacttcagccaaaacaacattttcaacacattgaagcagaagcagacatgagaatccagctgtcttctagtgcccaccagctgacctctcctccttctcagtcagagtctctgctggccatgtttgatccactgtcttcacatgaaggggcttctgctgtggtaaggccaaaggttcactatgctaggccatcgcatccaccaccagatcccccaatcctggaaggagctgtgggaggaaatgaggccaggttgccaaactttggttcccatgttttaactccagctgaaatggaggcattcaagcaaaggcattcttaccctgagagactagttcgaagcaggagctctgatatagtatcttctgtccggagacccatgagtgaccccagctggaaccggcgtccaggaaatgaagagcgagaactccctycagctgcagccattggtgctacttctttggtggctgcacctcattcatcatcttcatccccgagtaaggactcctcaagaggagagactgaagaacgcaaagatagrgatgatgagaaatcagacaggaacagaccttggtggagaaaacgttttgtttcagccatgcctaaagctcctataccatttagaaagaaagaaaaacaagaaaaagacaaagatgatctggggcctgacagattctcaacactcacagatgatcccagccctagactcagtgcacaagctcaggtggctgaggatattctggacaaatacaggaatgccattaaacggaccagccccagtgatggagcaatggcaaactatgaaagtacagaggttatgggtgatggtgaaagtgcacatgattctccccgtgacgaagcactgcagaacatctcggctgatgatctcccagactctgcaagccaagcagcccacccgcaggattcagctttctcttacagagatgcaaaaaagaaactgaggcttgctctttgctctgcggactctgttgccttcccagtgctgacccattcaacaaggaatggtttaccagaccacacagacccagaagacaatgaaattgtatgcttcttaaaagttcaaatagctgaagcaattaatttacaagataagaatctaatggctcaacttcaagaaacaatgcgctgtgtgtgccgttttgataataggacttgtaggaaactgctggcttcgattgctgaggactacagaaaaagagccccatatattgcttatctcactcgttgtcgacaaggactacagaccacacaggctcacctggaaaggctattgcaaagagttttgcgggacaaagaagtggccaatcgatactttaccactgtctgtgtgagattactgcttgagagcaaagaaaagaagatcagggaattcattcaagactttcagaaactcaccgcagctgacgataaaactgctcaggtagaagattttctgcagtttctttatggtgcaatggcccaggatgtcatatggcaaaacgcgagtgaagaacagcttcaagatgcacagctggccattgagcgaagcgtgatgaaccggattttcaagctcgccttctaccctaatcaagatggggacatacttcgcgaccaggttcttcatgaacatatccagagattgtctaaagtagtgactgcaaatcacagagctcttcagataccagaggtttatcttcgagaagcaccatggccatctgcacaatcagaaatcaggacaataagtgcttataaaaccccccgggacaaagtgcagtgcatcctgagaatgtgctctacgattatgaacctcctgagcctggccaatgaggactctgtccctggagcggatgactttgttcctgtgttggtgtttgtgttgataaaggcaaatccaccctgtttgctgtctactgtgcagtatatcagtagcttttatgctagctgtctgtctggagaggagtcctattggtggatgcagttcacagcagcagtagaattcattaaaaccatcgatgaccgaaagtgaccaagaccaaggcccaccaaggcagcagactgttaatcagacaaacagatctctgagaaggtgcatcagctgctttgaaggctgaagattgttttgtatgatactgcacagcatcaggcattttaaagcagatctttactaaacaggttaatgagctaacaagcaggttctctcgtctttgggctctttcctttctgagttgcatattctattttcttgtccccaagtagagactagtactacaaaaagggaccacatttttcaagtatttctaagtataaaaaacaaaacaaaaatctcttaggaaatgtctagacctccattcttggattccctttctttccttttattttaaaaaagaacagtacccctcttttaagatgctgtcttacattaatgagcatctaatggaaagaaggtatgagttgcactgaggattagaatagtggtgcgttagtggcattatctataaatacactcacctaaattgaaagctaagaaggaaatgtaaatataatatatatttatatttgatgtaatatggacatctgcagattctaataaacaaggactattgctgatagtaggctgtgacatactgtcttgtgaaatggtttccttgacaaaatttaagctgagcttaaaagcaaaaaacaaaaagtacacagaaatatttattaaaatgtaatacagtttattgaactttctaggtatggagtttgatrgacagggctgcctttaatgagtgtgaaggtcactaagtcacttagacatctcaccgtggaagtttgtgagcctgcattaggagatagactgattaccatacatgacataaaaaggaacagtggatagctcatactttatggtggttcttctcctccgaaataatatactgcagaaatcccagacagagctccttacaaacctttaattgtaatatatttttgatgattattcacattgaatgcacagaccaagaattcagtgaatgtcattttttaaaaaactaatttgtattgtctgctctagtgatacaagttttactagtgataaactattttaatcaaccatactattcttatggaaaaaaatatctattttggcaggtttctgtgcctttatttccctcttctgaaaaaaagtctgtgttttcatagtttggtttgcattgtatatcaataattaatcaggaatgggttttggtgcctgaaaaattggccatggaggcacaccaaagcttcaagcacaagtcttgtacatgggccatcactgtctggtttcacttcgtgtgtttcctaaacacatttagctgcttttttaacaaactcagccccatacttgagtcccttgttgttgggagcatttccaggcatcttttaagggaactgtgacaaacagcctcgggcagatgaacacggaggctctctgttgtctgtctctgagatctttgtgtctgggaatgcctaaagattttatttttttttctttgtttttattttattttattttatttttttgagacagagtctcaccctgttgcccaggctggagtgcaatggtgcgatcttggctcactgcaacctccacctcccagttcaagtgattcccctgcctcagcctcscgagtagctaggactacaggcgcatgtcaccaagcccggctaatttttgtatttttagtagaaacggggtttcaccatgttggccaggatgatcctcaatctcctgacctcgtgatccacccgccttggcctcccaaagtgcgggattacaagcgtgaaccaccctgcccagccagaaactagattttctttatgcctccaccccttcttattcatttactttacaataccaaaataacaaattgcataggagtgtgggatgtggtttctgccttctagakagagatcagaattaaactagtactatgaaatgtccttttgaatgttaggtcaagaaatccatgtacagagtcgtgcacttcattggctgtaactgtcaaacttgccttgtattagaagttaaatcccatcgtaaatacatcacgaggccagctgtgtgatttctgagacctagatgagagtccatttacttcagcctttgattcagtaaatgttaagcagcagaagacttcgaatggttgaaattcattgttacaggatttaactcataaaccaatgagagattttttttttctctgcaatggttgctaagtctattccatgttaacactgtggaaataaatatgaagatgtggacattgc

SEQ ID NO: 341 - DNA, 6818 bp, Homo sapiens
aggacgcagggaagccaacaggcgagtggcgaaggtggcggcagcggcggcgggggcagtcaccggctagggcgacggctccgaggccgagtggcggtccgacagagtcctccgtgtcctcccccgcatgacccccttgtgatcagcctttgagcctttcccacattgaagatggtgaaactagatattcatactctggctcatcacctcaagcaggaacgcttatatgtaaactctgagaaacagctcattcagaggctcaatgcagatgtacttaagacagctgaaaagttgtatcgtacagcatggattgcgaagcaacagagaatcaatttggatcggcttatcataaccagtgctgaagcttcccctgctgaatgttgccaacatgccaaaattttggaagatacacaatttgttgatgggtataagcaattgggatttcaggagactgcttatggagaattcttgagtcgattgagggaaaatcctcgtcttattgcctcctctttggttgctggagagaaacttaatcaggagaacacacaaagtgttatttacacagtttttacctccctgtatggcaattgcatcatgcaagaagatgaaagctacctccttcaggttttgcgatacttgattgaatttgaacttaaagaaagtgacaaccctaggcgacttttgaggagaggaacttgtgccttcagcatcttatttaaacttttttctgaaggactgttttctgccaaacttttcctcacagccactttacatgagccaattatgcaactgcttgttgaagatgaagatcacctggaaacagatccaaacaagctaattgagaggttctctccatctcagcaggaaaaactctttggagagaagggctcagatagattcaggcaaaaagttcaagaaatggtggagtccaatgaagcaaagytagtggctttggtgaacaaatttattggttatctcaaacagaacacatattgttttccacatagtttaaggtggatcgtgtctcagatgtacaaaaccctctcctgygtagataggctggaagttggggaggtcagggcaatgtgtactgatctcctgttggcctgcttcatttgtcctgcagttgtcaatccagaacaatatggaataatttccgatgctcctattaatgaagtagcacgatttaatctgatgcaggtaggccgccttttgcagcagttagcaatgactggctctgaagagggagatccccgaacaaagagcagccttggaaartttgacaaaagctgtgttgcmgctttccttgatgttgtgattgggggccgtgcagtggagacccctccattgtcttccgtcaatcttctggaaggattgagcagaactgtggtttatataacctacagtcagcttattactctggtgaattttatgaagagtgtgatgtctggagatcaactgagagaagatagaatggctcttgacaatttattggcaaacctacccccggccaagccaggaaaaagtagcagtttagaaatgactccctacaatacacctcagctatctccagcaaccactccagcaaataaaaagaatcgattacctatagcaactcggagcagaagccgcaccaatatgctaatggacctacatatggaccatgaargatcatctcaagaaaccatycaggaggtgcaaccagaagaggtgttggtcatttccttaggtacaggtccccagcttactccagggatgatgtcagaaaatgaggtcctaaacatgcagctttcggatggaggacaaggagatgtccctgttgatgaaaacaaactccatggtaaacctgataaaaccttgcgcttttccctctgcagtgataatctggaaggaatatctgaaggtccttcaaatcgctccaattcagtgtcctccctagacctagaaggagagtctgtgtcagaacttggagcaggaccttctggcagtaatggagttgaagctctacagctgttagaacatgagcaagctacaacacaggataaccttgatgataagctaaggaagtttgaaattcgtgacatgatgggattaacagatgatagggacatatcagaaacagtgagtgagacctggagtacagacgtcttgggaagtgactttgaccctaatattgatgaagatcgcttgcaagaaattgcaggtgctgcagcagagaacatgttaggcagtttgctgtgcctcccaggttcagggtcagtgcttcttgacccctgcactggttctaccatatcagagacaacaagtgaagcttggagtgtagaggtattgccaagtgactcagaggccccagacctaaagcaggaggagcgtctgcaagaactggagagctgttctggactgggtagcacatctgatgatacggatgtcagggaggtcagttcccgccccagcacaccaggcctcagtgttgtgtccggcataagtgcaacctctgaggatattcccaataagattgaagacctgagatctgagtgcagctctgattttgggggtaaagattctgtcactagtccagacatggatgaaataactcacggtgcccaccagctgacctctcctccttctcagtcagagtctctgctggccatgtttgatccactgtcttcacatgaaggggcttctgctgtggtaaggccaaaggttcactatgctaggccatcgcatccaccaccagatcccccaatcctggaaggagctgtgggaggaaatgaggccaggttgccaaactttggttcccatgttttaactccagctgaaatggaggcattcaagcaaaggcattcttaccctgagagactagttcgaagcaggagctctgatatagtatcttctgtccggagacccatgagtgaccccagctggaaccggcgtccaggaaatgaagagcgagaactccctycagctgcagccattggtgctacttctttggtggctgcacctcattcatcatcttcatccccgagtaaggactcctcaagaggagagactgaagaacgcaaagatagrgatgatgagaaatcagacaggaacagaccttggtggagaaaacgttttgtttcagccatgcctaaagctcctataccatttagaaagaaagaaaaacaagaaaaagacaaagatgatctggggcctgacagattctcaacactcacagatgatcccagccctagactcagtgcacaagctcaggtggctgaggatattctggacaaatacaggaatgccattaaacggaccagccccagtgatggagcaatggcaaactatgaaagtacagaggttatgggtgatggtgaaagtgcacatgattctccccgtgacgaagcactgcagaacatctcggctgatgatctcccagactctgcaagccaagcagcccacccgcaggattcagctttctcttacagagatgcaaaaaagaaactgaggcttgctctttgctctgcggactctgttgccttcccagtgctgacccattcaacaaggaatggtttaccagaccacacagacccagaagacaatgaaattgtatgcttcttaaaagttcaaatagctgaagcaattaatttacaagataagaatctaatggctcaacttcaagaaacaatgcgctgtgtgtgccgttttgataataggacttgtaggaaactgctggcttcgattgctgaggactacagaaaaagagccccatatattgcttatctcactcgttgtcgacaaggactacagaccacacaggctcacctggaaaggctattgcaaagagttttgcgggacaaagaagtggccaatcgatactttaccactgtctgtgtgagattactgcttgagagcaaagaaaagaagatcagggaattcattcaagactttcagaaactcaccgcagctgacgataaaactgctcaggtagaagattttctgcagtttctttatggtgcaatggcccaggatgtcatatggcaaaacgcgagtgaagaacagcttcaagatgcacagctggccattgagcgaagcgtgatgaaccggattttcaagctcgccttctaccctaatcaagatggggacatacttcgcgaccaggttcttcatgaacatatccagagattgtctaaagtagtgactgcaaatcacagagctcttcagataccagaggtttatcttcgagaagcaccatggccatctgcacaatcagaaatcaggacaataagtgcttataaaaccccccgggacaaagtgcagtgcatcctgagaatgtgctctacgattatgaacctcctgagcctggccaatgaggactctgtccctggagcggatgactttgttcctgtgttggtgtttgtgttgataaaggcaaatccaccctgtttgctgtctactgtgcagtatatcagtagcttttatgctagctgtctgtctggagaggagtcctattggtggatgcagttcacagcagcagtagaattcattaaaaccatcgatgaccgaaagtgaccaagaccaaggcccaccaaggcagcagactgttaatcagacaaacagatctctgagaaggtgcatcagctgctttgaaggctgaagattgttttgtatgatactgcacagcatcaggcattttaaagcagatctttactaaacaggttaatgagctaacaagcaggttctctcgtctttgggctctttcctttctgagttgcatattctattttcttgtccccaagtagagactagtactacaaaaagggaccacatttttcaagtatttctaagtataaaaaacaaaacaaaaatctcttaggaaatgtctagacctccattcttggattccctttctttccttttattttaaaaaagaacagtacccctcttttaagatgctgtcttacattaatgagcatctaatggaaagaaggtatgagttgcactgaggattagaatagtggtgcgttagtggcattatctataaatacactcacctaaattgaaagctaagaaggaaatgtaaatataatatatatttatatttgatgtaatatggacatctgcagattctaataaacaaggactattgctgatagtaggctgtgacatactgtcttgtgaaatggtttccttgacaaaatttaagctgagcttaaaagcaaaaaacaaaaagtacacagaaatatttattaaaatgtaatacagtttattgaactttctaggtatggagtttgatrgacagggctgcctttaatgagtgtgaaggtcactaagtcacttagacatctcaccgtggaagtttgtgagcctgcattaggagatagactgattaccatacatgacataaaaaggaacagtggatagctcatactttatggtggttcttctcctccgaaataatatactgcagaaatcccagacagagctccttacaaacctttaattgtaatatatttttgatgattattcacattgaatgcacagaccaagaattcagtgaatgtcattttttaaaaaactaatttgtattgtctgctctagtgatacaagttttactagtgataaactattttaatcaaccatactattcttatggaaaaaaatatctattttggcaggtttctgtgcctttatttccctcttctgaaaaaaagtctgtgttttcatagtttggtttgcattgtatatcaataattaatcaggaatgggttttggtgcctgaaaaattggccatggaggcacaccaaagcttcaagcacaagtcttgtacatgggccatcactgtctggtttcacttcgtgtgtttcctaaacacatttagctgcttttttaacaaactcagccccatacttgagtcccttgttgttgggagcatttccaggcatcttttaagggaactgtgacaaacagcctcgggcagatgaacacggaggctctctgttgtctgtctctgagatctttgtgtctgggaatgcctaaagattttatttttttttctttgtttttattttattttattttatttttttgagacagagtctcaccctgttgcccaggctggagtgcaatggtgcgatcttggctcactgcaacctccacctcccagttcaagtgattcccctgcctcagcctcscgagtagctaggactacaggcgcatgtcaccaagcccggctaatttttgtatttttagtagaaacggggtttcaccatgttggccaggatgatcctcaatctcctgacctcgtgatccacccgccttggcctcccaaagtgcgggattacaagcgtgaaccaccctgcccagccagaaactagattttctttatgcctccaccccttcttattcatttactttacaataccaaaataacaaattgcataggagtgtgggatgtggtttctgccttctagakagagatcagaattaaactagtactatgaaatgtccttttgaatgttaggtcaagaaatccatgtacagagtcgtgcacttcattggctgtaactgtcaaacttgccttgtattagaagttaaatcccatcgtaaatacatcacgaggccagctgtgtgatttctgagacctagatgagagtccatttacttcagcctttgattcagtaaatgttaagcagcagaagacttcgaatggttgaaattcattgttacaggatttaactcataaaccaatgagagattttttttttctctgcaatggttgctaagtctattccatgttaacactgtggaaataaatatgaagatgtggacattgc

SEQ ID NO: 342 - DNA, 7670 bp, Homo sapiens
aaaataattctttcaagaagatcagggacaactgatttgaagtctactctgtgcttctaaatccccaattctgctgaaagtgagataccctagagccctagagccccagcagcacccagccaaacccacctccaccatgggggccatgactcagctgttggcaggtgtctttcttgctttccttgccctcgctaccgaaggtggggtcctsaagaaagtcatccggcacaagcgacagagtggggtgaacgccaccctgccagaagagaaccagccagtggtgtttaaccacgtttacaacatcaagctgccagtgggatcccagtgttcrgtggatctggagtcagccagtggggagaaagacctggcaccgccttcagagcccagcgaaagctttcaggagcacacagtrgatggggaaaaccagattgtcttcacacatcgcatcaacatcccccgccgggcctgtggctgtgccgcagcccctgatgttaaggagctgctgagcagactggaggagctggagaacctggtgtcttccctgagggagcaatgtactgcaggagcaggctgctgtctccagcctgccacaggccgcttggacaccaggcccttctgtagcggtcggggcaacttcagcactgaaggatgtggctgtgtctgcgaacctggctggaaaggccccaactgctctgagcccgaatgtccaggcaactgtcaccttcgaggccggtgcattgatgggcagtgcatctgtgacgacggcttcacgggcgaggactgcagccagctggcttgccccagcgactgcaatgaccagggcaagtgcgtraatggagtctgcatctgtttcgaaggctacgccggggctgactgcagccgtgaaatctgcccagtgccctgcagtgaggagcacrgcacatgtgtagatggcttgtgtgtgtgccacgatggctttgcaggcgatgactgcaacaagcctctgtgtctcaacaattgctacaaccgtggacgatgcgtggagaatgagtgcgtgtgtgatgagggtttcacgggcgaagactgcagtgagctcatctgccccaatgactgcttcgaccggggccgctgcatcaatggcacctgctactgcgaagaaggcttcacaggtgaagactgcgggaaacccacctgcccacatgcctgccacacccagggccggtgtgaggaggggcagtgtgtatgtgatgagggctttgccggtktggactgcagcgagaagaggtgtcctgctgactgtcacaatcgtggccgctgtgtagacgggcggtgtgagtgtgatgatggtttcactggagctgactgtggggagctcaagtgtcccaatggctgcagtggccatggccgctgtgtcaatgggcagtgtgtgtgtgatgagggctatactggggaggactgcagccagctacggtgccccaatgactgtcacagtcggggccgctgtgtcgagggcaaatgtgtatgtgagcaaggcttcaagggctatgactgcagtgacatgagctgccctaatgactgtcaccagcacggccgctgtgtgaatggcatgtgtgtttgtgatgacggctacacaggggaagactgccgggatcgccaatgccccagggactgcagcaacaggggcctctgtgtggacggacagtgcgtctgtgaggacggcttcaccggccctgactgtgcagaactctcctgtccaaatgactgccatggccrgggtcgctgtgtgaatgggcagtgcrtgtgccatgaaggatttatgggcaaagactgcaaggagcaaagatgtcccagtgactgtcatggccagggccgctgcgtggacggccagtgcatctgccacgagggcttcacaggcctggactgtggccagcactcctgccccagtgactgcaacaacttaggacartgcrtctcgggccgctgcatctgcaacgagggctacagcggagaagactgctcagaggtgtctcctcccaaagacctcgttgtgacagaagtgacggaagagacggtcaacctggcctgggacaatgagatgcgggtcacagagtaccttgtcgtgtacacgcccacccacgagggtggtctggaaatgcagttccgtgtgcctggggaccagacgtccaccatcatccrggagctggarcctggtgtggagtactttatccgtgtatttgccatcctggagaacaagaagagcattcctgtcagcgccagggtggccacgtacttacctgcacctgaaggcctgaaattcaagtccatcaaggagacatctgtggaagtggagtgggatcctctagrcattgcttttgaaacctgggagatcatcttccggaatatgaataaagaagatgagggagagatcaccaaaagcctgaggaggccagagacctcttaccggcaaactggtctagctcctgggcaagagtatgagatatctctgcacatagtgaaaaacaatacccggggccctggcctgaagmgggtgaccaccacacgcttggatgcccccagccagatcgaggtgaaagatgtcacagacaccactgccttgatcacctggttcaagcccctggctgagatcgatggcattgagctgacctacggcatcaaagacgtgccaggagaccgtaccaccatcsatstcacagaggaygagaaccagtactccatcgggaacctgaagcctgacactgagtacgaggtgtccctcrtctcccgcagaggtgacatgkcaagcaacccagccaaagagaccttcacaacaggcctcgatgctcccaggaatcttcgacgtgtttcccagacagataacagcatcaccctggaatggaggaatggcaaggcagctattgacagttacagaattaagtatgcccccatctctggaggggaccacgctgaggttgatgttccaaagagccaacaagccacaaccaaaaccacactcacaggtctgaggccgggaactgaatatgggattggagtttctgctgtgaaggaagacaaggagagcaatccagcgaccatcaacgcagccacagagttggacacgcccaaggaccttcaggtttctgaaactgcagagaccagcctgaccctgctctggaagacaccgttggccaaatttgaccgctaccgcctcarttacagtctccccacaggccagtgggtgggagtgcagcttccaagaaacaccacttcctatgtcctgagaggcctggaaccaggacaggagtacaatgtcctcctgacagcygagaaaggcagacacaagagcaagcccgcacrtgtgaaggcatccactgaacaagcccctgagctggaaaacctcaccgtgactgaggttggctgggatggcctcagactcaactggaccgcrgctgaccaggcctatgagcactttatcattcaggtgcaggaggccaacaaggtggaggcagctcrgaacctcaccgtgcctggcagmcttcgggctgtggacataccgggcctcaaggctgctacgccttatacagtctccatctatggggtgatccagggctatagaacaccagtgctctctgctgaggcctccacaggggaaactcccaatttgggagaggtcgtggtggccgaggtgggctgggatgccctcaaactcaactggactgctccagaaggggcctatgagtactttttcattcaggtgcaggaggctgacacagtagaggcagcccagaacctcaccgtcccaggaggactgaggtccacagacctgcctgggctcaaagcagccactcattataccatcaccatccgcggggtcactcaggacttcagcacaacccctctctctgttgaagtcttgacagaggaggttccagatatgggaaacctcacagtgaccgaggttagctgggatgctctcagactgaactggaccacgccagatggaacctatgaccagtttactattcaggtccaggaggctgaccaggtggaagaggctcacaatctcacggttcctggcagcctgcgttccatggaaatcccaggcctcagggctggcactccttacacagtcaccctgcacggcgaggtcaggggccacagcactcgaccccttgctgtagaggtcgtcacagaggatctcccacagctgggagatttagccgtgtctgaggttggctgggatggcctcagactcaactggaccgcagctgacaatgcctatgagcactttgtcattcaggtgcaggaggtcaacaaagtggaggcagcccagaacctcacrttgcctggcagcctcagggctgtggacatcccgggcctcgaggctgccacgccttatagagtctccatctatggggtgatccggggctatagaacaccagtactctctgctgaggcctccacagccaaagaacctgaaattggaaacttaaatgtttctgacataactcccgagagcttcaatctctcctggatggctaccgatgggatcttcgagacctttaccattgaaattattgattccaataggttgctggagactgtggaatataatatctctggtgctgaacgaactgcccatatctcagggctaccccctagtactgattttattgtctacctctctggacttgctcccagcatccggaccaaaaccatcagtgccacagccacracagaggccctgccccttctggaaaacctaaccatttccgacattaatccctacgggttcacagtttcctggatggcatcggagaatgcctttgacagctttctagtaacggtggtggattctgggaagctgytggacccccaggaattcacactttcaggaacccagaggaagctggagcttagaggcctcataactggcattggctatgaggttatggtctctggcttcacccaagggcatcaaaccaagcccttgagggctgagattgttacagaagcmgaaccggaagttgacaaccttctggtttcagatgccaccccagacggtttccgtctgtcctggacagctgatgaaggggtcttcgacaattttgttctcaaaatcagagataccaaaaagcagtctgagccactggaaataaccctacttgcccccgaacgtaccagggacwtaacaggtctcagagaggctactgaatacgaaattgaactctatggaataagcaaaggaaggcratcccagacagtcagtgctatagcaacaacagccatgggctccccaaaggaagtcattttctcagacatcactgaaaattcggctactgtcagctggagrgcacccacrgcccaagtggagagcttccgrattacctatgtgcccattacaggaggtacaccctccatggtaactgtggacggaaccaagactcagaccaggctggtgaaactcatacctggcgtggagtaccttgtcagcatcatcrccatgaagggctttgaggaaagtgaacctgtctcagggtcattcaccacagctctggatggcccatctggcctggtgacagccaacatcactgactcagaagccttggccaggtggcagccagccattgccactgtggacagttatgtcatctcctacacaggcgagaaagtgccagaaattacacgcacggtgtccgggaacacagtggagtatgctctgaccgacctcgagcctgccacggaatacacactgagaatctttgcagagaaagggccccagaagagctcaaccatcactgccaagttcacaacagacctcgattctccaagrgacttgactgctactgaggttcagtcggaaactgccctccttacctggcgacccccccgggcatcagtcacmggttacctgctggtctatgaatcagtggatggcacagtcaaggaagtcattgtgggtccagataccacctcctacagcctggcagacctgagcccatccacccactacacagccaagatccaggcactcaatgggcccctgaggagcaatatgatccagaccatcttcaccacaattggactcctgtaccccttccccaaggactgctcccaagcaatgctgaatggagacacgacctctggcctctacaccatttatctraatggtgataaggctsaggcgctggaagtcttctgtgacatgacctctgatgggggtggatggattgtgttcctgagacgcaaaaacggacgygagaacttctaccaaaactggaaggcatatgctgctggatttggggaccgcagagaagaattctggcttgggctggacaacctgaacaaaatcacagcccaggggcagtacgagctccgggtggacctgcgggaccatggggagacagcctttgctgtctatgacaagttcagcgtgggagatgccaagactcgctacaagctgaaggtggaggggtacagtgggacagcaggtgactccatggcctaccacaatggcagatccttctccacctttgacaaggacacagattcagccatcaccaactgtgctctgtcctacaaaggggctttctggtacaggaactgtcaccgtgtcaacctgatggggagatatggggacaataaccacagtcagggcgttaactggttccactggaagggccacgaacactcaatccagtttgctgagatgaagctgagaccaagcaacttcagaaatcttgaaggcaggcgcaaacgggcataaattssagggaccactgggtgagagaggaataaggcccagagcgaggaaaggattttaccaaagcatcaatacaaccagcccaaccatcggtccacacctgggcatttggtgagartcaaagctgaccatggatccctggggccaacggcaacagcatgggcctcacctcctctgtgatttctttctttgcaccaaagacatcagtctccaacatgtttctgttttgttgtttgattcagcaaaaatctcccagtgacaacatcgcaatagttttttacttctcttaggtggctctgggaatgggagaggggtaggatgtacaggggtagtttgttttagaaccagccgtattttacatgaagctgtataattaattgtcattatttttgttagcaaagattaaatgtgtcattggaagccatccctttttttacatttcatacaacagaaaccagaaaagcaatactgtttccattttaaggatatgattaatattattaatataataatgatgatgatgatgatgaaaactaaggatttttcaagagatctttctttccaaaacatttctggacagtacctgattgtattttttttttaaataaaagcacaagtacttttgagtttgttattttgctttgaattgttgagtctgaatttcaccaaagccaatcatttgaacaaagcggggaatgttgggataggaaaggtaagtagggatagtggtcaagtgggaggggtggaaaggagactaaagactgggagagagggaagcactttttttaaataaagttgaacacacttgggaaaagcttacaggccaggcctgtaatcccaacactttgggaggccaaggtgggaggatagcttaaccccaggagtttgagaccagcctgagcaacatagtgagaacttgtctctacagaaa

SEQ ID NO: 343 - DNA, 7849 bp, Homo sapiens
accggccacagcctgcctactgtcacccgcctctcccgcgcgcagatacacgcccccgcctccgtgggcacaaaggcagcgckgctggggractcgggggaacgcgcacgtgggaaccgccgcagctccacactccaggtacttcttccaaggacctaggtctctcgcccatcggaaagaaaataattctttcaagaagatcagggacaactgatttgaagtctactctgtgcttctaaatccccaattctgctgaaagtgagataccctagagccctagagccccagcagcacccagccaaacccacctccaccatgggggccatgactcagctgttggcaggtgtctttcttgctttccttgccctcgctaccgaaggtggggtcctsaagaaagtcatccggcacaagcgacagagtggggtgaacgccaccctgccagaagagaaccagccagtggtgtttaaccacgtttacaacatcaagctgccagtgggatcccagtgttcrgtggatctggagtcagccagtggggagaaagacctggcaccgccttcagagcccagcgaaagctttcaggagcacacagtrgatggggaaaaccagattgtcttcacacatcgcatcaacatcccccgccgggcctgtggctgtgccgcagcccctgatgttaaggagctgctgagcagactggaggagctggagaacctggtgtcttccctgagggagcaatgtactgcaggagcaggctgctgtctccagcctgccacaggccgcttggacaccaggcccttctgtagcggtcggggcaacttcagcactgaaggatgtggctgtgtctgcgaacctggctggaaaggccccaactgctctgagcccgaatgtccaggcaactgtcaccttcgaggccggtgcattgatgggcagtgcatctgtgacgacggcttcacgggcgaggactgcagccagctggcttgccccagcgactgcaatgaccagggcaagtgcgtraatggagtctgcatctgtttcgaaggctacgccggggctgactgcagccgtgaaatctgcccagtgccctgcagtgaggagcacrgcacatgtgtagatggcttgtgtgtgtgccacgatggctttgcaggcgatgactgcaacaagcctctgtgtctcaacaattgctacaaccgtggacgatgcgtggagaatgagtgcgtgtgtgatgagggtttcacgggcgaagactgcagtgagctcatctgccccaatgactgcttcgaccggggccgctgcatcaatggcacctgctactgcgaagaaggcttcacaggtgaagactgcgggaaacccacctgcccacatgcctgccacacccagggccggtgtgaggaggggcagtgtgtatgtgatgagggctttgccggtktggactgcagcgagaagaggtgtcctgctgactgtcacaatcgtggccgctgtgtagacgggcggtgtgagtgtgatgatggtttcactggagctgactgtggggagctcaagtgtcccaatggctgcagtggccatggccgctgtgtcaatgggcagtgtgtgtgtgatgagggctatactggggaggactgcagccagctacggtgccccaatgactgtcacagtcggggccgctgtgtcgagggcaaatgtgtatgtgagcaaggcttcaagggctatgactgcagtgacatgagctgccctaatgactgtcaccagcacggccgctgtgtgaatggcatgtgtgtttgtgatgacggctacacaggggaagactgccgggatcgccaatgccccagggactgcagcaacaggggcctctgtgtggacggacagtgcgtctgtgaggacggcttcaccggccctgactgtgcagaactctcctgtccaaatgactgccatggccrgggtcgctgtgtgaatgggcagtgcrtgtgccatgaaggatttatgggcaaagactgcaaggagcaaagatgtcccagtgactgtcatggccagggccgctgcgtggacggccagtgcatctgccacgagggcttcacaggcctggactgtggccagcactcctgccccagtgactgcaacaacttaggacartgcrtctcgggccgctgcatctgcaacgagggctacagcggagaagactgctcagaggtgtctcctcccaaagacctcgttgtgacagaagtgacggaagagacggtcaacctggcctgggacaatgagatgcgggtcacagagtaccttgtcgtgtacacgcccacccacgagggtggtctggaaatgcagttccgtgtgcctggggaccagacgtccaccatcatccrggagctggarcctggtgtggagtactttatccgtgtatttgccatcctggagaacaagaagagcattcctgtcagcgccagggtggccacgtacttacctgcacctgaaggcctgaaattcaagtccatcaaggagacatctgtggaagtggagtgggatcctctagrcattgcttttgaaacctgggagatcatcttccggaatatgaataaagaagatgagggagagatcaccaaaagcctgaggaggccagagacctcttaccggcaaactggtctagctcctgggcaagagtatgagatatctctgcacatagtgaaaaacaatacccggggccctggcctgaagmgggtgaccaccacacgcttggatgcccccagccagatcgaggtgaaagatgtcacagacaccactgccttgatcacctggttcaagcccctggctgagatcgatggcattgagctgacctacggcatcaaagacgtgccaggagaccgtaccaccatcsatstcacagaggaygagaaccagtactccatcgggaacctgaagcctgacactgagtacgaggtgtccctcrtctcccgcagaggtgacatgkcaagcaacccagccaaagagaccttcacaacaggcctcgatgctcccaggaatcttcgacgtgtttcccagacagataacagcatcaccctggaatggaggaatggcaaggcagctattgacagttacagaattaagtatgcccccatctctggaggggaccacgctgaggttgatgttccaaagagccaacaagccacaaccaaaaccacactcacaggtctgaggccgggaactgaatatgggattggagtttctgctgtgaaggaagacaaggagagcaatccagcgaccatcaacgcagccacagagttggacacgcccaaggaccttcaggtttctgaaactgcagagaccagcctgaccctgctctggaagacaccgttggccaaatttgaccgctaccgcctcarttacagtctccccacaggccagtgggtgggagtgcagcttccaagaaacaccacttcctatgtcctgagaggcctggaaccaggacaggagtacaatgtcctcctgacagcygagaaaggcagacacaagagcaagcccgcacrtgtgaaggcatccactgaacaagcccctgagctggaaaacctcaccgtgactgaggttggctgggatggcctcagactcaactggaccgcrgctgaccaggcctatgagcactttatcattcaggtgcaggaggccaacaaggtggaggcagctcrgaacctcaccgtgcctggcagmcttcgggctgtggacataccgggcctcaaggctgctacgccttatacagtctccatctatggggtgatccagggctatagaacaccagtgctctctgctgaggcctccacaggggaaactcccaatttgggagaggtcgtggtggccgaggtgggctgggatgccctcaaactcaactggactgctccagaaggggcctatgagtactttttcattcaggtgcaggaggctgacacagtagaggcagcccagaacctcaccgtcccaggaggactgaggtccacagacctgcctgggctcaaagcagccactcattataccatcaccatccgcggggtcactcaggacttcagcacaacccctctctctgttgaagtcttgacagaggaggttccagatatgggaaacctcacagtgaccgaggttagctgggatgctctcagactgaactggaccacgccagatggaacctatgaccagtttactattcaggtccaggaggctgaccaggtggaagaggctcacaatctcacggttcctggcagcctgcgttccatggaaatcccaggcctcagggctggcactccttacacagtcaccctgcacggcgaggtcaggggccacagcactcgaccccttgctgtagaggtcgtcacagaggatctcccacagctgggagatttagccgtgtctgaggttggctgggatggcctcagactcaactggaccgcagctgacaatgcctatgagcactttgtcattcaggtgcaggaggtcaacaaagtggaggcagcccagaacctcacrttgcctggcagcctcagggctgtggacatcccgggcctcgaggctgccacgccttatagagtctccatctatggggtgatccggggctatagaacaccagtactctctgctgaggcctccacagccaaagaacctgaaattggaaacttaaatgtttctgacataactcccgagagcttcaatctctcctggatggctaccgatgggatcttcgagacctttaccattgaaattattgattccaataggttgctggagactgtggaatataatatctctggtgctgaacgaactgcccatatctcagggctaccccctagtactgattttattgtctacctctctggacttgctcccagcatccggaccaaaaccatcagtgccacagccacracagaggccctgccccttctggaaaacctaaccatttccgacattaatccctacgggttcacagtttcctggatggcatcggagaatgcctttgacagctttctagtaacggtggtggattctgggaagctgytggacccccaggaattcacactttcaggaacccagaggaagctggagcttagaggcctcataactggcattggctatgaggttatggtctctggcttcacccaagggcatcaaaccaagcccttgagggctgagattgttacagaagcmgaaccggaagttgacaaccttctggtttcagatgccaccccagacggtttccgtctgtcctggacagctgatgaaggggtcttcgacaattttgttctcaaaatcagagataccaaaaagcagtctgagccactggaaataaccctacttgcccccgaacgtaccagggacwtaacaggtctcagagaggctactgaatacgaaattgaactctatggaataagcaaaggaaggcratcccagacagtcagtgctatagcaacaacagccatgggctccccaaaggaagtcattttctcagacatcactgaaaattcggctactgtcagctggagrgcacccacrgcccaagtggagagcttccgrattacctatgtgcccattacaggaggtacaccctccatggtaactgtggacggaaccaagactcagaccaggctggtgaaactcatacctggcgtggagtaccttgtcagcatcatcrccatgaagggctttgaggaaagtgaacctgtctcagggtcattcaccacagctctggatggcccatctggcctggtgacagccaacatcactgactcagaagccttggccaggtggcagccagccattgccactgtggacagttatgtcatctcctacacaggcgagaaagtgccagaaattacacgcacggtgtccgggaacacagtggagtatgctctgaccgacctcgagcctgccacggaatacacactgagaatctttgcagagaaagggccccagaagagctcaaccatcactgccaagttcacaacagacctcgattctccaagrgacttgactgctactgaggttcagtcggaaactgccctccttacctggcgacccccccgggcatcagtcacmggttacctgctggtctatgaatcagtggatggcacagtcaaggaagtcattgtgggtccagataccacctcctacagcctggcagacctgagcccatccacccactacacagccaagatccaggcactcaatgggcccctgaggagcaatatgatccagaccatcttcaccacaattggactcctgtaccccttccccaaggactgctcccaagcaatgctgaatggagacacgacctctggcctctacaccatttatctraatggtgataaggctsaggcgctggaagtcttctgtgacatgacctctgatgggggtggatggattgtgttcctgagacgcaaaaacggacgygagaacttctaccaaaactggaaggcatatgctgctggatttggggaccgcagagaagaattctggcttgggctggacaacctgaacaaaatcacagcccaggggcagtacgagctccgggtggacctgcgggaccatggggagacagcctttgctgtctatgacaagttcagcgtgggagatgccaagactcgctacaagctgaaggtggaggggtacagtgggacagcaggtgactccatggcctaccacaatggcagatccttctccacctttgacaaggacacagattcagccatcaccaactgtgctctgtcctacaaaggggctttctggtacaggaactgtcaccgtgtcaacctgatggggagatatggggacaataaccacagtcagggcgttaactggttccactggaagggccacgaacactcaatccagtttgctgagatgaagctgagaccaagcaacttcagaaatcttgaaggcaggcgcaaacgggcataaattssagggaccactgggtgagagaggaataaggcccagagcgaggaaaggattttaccaaagcatcaatacaaccagcccaaccatcggtccacacctgggcatttggtgagartcaaagctgaccatggatccctggggccaacggcaacagcatgggcctcacctcctctgtgatttctttctttgcaccaaagacatcagtctccaacatgtttctgttttgttgtttgattcagcaaaaatctcccagtgacaacatcgcaatagttttttacttctcttaggtggctctgggaatgggagaggggtaggatgtacaggggtagtttgttttagaaccagccgtattttacatgaagctgtataattaattgtcattatttttgttagcaaagattaaatgtgtcattggaagccatccctttttttacatttcatacaacagaaaccagaaaagcaatactgtttccattttaaggatatgattaatattattaatataataatgatgatgatgatgatgaaaactaaggatttttcaagagatctttctttccaaaacatttctggacagtacctgattgtattttttttttaaataaaagcacaagtacttttgagtttgttattttgctttgaattgttgagtctgaatttcaccaaagccaatcatttgaacaaagcggggaatgttgggataggaaaggtaagtagggatagtggtcaagtgggaggggtggaaaggagactaaagactgggagagagggaagcactttttttaaataaagttgaacacacttgggaaaagcttacaggccaggcctgtaatcccaacactttgggaggccaaggtgggaggatagcttaaccccaggagtttgagaccagcctgagcaacatagtgagaacttgtctctacagaaa

SEQ ID NO: 344 - DNA, 7284 bp, Homo sapiens
accggccacagcctgcctactgtcacccgcctctcccgcgcgcagatacacgcccccgcctccgtgggcacaaaggcagcgckgctggggractcgggggaacgcgcacgtgggaaccgccgcagctccacactccaggtacttcttccaaggacctaggtctctcgcccatcggaaagaaaataattctttcaagaagatcagggacaactgatttgaagtctactctgtgcttctaaatccccaattctgctgaaagtgagataccctagagccctagagccccagcagcacccagccaaacccacctccaccatgggggccatgactcagctgttggcaggtgtctttcttgctttccttgccctcgctaccgaaggtggggtcctsaagaaagtcatccggcacaagcgacagagtggggtgaacgccaccctgccagaagagaaccagccagtggtgtttaaccacgtttacaacatcaagctgccagtgggatcccagtgttcrgtggatctggagtcagccagtggggagaaagacctggcaccgccttcagagcccagcgaaagctttcaggagcacacagtrgatggggaaaaccagattgtcttcacacatcgcatcaacatcccccgccgggcctgtggctgtgccgcagcccctgatgttaaggagctgctgagcagactggaggagctggagaacctggtgtcttccctgagggagcaatgtactgcaggagcaggctgctgtctccagcctgccacaggccgcttggacaccaggcccttctgtagcggtcggggcaacttcagcactgaaggatgtggctgtgtctgcgaacctggctggaaaggccccaactgctctgagcccgaatgtccaggcaactgtcaccttcgaggccggtgcattgatgggcagtgcatctgtgacgacggcttcacgggcgaggactgcagccagctggcttgccccagcgactgcaatgaccagggcaagtgcgtraatggagtctgcatctgtttcgaaggctacgccggggctgactgcagccgtgaaatctgcccagtgccctgcagtgaggagcacrgcacatgtgtagatggcttgtgtgtgtgccacgatggctttgcaggcgatgactgcaacaagcctctgtgtctcaacaattgctacaaccgtggacgatgcgtggagaatgagtgcgtgtgtgatgagggtttcacgggcgaagactgcagtgagctcatctgccccaatgactgcttcgaccggggccgctgcatcaatggcacctgctactgcgaagaaggcttcacaggtgaagactgcgggaaacccacctgcccacatgcctgccacacccagggccggtgtgaggaggggcagtgtgtatgtgatgagggctttgccggtktggactgcagcgagaagaggtgtcctgctgactgtcacaatcgtggccgctgtgtagacgggcggtgtgagtgtgatgatggtttcactggagctgactgtggggagctcaagtgtcccaatggctgcagtggccatggccgctgtgtcaatgggcagtgtgtgtgtgatgagggctatactggggaggactgcagccagctacggtgccccaatgactgtcacagtcggggccgctgtgtcgagggcaaatgtgtatgtgagcaaggcttcaagggctatgactgcagtgacatgagctgccctaatgactgtcaccagcacggccgctgtgtgaatggcatgtgtgtttgtgatgacggctacacaggggaagactgccgggatcgccaatgccccagggactgcagcaacaggggcctctgtgtggacggacagtgcgtctgtgaggacggcttcaccggccctgactgtgcagaactctcctgtccaaatgactgccatggccrgggtcgctgtgtgaatgggcagtgcrtgtgccatgaaggatttatgggcaaagactgcaaggagcaaagatgtcccagtgactgtcatggccagggccgctgcgtggacggccagtgcatctgccacgagggcttcacaggcctggactgtggccagcactcctgccccagtgactgcaacaacttaggacartgcrtctcgggccgctgcatctgcaacgagggctacagcggagaagactgctcagaggtgtctcctcccaaagacctcgttgtgacagaagtgacggaagagacggtcaacctggcctgggacaatgagatgcgggtcacagagtaccttgtcgtgtacacgcccacccacgagggtggtctggaaatgcagttccgtgtgcctggggaccagacgtccaccatcatccrggagctggarcctggtgtggagtactttatccgtgtatttgccatcctggagaacaagaagagcattcctgtcagcgccagggtggccacgtacttacctgcacctgaaggcctgaaattcaagtccatcaaggagacatctgtggaagtggagtgggatcctctagrcattgcttttgaaacctgggagatcatcttccggaatatgaataaagaagatgagggagagatcaccaaaagcctgaggaggccagagacctcttaccggcaaactggtctagctcctgggcaagagtatgagatatctctgcacatagtgaaaaacaatacccggggccctggcctgaagmgggtgaccaccacacgcttggatgcccccagccagatcgaggtgaaagatgtcacagacaccactgccttgatcacctggttcaagcccctggctgagatcgatggcattgagctgacctacggcatcaaagacgtgccaggagaccgtaccaccatcsatstcacagaggaygagaaccagtactccatcgggaacctgaagcctgacactgagtacgaggtgtccctcrtctcccgcagaggtgacatgkcaagcaacccagccaaagagaccttcacaacaggcctcgatgctcccaggaatcttcgacgtgtttcccagacagataacagcatcaccctggaatggaggaatggcaaggcagctattgacagttacagaattaagtatgcccccatctctggaggggaccacgctgaggttgatgttccaaagagccaacaagccacaaccaaaaccacactcacaggtctgaggccgggaactgaatatgggattggagtttctgctgtgaaggaagacaaggagagcaatccagcgaccatcaacgcagccacagagttggacacgcccaaggaccttcaggtttctgaaactgcagagaccagcctgaccctgctctggaagacaccgttggccaaatttgaccgctaccgcctcarttacagtctccccacaggccagtgggtgggagtgcagcttccaagaaacaccacttcctatgtcctgagaggcctggaaccaggacaggagtacaatgtcctcctgacagcygagaaaggcagacacaagagcaagcccgcacrtgtgaaggcatccactgaacaagcccctgagctggaaaacctcaccgtgactgaggttggctgggatggcctcagactcaactggaccgcrgctgaccaggcctatgagcactttatcattcaggtgcaggaggccaacaaggtggaggcagctcrgaacctcaccgtgcctggcagmcttcgggctgtggacataccgggcctcaaggctgctacgccttatacagtctccatctatggggtgatccagggctatagaacaccagtgctctctgctgaggcctccacaggggaaactcccaatttgggagaggtcgtggtggccgaggtgggctgggatgccctcaaactcaactggactgctccagaaggggcctatgagtactttttcattcaggtgcaggaggctgacacagtagaggcagcccagaacctcaccgtcccaggaggactgaggtccacagacctgcctgggctcaaagcagccactcattataccatcaccatccgcggggtcactcaggacttcagcacaacccctctctctgttgaagtcttgacagaggaggttccagatatgggaaacctcacagtgaccgaggttagctgggatgctctcagactgaactggaccacgccagatggaacctatgaccagtttactattcaggtccaggaggctgaccaggtggaagaggctcacaatctcacggttcctggcagcctgcgttccatggaaatcccaggcctcagggctggcactccttacacagtcaccctgcacggcgaggtcaggggccacagcactcgaccccttgctgtagaggtcgtcacagaggatctcccacagctgggagatttagccgtgtctgaggttggctgggatggcctcagactcaactggaccgcagctgacaatgcctatgagcactttgtcattcaggtgcaggaggtcaacaaagtggaggcagcccagaacctcacrttgcctggcagcctcagggctgtggacatcccgggcctcgaggctgccacgccttatagagtctccatctatggggtgatccggggctatagaacaccagtactctctgctgaggcctccacagccaaagaacctgaaattggaaacttaaatgtttctgacataactcccgagagcttcaatctctcctggatggctaccgatgggatcttcgagacctttaccattgaaattattgattccaataggttgctggagactgtggaatataatatctctggtgctgaacgaactgcccatatctcagggctaccccctagtactgattttattgtctacctctctggacttgctcccagcatccggaccaaaaccatcagtgccacagccacracagaggccctgccccttctggaaaacctaaccatttccgacattaatccctacgggttcacagtttcctggatggcatcggagaatgcctttgacagctttctagtaacggtggtggattctgggaagctgytggacccccaggaattcacactttcaggaacccagaggaagctggagcttagaggcctcataactggcattggctatgaggttatggtctctggcttcacccaagggcatcaaaccaagcccttgagggctgagattgttacagaagcmgaaccggaagttgacaaccttctggtttcagatgccaccccagacggtttccgtctgtcctggacagctgatgaaggggtcttcgacaattttgttctcaaaatcagagataccaaaaagcagtctgagccactggaaataaccctacttgcccccgaacgtaccagggacwtaacaggtctcagagaggctactgaatacgaaattgaactctatggaataagcaaaggaaggcratcccagacagtcagtgctatagcaacaacagccatgggctccccaaaggaagtcattttctcagacatcactgaaaattcggctactgtcagctggagrgcacccacrgcccaagtggagagcttccgrattacctatgtgcccattacaggaggtacaccctccatggtaactgtggacggaaccaagactcagaccaggctggtgaaactcatacctggcgtggagtaccttgtcagcatcatcrccatgaagggctttgaggaaagtgaacctgtctcagggtcattcaccacagctctggatggcccatctggcctggtgacagccaacatcactgactcagaagccttggccaggtggcagccagccattgccactgtggacagttatgtcatctcctacacaggcgagaaagtgccagaaattacacgcacggtgtccgggaacacagtggagtatgctctgaccgacctcgagcctgccacggaatacacactgagaatctttgcagagaaagggccccagaagagctcaaccatcactgccaagttcacaacagacctcgattctccaagrgacttgactgctactgaggttcagtcggaaactgccctccttacctggcgacccccccgggcatcagtcacmggttacctgctggtctatgaatcagtggatggcacagtcaaggaagtcattgtgggtccagataccacctcctacagcctggcagacctgagcccatccacccactacacagccaagatccaggcactcaatgggcccctgaggagcaatatgatccagaccatcttcaccacaattggactcctgtaccccttccccaaggactgctcccaagcaatgctgaatggagacacgacctctggcctctacaccatttatctraatggtgataaggctsaggcgctggaagtcttctgtgacatgacctctgatgggggtggatggattgtgttcctgagacgcaaaaacggacgygagaacttctaccaaaactggaaggcatatgctgctggatttggggaccgcagagaagaattctggcttgggctggacaacctgaacaaaatcacagcccaggggcagtacgagctccgggtggacctgcgggaccatggggagacagcctttgctgtctatgacaagttcagcgtgggagatgccaagactcgctacaagctgaaggtggaggggtacagtgggacagcaggtgactccatggcctaccacaatggcagatccttctccacctttgacaaggacacagattcagccatcaccaactgtgctctgtcctacaaaggggctttctggtacaggaactgtcaccgtgtcaacctgatggggagatatggggacaataaccacagtcagggcgttaactggttccactggaagggccacgaacactcaatccagtttgctgagatgaagctgagaccaagcaacttcagaaatcttgaaggcaggcgcaaacgggcataaattssagggaccactgggtgagagaggaataaggcccagagcgaggaaaggattttaccaaagcatcaatacaaccagcccaaccatcggtccacacctgggcatttggtgagartcaaagctgaccatggatccctggggccaacggcaacagcatgggcctcacctcctctgtgatttctttctttgcaccaaagacatcagtctccaacatgtttctgttttgttgtttgattcagcaaaaatctcccagtgacaacatcgcaatatttgttttagaaccagccgtattttacatgaagctgtataattaattgtcattatttttgttagcaaagattaaatgtgtcattggaagccatc

SEQ ID NO: 345 - DNA, 6586 bp, Homo sapiens
  misc_feature (1)...(6586): n = A,T,C or G, or insertion/deletion polymorphism (see Tables 1-2)
caatgtacacactttatttgtatattaaacaagtagaaatatgtttttccccatctttctttaaacatgttcttctccccatatatcttctgtttacccatttttaacaggaacatgagcattcaacctattccattttttcttatatgcaaaggcagagtgcaactgtgataggggcaattgattcttagctttggttttggggacaatatggggtggtgggaactacggcaaactggacagtactgccttagctgaaggcagcagcccctattcaatgccaatcaattgttggcacagagaatgcaggccttatgtcgccaggttttccaaaatttcaaaaagaatccagaagtctcaattttactgtgcaattctcttttattaggattatctctgctgcatttagttgtatgtatcccttatggcccccaggcaggtccactcctgggcattcaagtcggtccatgtgtcaggcgtgcagggtgggtcacagcatctaggagctcagtgcagcttgggactttgggacatacgctccacctctctgagcctcagtctccttgtccatcatataaggaaatcactgattccagccttcctgggctgtggagaggattccctcagcggctgtgaaagagtgctttcttgcgsgtcagccccgacaggacagacttaagggcgggagggagcccatcccgcttgccccaacgaacgcgggcgcggggctttcctckcaggttacataaggcagccgcgggtggaggcagcagaggcgagcgcacgtccgtcgagggggaaaggggcgtggggaggcggccggggcggccggtatcccccgggcgtgagtgcgcagcgcgcgggggagcgcagggcgcggcggagtcgggtttcagagcgcgggtgactcggggcgcgggccgggagccgggattctgcccgccgccgccgctgccgagcgccgcctttgttccctgcaggaagggcgagcgcggcggccagcgctcagcgacccttcgtcctccgctaagctccaacgctctgctcgactagccgcgcgccttccggggctccgcagacccgcgagatggcaccaaggtaagacccgcttctctgcttcctcgcgkcccgggcccctccaatactcttgcccgcctcaccttttctccctcgggcacatcttgcaggaggaacaacgggcagtgctggtgtctgctgatgctgctctcggtctccacgcccctccctgctgtcacccagacccgcggtgcgacagagactgcttcccagggtcacctggacctcacgcagctcatcggtgwcccgctgccctcgtccgtatcctttgtcacaggctatggtggcttcccggcctacagtttcgggcctggtgccaatgttggccgcccagccaggactctcatcccatccaccttcttcagggacttcgccatcagcgtcgtggtgaagcccagcagcacccgtggtggcgtgctcttcgccatcactgacgccttccagaaggtcatctacctgggcctgcggctctcaggtgtggaggacggccaccagcggatcatcctctactacacggagccaggctcccatgtgtcccaagaggctgctgccttctcggtgcctgtgatgacccacaggtggaaccrcttcgccatgattgtccagggtgaggaagtgaccctcctcgtgaactgtgaggagcacagccgcatccccttccagcggtcctcccaggctttggcttttgagtccagcrctggaatcttcntgggcaatgcaggagctacagggctcgagagattcactggctccctccagcagctcaccgtgcaccccgaccccaggactcccgaggagctgtgtgaccctgaagagtcctcggcatctggagagaccagtgggctgcaggaggcagacggagtagctgagatcttagaagccgtcacctacactcaagcctcgcccaaagaagcaaaagttgaacccataaacacacctccaactccatcctccccctttgaagacatggaactttctggtgaacctgtacccgaggggaccctggaaaccaccaacatgagcatcatccagcacagcagccccaaacaaggcaaggtctggtgagatcctgaatgacacactggagggggttcattctgtggatggtgaccccattactgacagcggctcaggggctggggccttccttgacattgctgaagaaaagaatttagcagcaacagcagcggggctggccgaggtgcccatcagcactgctggagaagcagaggccagcagtgtgcccaccgggggaccaaccctctctatgtccacggagaacccagaggaaggggtcactccaggtccagataatgaagagcgtttagcagcaacagcagcaggggaggccgaggcactcgccagcatrcctggggaagtggaggccagtggtgtggcccccggggagctggacctctccatgtccgcccagagcctcrgggaagaggccactgtgggtccaagcagtgaagacagtttaacaacagctgcagctgcaaccgaagtgtccctcagtacttttgaggatgaggaagccagtggggtccccacagatggcctggctcccctcacagccaccatggcccctgagcgggcagtcacttctggtcctgntgatgamgaagacttggcagcagccacaacagaggagcccctcatcacagctgggggtgaagagtccggcagccctccccstgatgggccaccgctgcccctgcccacagtggctcctgaaagatggatcactccagctcaaagagaacatgtgggaatgaaaggacaggctgggcccaaaggagaaaagggtgatgctggggaggagcttcctggccctcctgaaccttctgggcctgttggacccacggcaggagcagaagcrgagggctctggcctaggctggggctcggacgtcggctctggctctggtgacctggtgggcagtgagcagctgctgagaggtcctccaggacccccagggccacctggcttacctgggattccaggaaaaccaggaactgatgttttcatgggaccccctggatctcctggagaggatggacctgctggtgaacctgggcccccgggccctgagggacagcctggagttgatggagccaccggccttcccgggatgaaaggggagaagggagcaagagggcctaatggctcagttggtgaaaagggtgaccctggcaacagaggcttacctggacccccggggaaaaagggacaagctggccctcctggggtcatgggacccccagggcctcctggaccccctgggcccccaggccctggatgcacaatgggacttggattcgaggataccgaaggctctggaagcacccagctattgaatgaacccaaactstccagaccaacggctgcaattggtctcaaaggagagaaaggagaccggggacccaagggagaaagggggatggatggagccagtattgtgggaccccctgggccgagrgggccacctgggcacatcaaggtcttgtctaattccttgatcaatatcacccatggattcatgaatttctcggacattcctgagctggtggggcctccggggcyggacgggttgcctgggctgccaggatttccaggycctagaggaccaaaaggtgacactggtttacctggcyttccaggactaaaaggagaacagggcgagaagggagagccgggtgccatcctgacagaggacattcctctggaaaggctgatggggaaaaagggtgaacctggaatgcatggagccccaggaccaatggggcccaaaggaccaccaggacataaaggagaatttggccttcccgggcgacctggtcgcccaggactgaatggcctcaagggtaccaaaggagatccaggggtcattatgcagggcccacctggcttacctggccctccaggcccccctgggccacctggagctgtgattaacatcaaaggagccattttcccaatacccgtccgaccacactgcaaaatgccagttgatactgctcatcctgggagtccagagctcatcacttttcayggtgttaaaggagagaraggatcctggggtcttcctggctcaaagggagaaaraggcgaccagggagcccagggaccaccaggtcctccacttgatctagcttacctgagacactttctgaacaacttgaagggggagaatggagacaaggggttcaaaggtgaaaaaggagaaaaaggagacattaatggcagcttccttatgtctgggcctccaggcctgcccggaaatccaggcccggctggccaaaaaggggagacagtcgttgggccccaaggacccccaggtgctcctggtctgcctgggccacctggctttggaagacctggtgatcctgggccaccggggcccccggggccaccaggacctccagctatcctgggagcagctgtggcccttccaggtccccctggccctccaggacagccagggcttccyggatccagaaacctggtcagtattatcatcagggtggacggggtctcactctgtcacccaaactggagtacagtggtcacagcattcagcaacatggatgacatgctgcagaaagcgcatttggttatagaaggaacattcatctacctgagggacagcactgagtttttcattcgtgttagagatggctggaaaaaattacagccacatcagcttctgcctccaccaaaccctatttcaagtgccaattatgagaagcctgctctgcatttggctgctctgaacatgccattttctggggacattcgagctgattttcagtgcttcaagcaggccagagctgcaggactgttgtccacctaccgagcattcttatcttcccatttgcaagatctgtccaccattgtgaggaaagcagagagatacagccttcccatagtgaacctcaagggccaagtactttttaataattgggactcaattttttctggccacggaggtcagttcaatatgcatattccaatatactcctttgatggtcgagacataatgacagatccttcttggccccagaaagtcatttggcatggctccagcccccatggcrtccgccttgtggataactactgtgaagcatggcgaaccgcggacacagcggtcacgggacttgcctccccgctgagcacggggaagattctggaccagaaagcatacagctgtgctaatcggctaattgtcctatgtatcgaaaacagtttcatgacagacgctaggaagtaatggccttctgatgattcttaaagagttttcaattttttcttatgtgaagagttgacactgaaatctaaaatgtttaattgttgtaaatattacagtttttttttttttactacatattctttacaacagcaaccaaagaaaacatacctcaatacactcaaaactgaagacatagaggactcagatcaaagacaaaatctgatccatatattggtgctagattctgcaggaaaccccagcagtgtgaacgcatcccaacataggttaagagcaarttgaaaacaaaggccatggcattctgccactgcatccttcagacagttatatcctccttttaaaccattgwtgttgagtgtaagatgtccttcatgttttcttataaagtcagtgtttagaaatgttaccctttctaagttatatacagatcaaatgcttttttctttcacgtacatscatcatttgcaactgctgttcgtacacagaaacaggactgctcaaatgatcctatttgtattttctgatgctatcagactctaatgtttttttccctaaaatattattgccatcatgctttaggaattttatatttttacacaatcatattttagtatggtgtctgtttatgtaactctgacttgctggaaaagttgaaactccaaataatctgaaactagaaaagaaatagcacataattactaccttccccttggcggctctcctccccaacccccmccccmcaattttatgacttccatttggcaattgttgaattataactgcgactgaaacaaacaggttcatagagatgaattttytgagaaacatatatctacatgttgtataattggattttttttccatgtaagtgaacataaaaacatcttttccgggtgctttcttcatttgactttttcccgctagttcctttattctccatcactgatgtggaagcagacctggggtgggtttgctaatcctgccacttgtgctgcccccaggcgatgatcagagaactgaaacgttttcccatcatgctcatctgccctggctgttgtcttccacctagtggggccagtgtaggttgtgtagagcctcagagtgggaaacaggatgagctgtgattctgccaccgtctcagggcatgactttgggcaagtcggcctctgtctctcaaggagattgggataagacaagcatagtattggctaccagtcattaaatatcagacttctgatatat

SEQ ID NO: 346 - DNA, 6586 bp, Homo sapiens
  misc_feature (1)...(6586): n = A,T,C or G, or insertion/deletion polymorphism (see Tables 1-2)
caatgtacacactttatttgtatattaaacaagtagaaatatgtttttccccatctttctttaaacatgttcttctccccatatatcttctgtttacccatttttaacaggaacatgagcattcaacctattccattttttcttatatgcaaaggcagagtgcaactgtgataggggcaattgattcttagctttggttttggggacaatatggggtggtgggaactacggcaaactggacagtactgccttagctgaaggcagcagcccctattcaatgccaatcaattgttggcacagagaatgcaggccttatgtcgccaggttttccaaaatttcaaaaagaatccagaagtctcaattttactgtgcaattctcttttattaggattatctctgctgcatttagttgtatgtatcccttatggcccccaggcaggtccactcctgggcattcaagtcggtccatgtgtcaggcgtgcagggtgggtcacagcatctaggagctcagtgcagcttgggactttgggacatacgctccacctctctgagcctcagtctccttgtccatcatataaggaaatcactgattccagccttcctgggctgtggagaggattccctcagcggctgtgaaagagtgctttcttgcgsgtcagccccgacaggacagacttaagggcgggagggagcccatcccgcttgccccaacgaacgcgggcgcggggctttcctckcaggttacataaggcagccgcgggtggaggcagcagaggcgagcgcacgtccgtcgagggggaaaggggcgtggggaggcggccggggcggccggtatcccccgggcgtgagtgcgcagcgcgcgggggagcgcagggcgcggcggagtcgggtttcagagcgcgggtgactcggggcgcgggccgggagccgggattctgcccgccgccgccgctgccgagcgccgcctttgttccctgcaggaagggcgagcgcggcggccagcgctcagcgacccttcgtcctccgctaagctccaacgctctgctcgactagccgcgcgccttccggggctccgcagacccgcgagatggcaccaaggtaagacccgcttctctgcttcctcgcgkcccgggcccctccaatactcttgcccgcctcaccttttctccctcgggcacatcttgcaggaggaacaacgggcagtgctggtgtctgctgatgctgctctcggtctccacgcccctccctgctgtcacccagacccgcggtgcgacagagactgcttcccagggtcacctggacctcacgcagctcatcggtgwcccgctgccctcgtccgtatcctttgtcacaggctatggtggcttcccggcctacagtttcgggcctggtgccaatgttggccgcccagccaggactctcatcccatccaccttcttcagggacttcgccatcagcgtcgtggtgaagcccagcagcacccgtggtggcgtgctcttcgccatcactgacgccttccagaaggtcatctacctgggcctgcggctctcaggtgtggaggacggccaccagcggatcatcctctactacacggagccaggctcccatgtgtcccaagaggctgctgccttctcggtgcctgtgatgacccacaggtggaaccrcttcgccatgattgtccagggtgaggaagtgaccctcctcgtgaactgtgaggagcacagccgcatccccttccagcggtcctcccaggctttggcttttgagtccagcrctggaatcttcntgggcaatgcaggagctacagggctcgagagattcactggctccctccagcagctcaccgtgcaccccgaccccaggactcccgaggagctgtgtgaccctgaagagtcctcggcatctggagagaccagtgggctgcaggaggcagacggagtagctgagatcttagaagccgtcacctacactcaagcctcgcccaaagaagcaaaagttgaacccataaacacacctccaactccatcctccccctttgaagacatggaactttctggtgaacctgtacccgaggggaccctggaaaccaccaacatgagcatcatccagcacagcagccccaaacaaggcaaggtctggtgagatcctgaatgacacactggagggggttcattctgtggatggtgaccccattactgacagcggctcaggggctggggccttccttgacattgctgaagaaaagaatttagcagcaacagcagcggggctggccgaggtgcccatcagcactgctggagaagcagaggccagcagtgtgcccaccgggggaccaaccctctctatgtccacggagaacccagaggaaggggtcactccaggtccagataatgaagagcgtttagcagcaacagcagcaggggaggccgaggcactcgccagcatrcctggggaagtggaggccagtggtgtggcccccggggagctggacctctccatgtccgcccagagcctcrgggaagaggccactgtgggtccaagcagtgaagacagtttaacaacagctgcagctgcaaccgaagtgtccctcagtacttttgaggatgaggaagccagtggggtccccacagatggcctggctcccctcacagccaccatggcccctgagcgggcagtcacttctggtcctgntgatgamgaagacttggcagcagccacaacagaggagcccctcatcacagctgggggtgaagagtccggcagccctccccstgatgggccaccgctgcccctgcccacagtggctcctgaaagatggatcactccagctcaaagagaacatgtgggaatgaaaggacaggctgggcccaaaggagaaaagggtgatgctggggaggagcttcctggccctcctgaaccttctgggcctgttggacccacggcaggagcagaagcrgagggctctggcctaggctggggctcggacgtcggctctggctctggtgacctggtgggcagtgagcagctgctgagaggtcctccaggacccccagggccacctggcttacctgggattccaggaaaaccaggaactgatgttttcatgggaccccctggatctcctggagaggatggacctgctggtgaacctgggcccccgggccctgagggacagcctggagttgatggagccaccggccttcccgggatgaaaggggagaagggagcaagagggcctaatggctcagttggtgaaaagggtgaccctggcaacagaggcttacctggacccccggggaaaaagggacaagctggccctcctggggtcatgggacccccagggcctcctggaccccctgggcccccaggccctggatgcacaatgggacttggattcgaggataccgaaggctctggaagcacccagctattgaatgaacccaaactstccagaccaacggctgcaattggtctcaaaggagagaaaggagaccggggacccaagggagaaagggggatggatggagccagtattgtgggaccccctgggccgagrgggccacctgggcacatcaaggtcttgtctaattccttgatcaatatcacccatggattcatgaatttctcggacattcctgagctggtggggcctccggggcyggacgggttgcctgggctgccaggatttccaggycctagaggaccaaaaggtgacactggtttacctggcyttccaggactaaaaggagaacagggcgagaagggagagccgggtgccatcctgacagaggacattcctctggaaaggctgatggggaaaaagggtgaacctggaatgcatggagccccaggaccaatggggcccaaaggaccaccaggacataaaggagaatttggccttcccgggcgacctggtcgcccaggactgaatggcctcaagggtaccaaaggagatccaggggtcattatgcagggcccacctggcttacctggccctccaggcccccctgggccacctggagctgtgattaacatcaaaggagccattttcccaatacccgtccgaccacactgcaaaatgccagttgatactgctcatcctgggagtccagagctcatcacttttcayggtgttaaaggagagaraggatcctggggtcttcctggctcaaagggagaaaraggcgaccagggagcccagggaccaccaggtcctccacttgatctagcttacctgagacactttctgaacaacttgaagggggagaatggagacaaggggttcaaaggtgaaaaaggagaaaaaggagacattaatggcagcttccttatgtctgggcctccaggcctgcccggaaatccaggcccggctggccaaaaaggggagacagtcgttgggccccaaggacccccaggtgctcctggtctgcctgggccacctggctttggaagacctggtgatcctgggccaccggggcccccggggccaccaggacctccagctatcctgggagcagctgtggcccttccaggtccccctggccctccaggacagccagggcttccyggatccagaaacctggtcacagcattcagcaacatggatgacatgctgcagaaagcgcatttggttatagaaggaacattcatctacctgagggacagcactgagtttttcattcgtgttagagatggctggaaaaaattacagctgggagaactgatccccattcctgccgacagccctccaccccctgcgctttccagcaacccacatcagcttctgcctccaccaaaccctatttcaagtgccaattatgagaagcctgctctgcatttggctgctctgaacatgccattttctggggacattcgagctgattttcagtgcttcaagcaggccagagctgcaggactgttgtccacctaccgagcattcttatcttcccatttgcaagatctgtccaccattgtgaggaaagcagagagatacagccttcccatagtgaacctcaagggccaagtactttttaataattgggactcaattttttctggccacggaggtcagttcaatatgcatattccaatatactcctttgatggtcgagacataatgacagatccttcttggccccagaaagtcatttggcatggctccagcccccatggcrtccgccttgtggataactactgtgaagcatggcgaaccgcggacacagcggtcacgggacttgcctccccgctgagcacggggaagattctggaccagaaagcatacagctgtgctaatcggctaattgtcctatgtatcgaaaacagtttcatgacagacgctaggaagtaatggccttctgatgattcttaaagagttttcaattttttcttatgtgaagagttgacactgaaatctaaaatgtttaattgttgtaaatattacagtttttttttttttactacatattctttacaacagcaaccaaagaaaacatacctcaatacactcaaaactgaagacatagaggactcagatcaaagacaaaatctgatccatatattggtgctagattctgcaggaaaccccagcagtgtgaacgcatcccaacataggttaagagcaarttgaaaacaaaggccatggcattctgccactgcatccttcagacagttatatcctccttttaaaccattgwtgttgagtgtaagatgtccttcatgttttcttataaagtcagtgtttagaaatgttaccctttctaagttatatacagatcaaatgcttttttctttcacgtacatscatcatttgcaactgctgttcgtacacagaaacaggactgctcaaatgatcctatttgtattttctgatgctatcagactctaatgtttttttccctaaaatattattgccatcatgctttaggaattttatatttttacacaatcatattttagtatggtgtctgtttatgtaactctgacttgctggaaaagttgaaactccaaataatctgaaactagaaaagaaatagcacataattactaccttccccttggcggctctcctccccaacccccmccccmcaattttatgacttccatttggcaattgttgaattataactgcgactgaaacaaacaggttcatagagatgaattttytgagaaacatatatctacatgttgtataattggattttttttccatgtaagtgaacataaaaacatcttttccgggtgctttcttcatttgactttttcccgctagttcctttattctccatcactgatgtggaagcagacctggggtgggtttgctaatcctgccacttgtgctgcccccaggcgatgatcagagaactgaaacgttttcccatcatgctcatctgccctggctgttgtcttccacctagtggggccagtgtaggttgtgtagagcctcagagtgggaaacaggatgagctgtgattctgccaccgtctcagggcatgactttgggcaagtcggcctctgtctctcaaggagattgggataagacaagcatagtattggctaccagtcattaaatatcagacttctgatatat

SEQ ID NO: 347 - DNA, 6493 bp, Homo sapiens
  misc_feature (1)...(6493): n = A,T,C or G, or insertion/deletion polymorphism (see Tables 1-2)
caatgtacacactttatttgtatattaaacaagtagaaatatgtttttccccatctttctttaaacatgttcttctccccatatatcttctgtttacccatttttaacaggaacatgagcattcaacctattccattttttcttatatgcaaaggcagagtgcaactgtgataggggcaattgattcttagctttggttttggggacaatatggggtggtgggaactacggcaaactggacagtactgccttagctgaaggcagcagcccctattcaatgccaatcaattgttggcacagagaatgcaggccttatgtcgccaggttttccaaaatttcaaaaagaatccagaagtctcaattttactgtgcaattctcttttattaggattatctctgctgcatttagttgtatgtatcccttatggcccccaggcaggtccactcctgggcattcaagtcggtccatgtgtcaggcgtgcagggtgggtcacagcatctaggagctcagtgcagcttgggactttgggacatacgctccacctctctgagcctcagtctccttgtccatcatataaggaaatcactgattccagccttcctgggctgtggagaggattccctcagcggctgtgaaagagtgctttcttgcgsgtcagccccgacaggacagacttaagggcgggagggagcccatcccgcttgccccaacgaacgcgggcgcggggctttcctckcaggttacataaggcagccgcgggtggaggcagcagaggcgagcgcacgtccgtcgagggggaaaggggcgtggggaggcggccggggcggccggtatcccccgggcgtgagtgcgcagcgcgcgggggagcgcagggcgcggcggagtcgggtttcagagcgcgggtgactcggggcgcgggccgggagccgggattctgcccgccgccgccgctgccgagcgccgcctttgttccctgcaggaagggcgagcgcggcggccagcgctcagcgacccttcgtcctccgctaagctccaacgctctgctcgactagccgcgcgccttccggggctccgcagacccgcgagatggcaccaaggaggaacaacgggcagtgctggtgtctgctgatgctgctctcggtctccacgcccctccctgctgtcacccagacccgcggtgcgacagagactgcttcccagggtcacctggacctcacgcagctcatcggtgwcccgctgccctcgtccgtatcctttgtcacaggctatggtggcttcccggcctacagtttcgggcctggtgccaatgttggccgcccagccaggactctcatcccatccaccttcttcagggacttcgccatcagcgtcgtggtgaagcccagcagcacccgtggtggcgtgctcttcgccatcactgacgccttccagaaggtcatctacctgggcctgcggctctcaggtgtggaggacggccaccagcggatcatcctctactacacggagccaggctcccatgtgtcccaagaggctgctgccttctcggtgcctgtgatgacccacaggtggaaccrcttcgccatgattgtccagggtgaggaagtgaccctcctcgtgaactgtgaggagcacagccgcatccccttccagcggtcctcccaggctttggcttttgagtccagcrctggaatcttcntgggcaatgcaggagctacagggctcgagagattcactggctccctccagcagctcaccgtgcaccccgaccccaggactcccgaggagctgtgtgaccctgaagagtcctcggcatctggagagaccagtgggctgcaggaggcagacggagtagctgagatcttagaagccgtcacctacactcaagcctcgcccaaagaagcaaaagttgaacccataaacacacctccaactccatcctccccctttgaagacatggaactttctggtgaacctgtacccgaggggaccctggaaaccaccaacatgagcatcatccagcacagcagccccaaacaagggtctggtgagatcctgaatgacacactggagggggttcattctgtggatggtgaccccattactgacagcggctcaggggctggggccttccttgacattgctgaagaaaagaatttagcagcaacagcagcggggctggccgaggtgcccatcagcactgctggagaagcagaggccagcagtgtgcccaccgggggaccaaccctctctatgtccacggagaacccagaggaaggggtcactccaggtccagataatgaagagcgtttagcagcaacagcagcaggggaggccgaggcactcgccagcatrcctggggaagtggaggccagtggtgtggcccccggggagctggacctctccatgtccgcccagagcctcrgggaagaggccactgtgggtccaagcagtgaagacagtttaacaacagctgcagctgcaaccgaagtgtccctcagtacttttgaggatgaggaagccagtggggtccccacagatggcctggctcccctcacagccaccatggcccctgagcgggcagtcacttctggtcctgntgatgamgaagacttggcagcagccacaacagaggagcccctcatcacagctgggggtgaagagtccggcagccctccccstgatgggccaccgctgcccctgcccacagtggctcctgaaagatggatcactccagctcaaagagaacatgtgggaatgaaaggacaggctgggcccaaaggagaaaagggtgatgctggggaggagcttcctggccctcctgaaccttctgggcctgttggacccacggcaggagcagaagcrgagggctctggcctaggctggggctcggacgtcggctctggctctggtgacctggtgggcagtgagcagctgctgagaggtcctccaggacccccagggccacctggcttacctgggattccaggaaaaccaggaactgatgttttcatgggaccccctggatctcctggagaggatggacctgctggtgaacctgggcccccgggccctgagggacagcctggagttgatggagccaccggccttcccgggatgaaaggggagaagggagcaagagggcctaatggctcagttggtgaaaagggtgaccctggcaacagaggcttacctggacccccggggaaaaagggacaagctggccctcctggggtcatgggacccccagggcctcctggaccccctgggcccccaggccctggatgcacaatgggacttggattcgaggataccgaaggctctggaagcacccagctattgaatgaacccaaactstccagaccaacggctgcaattggtctcaaaggagagaaaggagaccggggacccaagggagaaagggggatggatggagccagtattgtgggaccccctgggccgagrgggccacctgggcacatcaaggtcttgtctaattccttgatcaatatcacccatggattcatgaatttctcggacattcctgagctggtggggcctccggggcyggacgggttgcctgggctgccaggatttccaggycctagaggaccaaaaggtgacactggtttacctggcyttccaggactaaaaggagaacagggcgagaagggagagccgggtgccatcctgacagaggacattcctctggaaaggctgatggggaaaaagggtgaacctggaatgcatggagccccaggaccaatggggcccaaaggaccaccaggacataaaggagaatttggccttcccgggcgacctggtcgcccaggactgaatggcctcaagggtaccaaaggagatccaggggtcattatgcagggcccacctggcttacctggccctccaggcccccctgggccacctggagctgtgattaacatcaaaggagccattttcccaatacccgtccgaccacactgcaaaatgccagttgatactgctcatcctgggagtccagagctcatcacttttcayggtgttaaaggagagaraggatcctggggtcttcctggctcaaagggagaaaraggcgaccagggagcccagggaccaccaggtcctccacttgatctagcttacctgagacactttctgaacaacttgaagggggagaatggagacaaggggttcaaaggtgaaaaaggagaaaaaggagacattaatggcagcttccttatgtctgggcctccaggcctgcccggaaatccaggcccggctggccaaaaaggggagacagtcgttgggccccaaggacccccaggtgctcctggtctgcctgggccacctggctttggaagacctggtgatcctgggccaccggggcccccggggccaccaggacctccagctatcctgggagcagctgtggcccttccaggtccccctggccctccaggacagccagggcttccyggatccagaaacctggtcacagcattcagcaacatggatgacatgctgcagaaagcgcatttggttatagaaggaacattcatctacctgagggacagcactgagtttttcattcgtgttagagatggctggaaaaaattacagctgggagaactgatccccattcctgccgacagccctccaccccctgcgctttccagcaacccacatcagcttctgcctccaccaaaccctatttcaagtgccaattatgagaagcctgctctgcatttggctgctctgaacatgccattttctggggacattcgagctgattttcagtgcttcaagcaggccagagctgcaggactgttgtccacctaccgagcattcttatcttcccatttgcaagatctgtccaccattgtgaggaaagcagagagatacagccttcccatagtgaacctcaagggccaagtactttttaataattgggactcaattttttctggccacggaggtcagttcaatatgcatattccaatatactcctttgatggtcgagacataatgacagatccttcttggccccagaaagtcatttggcatggctccagcccccatggcrtccgccttgtggataactactgtgaagcatggcgaaccgcggacacagcggtcacgggacttgcctccccgctgagcacggggaagattctggaccagaaagcatacagctgtgctaatcggctaattgtcctatgtatcgaaaacagtttcatgacagacgctaggaagtaatggccttctgatgattcttaaagagttttcaattttttcttatgtgaagagttgacactgaaatctaaaatgtttaattgttgtaaatattacagtttttttttttttactacatattctttacaacagcaaccaaagaaaacatacctcaatacactcaaaactgaagacatagaggactcagatcaaagacaaaatctgatccatatattggtgctagattctgcaggaaaccccagcagtgtgaacgcatcccaacataggttaagagcaarttgaaaacaaaggccatggcattctgccactgcatccttcagacagttatatcctccttttaaaccattgwtgttgagtgtaagatgtccttcatgttttcttataaagtcagtgtttagaaatgttaccctttctaagttatatacagatcaaatgcttttttctttcacgtacatscatcatttgcaactgctgttcgtacacagaaacaggactgctcaaatgatcctatttgtattttctgatgctatcagactctaatgtttttttccctaaaatattattgccatcatgctttaggaattttatatttttacacaatcatattttagtatggtgtctgtttatgtaactctgacttgctggaaaagttgaaactccaaataatctgaaactagaaaagaaatagcacataattactaccttccccttggcggctctcctccccaacccccmccccmcaattttatgacttccatttggcaattgttgaattataactgcgactgaaacaaacaggttcatagagatgaattttytgagaaacatatatctacatgttgtataattggattttttttccatgtaagtgaacataaaaacatcttttccgggtgctttcttcatttgactttttcccgctagttcctttattctccatcactgatgtggaagcagacctggggtgggtttgctaatcctgccacttgtgctgcccccaggcgatgatcagagaactgaaacgttttcccatcatgctcatctgccctggctgttgtcttccacctagtggggccagtgtaggttgtgtagagcctcagagtgggaaacaggatgagctgtgattctgccaccgtctcagggcatgactttgggcaagtcggcctctgtctctcaaggagattgggataagacaagcatagtattggctaccagtcattaaatatcagacttctgatatat

SEQ ID NO: 348 - DNA, 6582 bp, Homo sapiens
  misc_feature (1)...(6582): n = A,T,C or G, or insertion/deletion polymorphism (see Tables 1-2)
caatgtacacactttatttgtatattaaacaagtagaaatatgtttttccccatctttctttaaacatgttcttctccccatatatcttctgtttacccatttttaacaggaacatgagcattcaacctattccattttttcttatatgcaaaggcagagtgcaactgtgataggggcaattgattcttagctttggttttggggacaatatggggtggtgggaactacggcaaactggacagtactgccttagctgaaggcagcagcccctattcaatgccaatcaattgttggcacagagaatgcaggccttatgtcgccaggttttccaaaatttcaaaaagaatccagaagtctcaattttactgtgcaattctcttttattaggattatctctgctgcatttagttgtatgtatcccttatggcccccaggcaggtccactcctgggcattcaagtcggtccatgtgtcaggcgtgcagggtgggtcacagcatctaggagctcagtgcagcttgggactttgggacatacgctccacctctctgagcctcagtctccttgtccatcatataaggaaatcactgattccagccttcctgggctgtggagaggattccctcagcggctgtgaaagagtgctttcttgcgsgtcagccccgacaggacagacttaagggcgggagggagcccatcccgcttgccccaacgaacgcgggcgcggggctttcctckcaggttacataaggcagccgcgggtggaggcagcagaggcgagcgcacgtccgtcgagggggaaaggggcgtggggaggcggccggggcggccggtatcccccgggcgtgagtgcgcagcgcgcgggggagcgcagggcgcggcggagtcgggtttcagagcgcgggtgactcggggcgcgggccgggagccgggattctgcccgccgccgccgctgccgagcgccgcctttgttccctgcaggaagggcgagcgcggcggccagcgctcagcgacccttcgtcctccgctaagctccaacgctctgctcgactagccgcgcgccttccggggctccgcagacccgcgagatggcaccaaggtaagacccgcttctctgcttcctcgcgkcccgggcccctccaatactcttgcccgcctcaccttttctccctcgggcacatcttgcaggaggaacaacgggcagtgctggtgtctgctgatgctgctctcggtctccacgcccctccctgctgtcacccagacccgcggtgcgacagagactgcttcccagggtcacctggacctcacgcagctcatcggtgwcccgctgccctcgtccgtatcctttgtcacaggctatggtggcttcccggcctacagtttcgggcctggtgccaatgttggccgcccagccaggactctcatcccatccaccttcttcagggacttcgccatcagcgtcgtggtgaagcccagcagcacccgtggtggcgtgctcttcgccatcactgacgccttccagaaggtcatctacctgggcctgcggctctcaggtgtggaggacggccaccagcggatcatcctctactacacggagccaggctcccatgtgtcccaagaggctgctgccttctcggtgcctgtgatgacccacaggtggaaccrcttcgccatgattgtccagggtgaggaagtgaccctcctcgtgaactgtgaggagcacagccgcatccccttccagcggtcctcccaggctttggcttttgagtccagcrctggaatcttcntgggcaatgcaggagctacagggctcgagagattcactggctccctccagcagctcaccgtgcaccccgaccccaggactcccgaggagctgtgtgaccctgaagagtcctcggcatctggagagaccagtgggctgcaggaggcagacggagtagctgagatcttagaagccgtcacctacactcaagcctcgcccaaagaagcaaaagttgaacccataaacacacctccaactccatcctccccctttgaagacatggaactttctggtgaacctgtacccgaggggaccctggaaaccaccaacatgagcatcatccagcacagcagccccaaacaagggtctggtgagatcctgaatgacacactggagggggttcattctgtggatggtgaccccattactgacagcggctcaggggctggggccttccttgacattgctgaagaaaagaatttagcagcaacagcagcggggctggccgaggtgcccatcagcactgctggagaagcagaggccagcagtgtgcccaccgggggaccaaccctctctatgtccacggagaacccagaggaaggggtcactccaggtccagataatgaagagcgtttagcagcaacagcagcaggggaggccgaggcactcgccagcatrcctggggaagtggaggccagtggtgtggcccccggggagctggacctctccatgtccgcccagagcctcrgggaagaggccactgtgggtccaagcagtgaagacagtttaacaacagctgcagctgcaaccgaagtgtccctcagtacttttgaggatgaggaagccagtggggtccccacagatggcctggctcccctcacagccaccatggcccctgagcgggcagtcacttctggtcctgntgatgamgaagacttggcagcagccacaacagaggagcccctcatcacagctgggggtgaagagtccggcagccctccccstgatgggccaccgctgcccctgcccacagtggctcctgaaagatggatcactccagctcaaagagaacatgtgggaatgaaaggacaggctgggcccaaaggagaaaagggtgatgctggggaggagcttcctggccctcctgaaccttctgggcctgttggacccacggcaggagcagaagcrgagggctctggcctaggctggggctcggacgtcggctctggctctggtgacctggtgggcagtgagcagctgctgagaggtcctccaggacccccagggccacctggcttacctgggattccaggaaaaccaggaactgatgttttcatgggaccccctggatctcctggagaggatggacctgctggtgaacctgggcccccgggccctgagggacagcctggagttgatggagccaccggccttcccgggatgaaaggggagaagggagcaagagggcctaatggctcagttggtgaaaagggtgaccctggcaacagaggcttacctggacccccggggaaaaagggacaagctggccctcctggggtcatgggacccccagggcctcctggaccccctgggcccccaggccctggatgcacaatgggacttggattcgaggataccgaaggctctggaagcacccagctattgaatgaacccaaactstccagaccaacggctgcaattggtctcaaaggagagaaaggagaccggggacccaagggagaaagggggatggatggagccagtattgtgggaccccctgggccgagrgggccacctgggcacatcaaggtcttgtctaattccttgatcaatatcacccatggattcatgaatttctcggacattcctgagctggtggggcctccggggcyggacgggttgcctgggctgccaggatttccaggycctagaggaccaaaaggtgacactggtttacctggcyttccaggactaaaaggagaacagggcgagaagggagagccgggtgccatcctgacagaggacattcctctggaaaggctgatggggaaaaagggtgaacctggaatgcatggagccccaggaccaatggggcccaaaggaccaccaggacataaaggagaatttggccttcccgggcgacctggtcgcccaggactgaatggcctcaagggtaccaaaggagatccaggggtcattatgcagggcccacctggcttacctggccctccaggcccccctgggccacctggagctgtgattaacatcaaaggagccattttcccaatacccgtccgaccacactgcaaaatgccagttgatactgctcatcctgggagtccagagctcatcacttttcayggtgttaaaggagagaraggatcctggggtcttcctggctcaaagggagaaaraggcgaccagggagcccagggaccaccaggtcctccacttgatctagcttacctgagacactttctgaacaacttgaagggggagaatggagacaaggggttcaaaggtgaaaaaggagaaaaaggagacattaatggcagcttccttatgtctgggcctccaggcctgcccggaaatccaggcccggctggccaaaaaggggagacagtcgttgggccccaaggacccccaggtgctcctggtctgcctgggccacctggctttggaagacctggtgatcctgggccaccggggcccccggggccaccaggacctccagctatcctgggagcagctgtggcccttccaggtccccctggccctccaggacagccagggcttccyggatccagaaacctggtcacagcattcagcaacatggatgacatgctgcagaaagcgcatttggttatagaaggaacattcatctacctgagggacagcactgagtttttcattcgtgttagagatggctggaaaaaattacagctgggagaactgatccccattcctgccgacagccctccaccccctgcgctttccagcaacccacatcagcttctgcctccaccaaaccctatttcaagtgccaattatgagaagcctgctctgcatttggctgctctgaacatgccattttctggggacattcgagctgattttcagtgcttcaagcaggccagagctgcaggactgttgtccacctaccgagcattcttatcttcccatttgcaagatctgtccaccattgtgaggaaagcagagagatacagccttcccatagtgaacctcaagggccaagtactttttaataattgggactcaattttttctggccacggaggtcagttcaatatgcatattccaatatactcctttgatggtcgagacataatgacagatccttcttggccccagaaagtcatttggcatggctccagcccccatggcrtccgccttgtggataactactgtgaagcatggcgaaccgcggacacagcggtcacgggacttgcctccccgctgagcacggggaagattctggaccagaaagcatacagctgtgctaatcggctaattgtcctatgtatcgaaaacagtttcatgacagacgctaggaagtaatggccttctgatgattcttaaagagttttcaattttttcttatgtgaagagttgacactgaaatctaaaatgtttaattgttgtaaatattacagtttttttttttttactacatattctttacaacagcaaccaaagaaaacatacctcaatacactcaaaactgaagacatagaggactcagatcaaagacaaaatctgatccatatattggtgctagattctgcaggaaaccccagcagtgtgaacgcatcccaacataggttaagagcaarttgaaaacaaaggccatggcattctgccactgcatccttcagacagttatatcctccttttaaaccattgwtgttgagtgtaagatgtccttcatgttttcttataaagtcagtgtttagaaatgttaccctttctaagttatatacagatcaaatgcttttttctttcacgtacatscatcatttgcaactgctgttcgtacacagaaacaggactgctcaaatgatcctatttgtattttctgatgctatcagactctaatgtttttttccctaaaatattattgccatcatgctttaggaattttatatttttacacaatcatattttagtatggtgtctgtttatgtaactctgacttgctggaaaagttgaaactccaaataatctgaaactagaaaagaaatagcacataattactaccttccccttggcggctctcctccccaacccccmccccmcaattttatgacttccatttggcaattgttgaattataactgcgactgaaacaaacaggttcatagagatgaattttytgagaaacatatatctacatgttgtataattggattttttttccatgtaagtgaacataaaaacatcttttccgggtgctttcttcatttgactttttcccgctagttcctttattctccatcactgatgtggaagcagacctggggtgggtttgctaatcctgccacttgtgctgcccccaggcgatgatcagagaactgaaacgttttcccatcatgctcatctgccctggctgttgtcttccacctagtggggccagtgtaggttgtgtagagcctcagagtgggaaacaggatgagctgtgattctgccaccgtctcagggcatgactttgggcaagtcggcctctgtctctcaaggagattgggataagacaagcatagtattggctaccagtcattaaatatcagacttctgatatat

SEQ ID NO: 349 - DNA, 6369 bp, Homo sapiens
  misc_feature (1)...(6369): n = A,T,C or G, or insertion/deletion polymorphism (see Tables 1-2)
caatgtacacactttatttgtatattaaacaagtagaaatatgtttttccccatctttctttaaacatgttcttctccccatatatcttctgtttacccatttttaacaggaacatgagcattcaacctattccattttttcttatatgcaaaggcagagtgcaactgtgataggggcaattgattcttagctttggttttggggacaatatggggtggtgggaactacggcaaactggacagtactgccttagctgaaggcagcagcccctattcaatgccaatcaattgttggcacagagaatgcaggccttatgtcgccaggttttccaaaatttcaaaaagaatccagaagtctcaattttactgtgcaattctcttttattaggattatctctgctgcatttagttgtatgtatcccttatggcccccaggcaggtccactcctgggcattcaagtcggtccatgtgtcaggcgtgcagggtgggtcacagcatctaggagctcagtgcagcttgggactttgggacatacgctccacctctctgagcctcagtctccttgtccatcatataaggaaatcactgattccagccttcctgggctgtggagaggattccctcagcggctgtgaaagagtgctttcttgcgsgtcagccccgacaggacagacttaagggcgggagggagcccatcccgcttgccccaacgaacgcgggcgcggggctttcctckcaggttacataaggcagccgcgggtggaggcagcagaggcgagcgcacgtccgtcgagggggaaaggggcgtggggaggcggccggggcggccggtatcccccgggcgtgagtgcgcagcgcgcgggggagcgcagggcgcggcggagtcgggtttcagagcgcgggtgactcggggcgcgggccgggagccgggattctgcccgccgccgccgctgccgagcgccgcctttgttccctgcaggaagggcgagcgcggcggccagcgctcagcgacccttcgtcctccgctaagctccaacgctctgctcgactagccgcgcgccttccggggctccgcagacccgcgagatggcaccaaggaggaacaacgggcagtgctggtgtctgctgatgctgctctcggtctccacgcccctccctgctgtcacccagacccgcggtgcgacagagactgcttcccagggtcacctggacctcacgcagctcatcggtgwcccgctgccctcgtccgtatcctttgtcacaggctatggtggcttcccggcctacagtttcgggcctggtgccaatgttggccgcccagccaggactctcatcccatccaccttcttcagggacttcgccatcagcgtcgtggtgaagcccagcagcacccgtggtggcgtgctcttcgccatcactgacgccttccagaaggtcatctacctgggcctgcggctctcaggtgtggaggacggccaccagcggatcatcctctactacacggagccaggctcccatgtgtcccaagaggctgctgccttctcggtgcctgtgatgacccacaggtggaaccrcttcgccatgattgtccagggtgaggaagtgaccctcctcgtgaactgtgaggagcacagccgcatccccttccagcggtcctcccaggctttggcttttgagtccagcrctggaatcttcntgggcaatgcaggagctacagggctcgagagattcactggctccctccagcagctcaccgtgcaccccgaccccaggactcccgaggagctgtgtgaccctgaagagtcctcggcatctggagagaccagtgggctgcaggaggcagacggagtagctgagatcttagaagccgtcacctacactcaagcctcgcccaaagaagcaaaagttgaacccataaacacacctccaactccatcctccccctttgaagacatggaactttctggtgaacctgtacccgaggggaccctggaaaccaccaacatgagcatcatccagcacagcagccccaaacaagggtctggtgagatcctgaatgacacactggagggggttcattctgtggatggtgaccccattactgacagcggctcaggggctggggccttccttgacattgctgaagaaaagaatttagcagcaacagcagcggggctggccgaggtgcccatcagcactgctggagaagcagaggccagcagtgtgcccaccgggggaccaaccctctctatgtccacggagaacccagaggaaggggtcactccaggtccagataatgaagagcgtttagcagcaacagcagcaggggaggccgaggcactcgccagcatrcctggggaagtggaggccagtggtgtggcccccggggagctggacctctccatgtccgcccagagcctcrgggaagaggccactgtgggtcctgntgatgamgaagacttggcagcagccacaacagaggagcccctcatcacagctgggggtgaagagtccggcagccctccccstgatgggccaccgctgcccctgcccacagtggctcctgaaagatggatcactccagctcaaagagaacatgtgggaatgaaaggacaggctgggcccaaaggagaaaagggtgatgctggggaggagcttcctggccctcctgaaccttctgggcctgttggacccacggcaggagcagaagcrgagggctctggcctaggctggggctcggacgtcggctctggctctggtgacctggtgggcagtgagcagctgctgagaggtcctccaggacccccagggccacctggcttacctgggattccaggaaaaccaggaactgatgttttcatgggaccccctggatctcctggagaggatggacctgctggtgaacctgggcccccgggccctgagggacagcctggagttgatggagccaccggccttcccgggatgaaaggggagaagggagcaagagggcctaatggctcagttggtgaaaagggtgaccctggcaacagaggcttacctggacccccggggaaaaagggacaagctggccctcctggggtcatgggacccccagggcctcctggaccccctgggcccccaggccctggatgcacaatgggacttggattcgaggataccgaaggctctggaagcacccagctattgaatgaacccaaactstccagaccaacggctgcaattggtctcaaaggagagaaaggagaccggggacccaagggagaaagggggatggatggagccagtattgtgggaccccctgggccgagrgggccacctgggcacatcaaggtcttgtctaattccttgatcaatatcacccatggattcatgaatttctcggacattcctgagctggtggggcctccggggcyggacgggttgcctgggctgccaggatttccaggycctagaggaccaaaaggtgacactggtttacctggcyttccaggactaaaaggagaacaggactacctttcctcaycagtggagtgggcgagaagggagagccgggtgccatcctgacagaggacattcctctggaaaggctgatggggaaaaagggtgaacctggaatgcatggagccccaggaccaatggggcccaaaggaccaccaggacataaaggagaatttggccttcccgggcgacctggtcgcccaggactgaatggcctcaagggtaccaaaggagatccaggggtcattatgcagggcccacctggcttacctggccctccaggcccccctgggccacctggagctgtgattaacatcaaaggagccattttcccaatacccgtccgaccacactgcaaaatgccagttgatactgctcatcctgggagtccagagctcatcacttttcayggtgttaaaggagagaraggatcctggggtcttcctggctcaaagggagaaaraggcgaccagggagcccagggaccaccaggtcctccacttgatctagcttacctgagacactttctgaacaacttgaagggggagaatggagacaaggggttcaaaggtgaaaaaggagaaaaaggagacattaatggcagcttccttatgtctgggcctccaggcctgcccggaaatccaggcccggctggccaaaaaggggagacagtcgttgggccccaaggacccccaggtgctcctggtctgcctgggccacctggctttggaagacctggtgatcctgggccaccggggcccccggggccaccaggacctccagctatcctgggagcagctgtggcccttccaggtccccctggccctccaggacagccagggcttccyggatccagaaacctggtcacagcattcagcaacatggatgacatgctgcagaaagcgcatttggttatagaaggaacattcatctacctgagggacagcactgagtttttcattcgtgttagagatggctggaaaaaattacagctgggagaactgatccccattcctgccgacagccctccaccccctgcgctttccagcaacccacatcagcttctgcctccaccaaaccctatttcaagtgccaattatgagaagcctgctctgcatttggctgctctgaacatgccattttctggggacattcgagctgattttcagtgcttcaagcaggccagagctgcaggactgttgtccacctaccgagcattcttatcttcccatttgcaagatctgtccaccattgtgaggaaagcagagagatacagccttcccatagtgaacctcaagggccaagtactttttaataattgggactcaattttttctggccacggaggtcagttcaatatgcatattccaatatactcctttgatggtcgagacataatgacagatccttcttggccccagaaagtcatttggcatggctccagcccccatggcrtccgccttgtggataactactgtgaagcatggcgaaccgcggacacagcggtcacgggacttgcctccccgctgagcacggggaagattctggaccagaaagcatacagctgtgctaatcggctaattgtcctatgtatcgaaaacagtttcatgacagacgctaggaagtaatggccttctgatgattcttaaagagttttcaattttttcttatgtgaagagttgacactgaaatctaaaatgtttaattgttgtaaatattacagtttttttttttttactacatattctttacaacagcaaccaaagaaaacatacctcaatacactcaaaactgaagacatagaggactcagatcaaagacaaaatctgatccatatattggtgctagattctgcaggaaaccccagcagtgtgaacgcatcccaacataggttaagagcaarttgaaaacaaaggccatggcattctgccactgcatccttcagacagttatatcctccttttaaaccattgwtgttgagtgtaagatgtccttcatgttttcttataaagtcagtgtttagaaatgttaccctttctaagttatatacagatcaaatgcttttttctttcacgtacatscatcatttgcaactgctgttcgtacacagaaacaggactgctcaaatgatcctatttgtattttctgatgctatcagactctaatgtttttttccctaaaatattattgccatcatgctttaggaattttatatttttacacaatcatattttagtatggtgtctgtttatgtaactctgacttgctggaaaagttgaaactccaaataatctgaaactagaaaagaaatagcacataattactaccttccccttggcggctctcctccccaacccccmccccmcaattttatgacttccatttggcaattgttgaattataactgcgactgaaacaaacaggttcatagagatgaattttytgagaaacatatatctacatgttgtataattggattttttttccatgtaagtgaacataaaaacatcttttccgggtgctttcttcatttgactttttcccgctagttcctttattctccatcactgatgtggaagcagacctggggtgggtttgctaatcctgccacttgtgctgcccccaggcgatgatcagagaactgaaacgttttcccatcatgctcatctgccctggctgttgtcttccacctagtggggccagtgtaggttgtgtagagcctcagagtgggaaacaggatgagctgtgattctgccaccgtctcagggcatgactttgggcaagtcggcctctgtctctcaaggagattgggataagacaagcatagtattggctaccagtcattaaatatcagacttctgatatat

SEQ ID NO: 350 - DNA, 6115 bp, Homo sapiens
  misc_feature (1)...(6115): n = A,T,C or G, or insertion/deletion polymorphism (see Tables 1-2)
cttttattaggattatctctgctgcatttagttgtatgtatcccttatggcccccaggcaggtccactcctgggcattcaagtcggtccatgtgtcaggcgtgcagggtgggtcacagcatctaggagctcagtgcagcttgggactttgggacatacgctccacctctctgagcctcagtctccttgtccatcatataaggaaatcactgattccagccttcctgggctgtggagaggattccctcagcggctgtgaaagagtgctttcttgcgsgtcagccccgacaggacagacttaagggcgggagggagcccatcccgcttgccccaacgaacgcgggcgcggggctttcctckcaggttacataaggcagccgcgggtggaggcagcagaggcgagcgcacgtccgtcgagggggaaaggggcgtggggaggcggccggggcggccggtatcccccgggcgtgagtgcgcagcgcgcgggggagcgcagggcgcggcggagtcgggtttcagagcgcgggtgactcggggcgcgggccgggagccgggattctgcccgccgccgccgctgccgagcgccgcctttgttccctgcaggaagggcgagcgcggcggccagcgctcagcgacccttcgtcctccgctaagctccaacgctctgctcgactagccgcgcgccttccggggctccgcagacccgcgagatggcaccaaggaggaacaacgggcagtgctggtgtctgctgatgctgctctcggtctccacgcccctccctgctgtcacccagacccgcggtgcgacagagactgcttcccagggtcacctggacctcacgcagctcatcggtgwcccgctgccctcgtccgtatcctttgtcacaggctatggtggcttcccggcctacagtttcgggcctggtgccaatgttggccgcccagccaggactctcatcccatccaccttcttcagggacttcgccatcagcgtcgtggtgaagcccagcagcacccgtggtggcgtgctcttcgccatcactgacgccttccagaaggtcatctacctgggcctgcggctctcaggtgtggaggacggccaccagcggatcatcctctactacacggagccaggctcccatgtgtcccaagaggctgctgccttctcggtgcctgtgatgacccacaggtggaaccncttcgccatgattgtccagggtgaggaagtgaccctcctcgtgaactgtgaggagcacagccgcatccccttccagcggtcctcccaggctttggcttttgagtccagcrctggaatcttcntgggcaatgcaggagctacagggctcgagagattcactggctccctccagcagctcaccgtgcaccccgaccccaggactcccgaggagctgtgtgaccctgaagagtcctcggcatctggagagaccagtgggctgcaggaggcagacggagtagctgagatcttagaagccgtcacctacactcaagcctcgcccaaagaagcaaaagttgaacccataaacacacctccaactccatcctccccctttgaagacatggaactttctggtgaacctgtacccgaggggaccctggaaaccaccaacatgagcatcatccagcacagcagccccaaacaagggtctggtgagatcctgaatgacacactggagggggttcattctgtggatggtgaccccattactgacagcggctcaggggctggggccttccttgacattgctgaagaaaagaatttagcagcaacagcagcggggctggccgaggtgcccatcagcactgctggagaagcagaggccagcagtgtgcccaccgggggaccaaccctctctatgtccacggagaacccagaggaaggggtcactccaggtccagataatgaagagcgtttagcagcaacagcagcaggggaggccgaggcactcgccagcatrcctggggaagtggaggccagtggtgtggcccccggggagctggacctctccatgtccgcccagagcctcrgggaagaggccactgtgggtccaagcagtgaagacagtttaacaacagctgcagctgcaaccgaagtgtccctcagtacttttgaggatgaggaagccagtggggtccccacagatggcctggctcccctcacagccaccatggcccctgagcgggcagtcacttctggtcctgntgatgamgaagacttggcagcagccacaacagaggagcccctcatcacagctgggggtgaagagtccggcagccctccccstgatgggccaccgctgcccctgcccacagtggctcctgaaagatggatcactccagctcaaagagaacatgtgggaatgaaaggacaggctgggcccaaaggagaaaagggtgatgctggggaggagcttcctggccctcctgaaccttctgggcctgttggacccacggcaggagcagaagcrgagggctctggcctaggctggggctcggacgtcggctctggctctggtgacctggtgggcagtgagcagctgctgagaggtcctccaggacccccagggccacctggcttacctgggattccaggaaaaccaggaactgatgttttcatgggaccccctggatctcctggagaggatggacctgctggtgaacctgggcccccgggccctgagggacagcctggagttgatggagccaccggccttcccgggatgaaaggggagaagggagcaagagggcctaatggctcagttggtgaaaagggtgaccctggcaacagaggcttacctggacccccggggaaaaagggacaagctggccctcctggggtcatgggacccccagggcctcctggaccccctgggcccccaggccctggatgcacaatgggacttggattcgaggataccgaaggctctggaagcacccagctattgaatgaacccaaactstccagaccaacggctgcaattggtctcaaaggagagaaaggagaccggggacccaagggagaaagggggatggatggagccagtattgtgggaccccctgggccgagrgggccacctgggcacatcaaggtcttgtctaattccttgatcaatatcacccatggattcatgaatttctcggacattcctgagctggtggggcctccggggcyggacgggttgcctgggctgccaggatttccaggycctagaggaccaaaaggtgacactggtttacctggcyttccaggactaaaaggagaacagggcgagaagggagagccgggtgccatcctgacagaggacattcctctggaaaggctgatggggaaaaagggtgaacctggaatgcatggagccccaggaccaatggggcccaaaggaccaccaggacataaaggagaatttggccttcccgggcgacctggtcgcccaggactgaatggcctcaagggtaccaaaggagatccaggggtcattatgcagggcccacctggcttacctggccctccaggcccccctgggccacctggagctgtgattaacatcaaaggagccattttcccaatacccgtccgaccacactgcaaaatgccagttgatactgctcatcctgggagtccagagctcatcacttttcayggtgttaaaggagagaraggatcctggggtcttcctggctcaaagggagaaaraggcgaccagggagcccagggaccaccaggtcctccacttgatctagcttacctgagacactttctgaacaacttgaagggggagaatggagacaaggggttcaaaggtgaaaaaggagaaaaaggagacattaatggcagcttccttatgtctgggcctccaggcctgcccggaaatccaggcccggctggccaaaaaggggagacagtcgttgggccccaaggacccccaggtgctcctggtctgcctgggccacctggctttggaagacctggtgatcctgggccaccggggcccccggggccaccaggacctccagctatcctgggagcagctgtggcccttccaggtccccctggccctccaggacagccagggcttccyggatccagaaacctggtcacagcattcagcaacatggatgacatgctgcagaaagcgcatttggttatagaaggaacattcatctacctgagggacagcactgagtttttcattcgtgttagagatggctggaaaaaattacagctgggagaactgatccccattcctgccgacagccctccaccccctgcgctttccagcaacccacatcagcttctgcctccaccaaaccctatttcaagtgccaattatgagaagcctgctctgcatttggctgctctgaacatgccattttctggggacattcgagctgattttcagtgcttcaagcaggccagagctgcaggactgttgtccacctaccgagcattcttatcttcccatttgcaagatctgtccaccattgtgaggaaagcagagagatacagccttcccatagtgaacctcaagggccaagtactttttaataattgggactcaattttttctggccacggaggtcagttcaatatgcatattccaatatactcctttgatggtcgagacataatgacagatccttcttggccccagaaagtcatttggcatggctccagcccccatggcrtccgccttgtggataactactgtgaagcatggcgaaccgcggacacagcggtcacgggacttgcctccccgctgagcacggggaagattctggaccagaaagcatacagctgtgctaatcggctaattgtcctatgtatcgaaaacagtttcatgacagacgctaggaagtaatggccttctgatgattcttaaagagttttcaattttttcttatgtgaagagttgacactgaaatctaaaatgtttaattgttgtaaatattacagtttttttttttttactacatattctttacaacagcaaccaaagaaaacatacctcaatacactcaaaactgaagacatagaggactcagatcaaagacaaaatctgatccatatattggtgctagattctgcaggaaaccccagcagtgtgaacgcatcccaacataggttaagagcaarttgaaaacaaaggccatggcattctgccactgcatccttcagacagttatatcctccttttaaaccattgwtgttgagtgtaagatgtccttcatgttttcttataaagtcagtgtttagaaatgttaccctttctaagttatatacagatcaaatgcttttttctttcacgtacatscatcatttgcaactgctgttcgtacacagaaacaggactgctcaaatgatcctatttgtattttctgatgctatcagactctaatgtttttttccctaaaatattattgccatcatgctttaggaattttatatttttacacaatcatattttagtatggtgtctgtttatgtaactctgacttgctggaaaagttgaaactccaaataatctgaaactagaaaagaaatagcacataattactaccttccccttggcggctctcctccccaacccccmccccmcaattttatgacttccatttggcaattgttgaattataactgcgactgaaacaaacaggttcatagagatgaattttytgagaaacatatatctacatgttgtataattggattttttttccatgtaagtgaacataaaaacatcttttccgggtgctttcttcatttgactttttcccgctagttcctttattctccatcactgatgtggaagcagacctggggtgggtttgctaatcctgccacttgtgctgcccccaggcgatgatcagagaactgaaacgttttcccatcatgctcatctgccctggctgttgtcttccacctagtggggccagtgtaggttgtgtagagcctcagagtgggaaacaggatgagctgtgattctgccaccgtctcagggcatgactttgggcaagtcggcctctgtctctcaaggagattgggataagacaagcatagtattggctaccagtcattaaatatcagacttctgatatat

SEQ ID NO: 351 - DNA, 3885 bp, Homo sapiens
  misc_feature (1)...(3885): n = A,T,C or G, or insertion/deletion polymorphism (see Tables 1-2)
caatgtacacactttatttgtatattaaacaagtagaaatatgtttttccccatctttctttaaacatgttcttctccccatatatcttctgtttacccatttttaacaggaacatgagcattcaacctattccattttttcttatatgcaaaggcagagtgcaactgtgataggggcaattgattcttagctttggttttggggacaatatggggtggtgggaactacggcaaactggacagtactgccttagctgaaggcagcagcccctattcaatgccaatcaattgttggcacagagaatgcaggccttatgtcgccaggttttccaaaatttcaaaaagaatccagaagtctcaattttactgtgcaattctcttttattaggattatctctgctgcatttagttgtatgtatcccttatggcccccaggcaggtccactcctgggcattcaagtcggtccatgtgtcaggcgtgcagggtgggtcacagcatctaggagctcagtgcagcttgggactttgggacatacgctccacctctctgagcctcagtctccttgtccatcatataaggaaatcactgattccagccttcctgggctgtggagaggattccctcagcggctgtgaaagagtgctttcttgcgsgtcagccccgacaggacagacttaagggcgggagggagcccatcccgcttgccccaacgaacgcgggcgcggggctttcctckcaggttacataaggcagccgcgggtggaggcagcagaggcgagcgcacgtccgtcgagggggaaaggggcgtggggaggcggccggggcggccggtatcccccgggcgtgagtgcgcagcgcgcgggggagcgcagggcgcggcggagtcgggtttcagagcgcgggtgactcggggcgcgggccgggagccgggattctgcccgccgccgccgctgccgagcgccgcctttgttccctgcaggaagggcgagcgcggcggccagcgctcagcgacccttcgtcctccgctaagctccaacgctctgctcgactagccgcgcgccttccggggctccgcagacccgcgagatggcaccaaggaggaacaacgggcagtgctggtgtctgctgatgctgctctcggtctccacgcccctccctgctgtcacccagacccgcggtgcgacagagactgcttcccagggtcacctggacctcacgcagctcatcggtgwcccgctgccctcgtccgtatcctttgtcacaggctatggtggcttcccggcctacagtttcgggcctggtgccaatgttggccgcccagccaggactctcatcccatccaccttcttcagggacttcgccatcagcgtcgtggtgaagcccagcagcacccgtggtggcgtgctcttcgccatcactgacgccttccagaaggtcatctacctgggcctgcggctctcaggtgtggaggacggccaccagcggatcatcctctactacacggagccaggctcccatgtgtcccaagaggctgctgccttctcggtgcctgtgatgacccacaggtggaaccrcttcgccatgattgtccagggtgaggaagtgaccctcctcgtgaactgtgaggagcacagccgcatccccttccagcggtcctcccaggctttggcttttgagtccagcrctggaatcttcntgggcaatgcaggagctacagggctcgagagattcactggctccctccagcagctcaccgtgcaccccgaccccaggactcccgaggagctgtgtgaccctgaagagtcctcggcatctggagagaccagtgggctgcaggaggcagacggagtagctgagatcttagaagccgtcacctacactcaagcctcgcccaaagaagcaaaagttgaacccataaacacacctccaactccatcctccccctttgaagacatggaactttctggtgaacctgtacccgaggggaccctggaaaccaccaacatgagcatcatccagcacagcagccccaaacaaggcaaggtctggtgagatcctgaatgacacactggagggggttcattctgtggatggtgaccccattactgacagcggctcaggggctggggccttccttgacattgctgaagaaaagaatttagcagcaacagcagcggggctggccgaggtgcccatcagcactgctggagaagcagaggccagcagtgtgcccaccgggggaccaaccctctctatgtccacggagaacccagaggaaggggtcactccaggtccagataatgaagagcgtttagcagcaacagcagcaggggaggccgaggcactcgccagcatrcctggggaagtggaggccagtggtgtggcccccggggagctggacctctccatgtccgcccagagcctcrgggaagaggccactgtgggtccaagcagtgaagacagtttaacaacagctgcagctgcaaccgaagtgtccctcagtacttttgaggatgaggaagccagtggggtccccacagatggcctggctcccctcacagccaccatggcccctgagcgggcagtcacttctggtcctgntgatgamgaagacttggcagcagccacaacagaggagcccctcatcacagctgggggtgaagagtccggcagccctccccstgatgggccaccgctgcccctgcccacagtggctcctgaaagatggatcactccagctcaaagagaacatgtgggaatgaaaggacaggctgggcccaaaggagaaaagggtgatgctggggaggagcttcctggccctcctgaaccttctgggcctgttggacccacggcaggagcagaagcrgagggctctggcctaggctggggctcggacgtcggctctggctctggtgacctggtgggcagtgagcagctgctgagaggtcctccaggacccccagggccacctggcttacctgggattccaggaaaaccaggaactgatgttttcatgggaccccctggatctcctggagaggatggacctgctggtgaacctgggcccccgggccctgagggacagcctggagttgatggagccaccggccttcccgggatgaaaggggagaagggagcaagagggcctaatggctcagttggtgaaaagggtgaccctggcaacagaggcttacctggacccccggggaaaaagggacaagctggccctcctggggtcatgggacccccagggcctcctggaccccctgggcccccaggccctggatgcacaatgggacttggattcgaggataccgaaggctctggaagcacccagctattgaatgaacccaaactstccagaccaacggctgcaattggtctcaaaggagagaaaggagaccggggacccaagggagaaagggggatggatggagccagtattgtgggaccccctgggccgagrgggccacctgggcacatcaaggtcttgtctaattccttgatcaatatcacccatggattcatgaatttctcggacattcctgagctggtggggcctccggggcyggacgggttgcctgggctgccaggatttccagtaagtaccaccctcgctgtcttctatctgtgccccgtggctgcgatcattctgttccttccacctagaatggcatttcctccatctatgcatgactgagctccaggggcatcttgttcattaactttttcttgatatttttgatagggycctagaggaccaaaaggtgacactggtttacctggcyttccaggactaaaaggagaacagcagggcgagaagggagagccgggtgccatcctgacagaggacattcctctggaaaggctgatggggaaaaagg

SEQ ID NO: 352 - DNA, 5465 bp, Homo sapiens
ttatatccgtggtttcctgctacctccaaccatgggccttttkggaatactttgttttttaatcttcctggggaaaacctggggayaggagcaaacatatgtcatttcagcaccaaaaatattccgtgttggagcatctgaaaatattgtgattcaagtttatggatacactgaagcatttgatgcaacaatctctattaaaagttatcctgataaaaaatttagttactcctcaggccatgttcatttatcctcagagaataaattycaaaactctgcaatcttaacaatacaaccaaaacaattgcctggaggacaaaacccagtttcttatgtgtatttggaagttgtatcaaagcatttttcaaaatcaaaaagaatgccaataacctatgacaatggatttctcttcattcatacagacaaacctgtttatactccagaccagtcagtaaaagttagagtttattcgttgaatgacgacttgaagccagccaaaagagaaactgtcttaactttcatagatcctgaaggatcagaagttgacatggtagaagaaattgatcatattggaattatctcttttcctgacttcaagattccgtctaatcctagatatggtatgtggacgatcaaggctaaatataaagaggacttttcaacaactggaaccgcatattttgaagttaaagaatatgtcttgccacatttttctgtctcaatcgagccagaatataatttcattggttacaagaactttaagaattttgaaattactataaaagcaagatatttttataataaagtagtcactgaggctgacgtttatatcacatttggaataagagaagacttaaaagatgatcaaaaagaaatgatgcaaacagcaatgcaaaacacaatgttgataaatggaattgctcaagtcacatttgattctgaaacagcagtsaaagaactgtcatactacagtttagaagatttaaacaacaagtacctttatattgctgtaacagtcatagagtctacaggtggattttctgaagaggcagaaatacctggcatcaaatatgtcctctctccctacaaamtgaatttggttgctactcctcttttcctgaagcctgggattccatatcccatcaaggtgcaggttaaagattcgcttgaccagttggtaggaggrgtcccagtaacactgaatgcacaaacaattgatgtaaaccaagagacatctgacttggatccaagcaaaagtgtaacacgtgttgatgatggagtagcttcctttgtgcttaatctcccatctggagtgacggtgctggagtttaatgtcaaaactgatgctccagatcttccagaagaaaatcaggccrgggaaggttaccgagcaatagcatactcatctctcagccaaagttacctttatattgattggactgataaccataaggctttgctagtgggagaacatctgaatattattgttacycccaaaagcccatatattgayaaaataactcactataattacttgattttatccaagggcaaaattatccaytttggcacgagggagaaattttcagatgcatcttatcaaagtataaacattccagtaacacagaacatggttccttcatcccgacttctggtctattayatcgtcacaggagaacagacagcagaattagtgtctgattcagtctggttaaatattgaagaaaaatgtggcaaccagctccaggttcatctrtctcctgatgcagatgcatattctccaggccaaactgtgtctcttaatatggcaactggaatggattcctgggtggcattagcagcagtggacagtgctgtgtatggagtccaaagaggagccaaaaagcccttggaaagagtatttcaattcttagagaagagtgatctgggctgtggggcaggtggtggcctcaacaatgccaatgtgttccacctagctggacttaccttcctcactaatgcaaatgcagatgactcccaagaaaatgatgaaccttgtaaagaaattctcaggccaagaagaacgctgcaaaagaagatagaagaaatagctgctaaatataaacattcagtagtgaagaaatgttgttacgatggagcctgcgttaataatgatgaaacctgtgagcagcgagctgcacggattagtttagggccaagatgcatcaaagctttcactgaatgttgtgtcgtcgcaagccagctccgtgctaatatctctcataaagacatgcaattgggaaggctacacatgaagaccctgttaccagtaagcaagccagaaattcggagttattttccagaaagctggttgtgggaagttcatcttgttcccagaagaaaacagttgcagtttgccctacctgattctctaaccacctgggaaattcaaggcrttggcatttcaaacactggtatatgtgttgctgatactgtcaaggcaaaggtgttcaaagatgtcttcctggaaatgaatataccatattctgttgtacgaggagaacagatccaattgaaaggaactgtttacaactataggacttctgggatgcagttctgtgttaaaatgtctgctgtggagggaatctgcacttcggaaagcccagtcattgatcatcagggcacaaagtcctccaaatgtgtgcgccagaaagtagagggctcctccagtcacttggtgacattcactgtgcttcctctggaaattggccttcacaacatcaatttttcactggagacttggtttggaaaagaaatcttagtaaaaacattacgagtggtgccagaaggtgtcaaaagggaaagctattctggtgttactttggatcctaggggtatttatggtaccattagcagacgaaaggagttcccatacaggatacccttagatttggtccccaaaacagaaatcaaaaggattttgagtgtaaaaggactgcttgtaggtgagatcttgtctgcagttctaagtcaggaaggcatcaatatcctaacccacctccccaaagggagtgcagaggyggagctgatgagcgttgtcccagtattctatgtttttcactacctggaaacaggaaatcattggaacatttttcattctgacccattaattgaaaagcagaaactgaagaaaaaattaaaagaagggatgttgagcattatgtcctacagaaatgctgactactcttacagtgtgtggaagggtggaagtgctagcacttggttaacagcttttgctttaagagtacttggacaagtaaataaatacgtagagcagaaccaaaattcaatttgtaattctttattgtggctagttgagaattatcaattagataatggatctttcaaggaaaattcacagtatcaaccaataaaattacagggtaccttgcctgttgaagcccgagagaacagcttatatcttacagcctttactgtgattggaattagaaaggctttcgatatatgccccctggtgaaaatcgacacagctctaattaaagctgacaactttctgcttgaaaatacactgccagcccagagcacctttacattggccatttctgcgtatgctctttccctgggagataaaactcacccacagtttcgttcaattgtttcagctttgaagagagaagctttggttaaaggtaatccacccatttatcgtttttggaaagacaatcttcagcataaagacagctctgtacctaacactggtacggcacgtatggtagaaacaactgcctatgctttactcaccagtctgaacttgaaagatataaattatgttaacccagtcatcaaatggctatcagaagagcagaggtatggaggtggcttttattcaacccaggacacaatcaatgccattgagggcctgacggaatattcactcctggttaaacaactccgcttgartatggacatcgatgtttyttacaagcataaaggtgccttacataattataaaatgacagacaagaatttccttgggaggccagtagaggtgcttctcaatgatgacctcattgtcagtacaggatttggcagtggcttggctacagtacatgtaacaactgtakttcacaaaaccagtacctctgaggaagtttgcagcttttatttgaaaatcgatactcaggatattgaagcatcccactacagaggctacggaaactctgattacaaacgcatagtagcatgtgccagctacaagcccagcagggaagaatcatcatctggatcctctcatgcrgtgatggacatctccttgcctactggaatcagtgcaaatgaagaagacttaaaagcccttgtggaaggggtggatcaactattcactgattaccaaatcaaagatggacatgttattctgcaactgaattcgattccctccagtgatttcctttgtgtacgattccggatatttgaactctttgaagttgggtttctcagtcctgccactttcacagtgtacgaataccacagaccagataaacagtgtaccatgttttatagcacttccaatatcaaaattcagaaagtctgtgaaggagccgcgtgcaagtgtgtagaagctgattgtgggcaaatgcaggaagaattggatctgacaatctctgcagagacaagaaaacaaacagcatgtaaaccagagattgcatatgcttataaagttagcatcacatccatcactgtagaaaatgtttttgtcaagtacaaggcaacccttctggatatctacaaaactggggaagctgttgctgagaaagactctgagattaccttcattaaaaaggtaacctgtactaacgctgagctggtaaaaggaagacagtacttaattatgggtaaagaagccctccagataaaatacaatttcagtttcaggtacatctaccctttagattccttgacctggattgaatactggcctagagacacaacatgttcatcgtgtcaagcatttttagctaatttagatgaatttgccgaagatatctttttaaatggatgctaaaattcctgaagttcagctgcatacagtttgcacttatggactcctgttgttgaagttcgtttttttgttttcttctttttttaaacattcatagctggtcttatttgtaaagctcactttacttagaattagtggcacttgcttttattagagaatgatttcaaatgctgtaactttctgaaataacatggccttggagggcatgaagacagatactcctccaaggttattggacaccggaaacaataaattggaacacctcctcaaacctaccactcaggaatgtttgctggggccgaaagaacagtccattgaaagggagtattacaaaaacatggcctttgcttgaaagaaaataccaaggaacaggaaactgatcattaaagcctgagtttgctttcaa

SEQ ID NO: 353 - DNA, 4517 bp, Homo sapiens
cggcggttgggctgcgggtcagagcactgtccggtggtgcccaggaggagtaggagcaggagcagaagcagaagcggggtccggagctgcgcgcctacgcgggacctgtgtccgaaatgccggtgcgaggagaccgcgggtttccaccccggcgggagctgtcaggttggctccgcgccccaggcatggaagagctgatatgggaacagtacactgtgaccctacaaaaggattccaaaagaggatttggaattgcagtgtccggaggcagagacaacccccactttgaaaatggagaaacgtcaattgtcatttctgatgtgctcccgggtgggcctgctgatgggctgctccaagaaaatgacagagtggtcatggtcaatggcacccccatggaggatgtgcttcattcgtttgcagttcagcagctcagaaaaagtgggaaggtcgctgctattgtggtcaagaggccccggaaggtccaggtggccgcacttcaggccagccctcccctggatcaggatgaccgggcttttgaggtgatggacgagtttgatggcagaagtttccggagtggctacagcgagaggagccggctgaacagccatggggggcgcagccgcagctgggaggacagcccggaaagggggcgtccccatgagcgggcccggagccgggagcgggacctcagccgggaccggagccgtggccggagcctggagcggggcctggaccaagaccatgcgcgcacccgagaccgcagccgtggccggagcctggagcggggcctggaccacgactttgggccatcccgggaccgggaccgtgaccgcagccgcggccggagcattgaccaggactacgagcgagcctatcaccgggcctacgacccagactacgagcgggcctacagcccggagtacaggcgcggggcccgccacgatgcccgctctcggggaccccgaagccgcagccgcgagcacccgcactcacggagccccagccccgagcctagggggcggccggggcccatcggggtcctcctgatgaaaagcagagcgaacgaagagtatggtctccggcttgggagtcagatcttcgtaaaggaaatgacccgaacgggtctggcaactaaagatggcaaccttcacgaaggagacataattctcaagatcaatgggactgtaactgagaacatgtctttaacggatgctcgaaaattgatagaaaagtcaagaggaaaactacagctrgtggtgttgagagacagccagcagaccctcatcaacatcccgtcattaaatgacagtgactcagaaatagaagatatttcagaaatagagtcaaaccgatcattttctccagaggagagacgtcatcagtattctgattatgattatcattcctcaagtgagaagctgaaggaaaggccaagttccagagaggacacgccgagcagattgtcyaggatgggtgcgacacccactccctttaagtccacaggggatattgcaggcacagttgtcccagagaccaacaaggaacccagataccaagaggamcccccagctcctcaaccaaaagcagccccgaraacttttcttcgtcctagtcctgaagatgaagcaatatatggccctaataccaaaatggtaaggttcaagaagggagacagcgtgggcctccggttggctggtggcaatgatgtcgggatatttgttgctggcattcaagaagggacctcggcggagcaggagggccttcaagaaggagaccagattctgaaggtgaacacacaggatttcagaggattagtgcgggaggatgccgttctctacctgttagaaatccctaaaggtgaaatggtgaccattttagctcagagccgagccgatgtgtatagagacatcctggcttgtggcagaggggattcgttttttataagaagccactttgaatgtgagaaggaaactccacagagcctggccttcaccagaggggaggtcttccgagtggtagacacactgtatgayggcaagctgggcaactggctggctgtgaggattgggaacgagttggagaaaggcttaatccccaacaagagcagagctgaacaaatrgccagtgttcaaaatgcccagagagacaacgctggggaccgggcagatttctggagaatgcgtggccagaggtctggggtgaagaagaacctgaggaaaagtcgggaagacctcacagctgttgtgyctgtcagcaccaagttcccagcttatgagagggttttgctgcgagaagctggtttcaagagacctgtggtcttattcggccccatagctgatatagcaatggaaaaattggctaatgagttacctgactggtttcaaactgctaaaacggaaccaaaagatgcaggatctgagaaatccactggagtggtccggttaaataccgtgaggcaaattattgaacaggataagcatgcactactggatgtgactccgaaagctgtggacctgttgaattacacccagtggttcccaattgtgatttttttcaacccagactccagacaaggtgtcaamaccatgagacaaaggttaratccaacgtccaacaawagttctcgaaagttatttgatcamgccaacaagcttaaaaaaacgtgtgcacacctttttacagctacaatcaacctaaattcagccaatgatagctggtttggcagcttaaaggacactattcagcatcagcaaggagaagcggtttgggtctctgaaggaaagatggaagggatggatgatgaccccgaagaccgcatgtcctacttaacygccatgggcgcrgactatctgagttgcgacagccgcctcatcagtgactttgaagacacggacggtgaaggaggcgcctacactgacaatgagcyggatgagccagccgaggagccgctggtgtcgtccatcacccgctcctcggagccggtgcagcacgaggagagcataaggaaacccagcccagagccacgagctcagatgaggagggctgctagcagcgatcaacttagggacaatagcccgcccccagcattcaagccagagccgcccaaggccaaaacccagaacaaagaagaatcctatgacttctccaaatcctatgaatataagtcaaacccctctgccgttgctggtaatgaaactcctggggcatctaccaaaggttatcctcctcctgttgcagcaaaacctacctttgggcggtctatactgaagccctccactcccatccctcctcaagagggtgaggaggtgggagagagcagtgaggagcaagataatgctcccaaatcagtcctgggcaaagtcaaaatatttgagaagatggatcacaaggccaggttacagagaatgcaggagctccaggaagcacagaatgcaaggatcgaaattgcccagaagcaycctgatatctatgcagttccaatcaaaacgcacaagccagaccctggcacgccccagcacacgagttccagaccccctgagccacagaaagctccttccagaccttatcaggataccagaggaagttatggcagtgatgccgaggaggaggagtaccgccagcagctgtcagaacactccaagcgcggttactatggccagtctgcccgataccgggacacagaattatagatgtctgagcacggactctcccaggcctgcctgcatggcatcagactagccactcctgccaggccgccgggatggttcttctccagttagaatgcaccatggagacgtggtgggactccagctcgtgtgtcctcatggagaacccaggggacagctggtgcaaattcagaactgagggctctrtttgtgggactgggttagaggagtctgtggctttttgttcagaattaagcagaacactgcagtcagatcctgttacttgcttcagtggaccgaaatctgtattctgtttgcgtacttgtaatatgtatattaagaagcaataactatttttcctcattaatagctgccttcaaggactgtttcagtgtgagtcagaatgtgaaaaakgaataaaaaatactgttgggctcaaactaaattcaaagaagtactttattgcaactcttttaagtgccttggatgagaagtgtcttaaattttcttcctttgaagctttaggcagagccataatggactaaaacattttgactaagtttttataccagcttaatagctgtagttttccctgcactgtgtcatcttttcaaggcatttgtctttgtaatattttccataawtttggactgtctatatcataactatacttgatagtttggctataagtgytcaatagcttgaagcccaagaagttggtatcgaaatttgttgtttgtttaaacccaagtrctgcacaaaagcagatacttgaggaaaacactatttccaaaagcacatgtattgacaacagttttataatttaataaaaaggaatacattgcaatccgt

SEQ ID NO: 354 - DNA, 4358 bp, Homo sapiens
cggcggttgggctgcgggtcagagcactgtccggtggtgcccaggaggagtaggagcaggagcagaagcagaagcggggtccggagctgcgcgcctacgcgggacctgtgtccgaaatgccggtgcgaggagaccgcgggtttccaccccggcgggagctgtcaggttggctccgcgccccaggcatggaagagctgatatgggaacagtacactgtgaccctacaaaaggattccaaaagaggatttggaattgcagtgtccggaggcagagacaacccccactttgaaaatggagaaacgtcaattgtcatttctgatgtgctcccgggtgggcctgctgatgggctgctccaagaaaatgacagagtggtcatggtcaatggcacccccatggaggatgtgcttcattcgtttgcagttcagcagctcagaaaaagtgggaaggtcgctgctattgtggtcaagaggccccggaaggtccaggtggccgcacttcaggccagccctcccctggatcaggatgaccgggcttttgaggtgatggacgagtttgatggcagaagtttccggagtggctacagcgagaggagccggctgaacagccatggggggcgcagccgcagctgggaggacagcccggaaagggggcgtccccatgagcgggcccggagccgggagcgggacctcagccgggaccggagccgtggccggagcctggagcggggcctggaccaagaccatgcgcgcacccgagaccgcagccgtggccggagcctggagcggggcctggaccacgactttgggccatcccgggaccgggaccgtgaccgcagccgcggccggagcattgaccaggactacgagcgagcctatcaccgggcctacgacccagactacgagcgggcctacagcccggagtacaggcgcggggcccgccacgatgcccgctctcggggaccccgaagccgcagccgcgagcacccgcactcacggagccccagccccgagcctagggggcggccggggcccatcggggtcctcctgatgaaaagcagagcgaacgaagagtatggtctccggcttgggagtcagatcttcgtaaaggaaatgacccgaacgggtctggcaactaaagatggcaaccttcacgaaggagacataattctcaagatcaatgggactgtaactgagaacatgtctttaacggatgctcgaaaattgatagaaaagtcaagaggaaaactacagctrgtggtgttgagagacagccagcagaccctcatcaacatcccgtcattaaatgacagtgactcagaaatagaagatatttcagaaatagagtcaaaccgatcattttctccagaggagagacgtcatcagtattctgattatgattatcattcctcaagtgagaagctgaaggaaaggccaagttccagagaggacacgccgagcagattgtcyaggatgggtgcgacacccactccctttaagtccacaggggatattgcaggcacagttgtcccagagaccaacaaggaacccagataccaagaggamcccccagctcctcaaccaaaagcagccccgaraacttttcttcgtcctagtcctgaagatgaagcaatatatggccctaataccaaaatggtaaggttcaagaagggagacagcgtgggcctccggttggctggtggcaatgatgtcgggatatttgttgctggcattcaagaagggacctcggcggagcaggagggccttcaagaaggagaccagattctgaaggtgaacacacaggatttcagaggattagtgcgggaggatgccgttctctacctgttagaaatccctaaaggtgaaatggtgaccattttagctcagagccgagccgatgtgtatagagacatcctggcttgtggcagaggggattcgttttttataagaagccactttgaatgtgagaaggaaactccacagagcctggccttcaccagaggggaggtcttccgagtggtagacacactgtatgayggcaagctgggcaactggctggctgtgaggattgggaacgagttggagaaaggcttaatccccaacaagagcagagctgaacaaatrgccagtgttcaaaatgcccagagagacaacgctggggaccgggcagatttctggagaatgcgtggccagaggtctggggtgaagaagaacctgaggaaaagtcgggaagacctcacagctgttgtgyctgtcagcaccaagttcccagcttatgagagggttttgctgcgagaagctggtttcaagagacctgtggtcttattcggccccatagctgatatagcaatggaaaaattggctaatgagttacctgactggtttcaaactgctaaaacggaaccaaaagatgcaggatctgagaaatccactggagtggtccggttaaataccgtgaggcaaattattgaacaggataagcatgcactactggatgtgactccgaaagctgtggacctgttgaattacacccagtggttcccaattgtgatttttttcaacccagactccagacaaggtgtcaamaccatgagacaaaggttaratccaacgtccaacaawagttctcgaaagttatttgatcamgccaacaagcttaaaaaaacgtgtgcacacctttttacagctacaatcaacctaaattcagccaatgatagctggtttggcagcttaaaggacactattcagcatcagcaaggagaagcggtttgggtctctgaaggaaagatggaagggatggatgatgaccccgaagaccgcatgtcctacttaacygccatgggcgcrgactatctgagttgcgacagccgcctcatcagtgactttgaagacacggacggtgaaggaggcgcctacactgacaatgagcyggatgagccagccgaggagccgctggtgtcgtccatcacccgctcctcggagccggtgcagcacgaggagagcataaggaaacccagcccagagccacgagctcagatgaggagggctgctagcagcgatcaacttagggacaatagcccgcccccagcattcaagccagagccgcccaaggccaaaacccagaacaaagaagaatcctatgacttctccaaatcctatgaatataagtcaaacccctctgccgttgctggtaatgaaactcctggggcatctaccaaaggttatcctcctcctgttgcagcaaaacctacctttgggcggtctatactgaagccctccactcccatccctcctcaagagggtgaggaggtgggagagagcagtgaggagcaagataatgctcccaaatcagtcctgggcaaagtcaaaatatttgagaagatggatcacaaggccaggttacagagaatgcaggagctccaggaagcacagaatgcaaggatcgaaattgcccagaagcaycctgatatctatgcagttccaatcaaaacgcacaagccagaccctggcacgccccagcacacgagttccagaccccctgagccacagaaagctccttccagaccttatcaggataccagaggaagttatggcagtgatgccgaggaggaggagtaccgccagcagctgtcagaacactccaagcgcggttactatggccagtctgcccgataccgggacacagaattatagatgtctgagcacggactctcccaggcctgcctgcatggcatcagactagccactcctgccaggccgccgggatggttcttctccagttagaatgcaccatggagacgtggtgggactccagctcgtgtgtcctcatggagaacccaggggacagctggtgcaaattcagaactgagggctctrtttgtgggactgggttagaggagtctgtggctttttgttcagaattaagcagaacactgcagtcagatcctgttacttgcttcagtggaccgaaatctgtattctgtttgcgtacttgtaatatgtatattaagaagcaataactatttttcctcattaatagctgccttcaaggactgtttcaggtgccttggatgagaagtgtcttaaattttcttcctttgaagctttaggcagagccataatggactaaaacattttgactaagtttttataccagcttaatagctgtagttttccctgcactgtgtcatcttttcaaggcatttgtctttgtaatattttccataawtttggactgtctatatcataactatacttgatagtttggctataagtgytcaatagcttgaagcccaagaagttggtatcgaaatttgttgtttgtttaaacccaagtrctgcacaaaagcagatacttgagga

SEQ ID NO: 355 - DNA, 3917 bp, Homo sapiens
cggcggttgggctgcgggtcagagcactgtccggtggtgcccaggaggagtaggagcaggagcagaagcagaagcggggtccggagctgcgcgcctacgcgggacctgtgtccgaaatgccggtgcgaggagaccgcgggtttccaccccggcgggagctgtcaggttggctccgcgccccaggcatggaagagctgatatgggaacagtacactgtgaccctacaaaaggattccaaaagaggatttggaattgcagtgtccggaggcagagacaacccccactttgaaaatggagaaacgtcaattgtcatttctgatgtgctcccgggtgggcctgctgatgggctgctccaagaaaatgacagagtggtcatggtcaatggcacccccatggaggatgtgcttcattcgtttgcagttcagcagctcagaaaaagtgggaaggtcgctgctattgtggtcaagaggccccggaaggtccaggtggccgcacttcaggccagccctcccctggatcaggatgaccgggcttttgaggtgatggacgagtttgatggcagaagtttccggagtggctacagcgagaggagccggctgaacagccatggggggcgcagccgcagctgggaggacagcccggaaagggggcgtccccatgagcgggcccggagccgggagcgggacctcagccgggaccggagccgtggccggagcctggagcggggcctggaccaagaccatgcgcgcacccgagaccgcagccgtggccggagcctggagcggggcctggaccacgactttgggccatcccgggaccgggaccgtgaccgcagccgcggccggagcattgaccaggactacgagcgagcctatcaccgggcctacgacccagactacgagcgggcctacagcccggagtacaggcgcggggcccgccacgatgcccgctctcggggaccccgaagccgcagccgcgagcacccgcactcacggagccccagccccgagcctagggggcggccggggcccatcggggtcctcctgatgaaaagcagagcgaacgaagagtatggtctccggcttgggagtcagatcttcgtaaaggaaatgacccgaacgggtctggcaactaaagatggcaaccttcacgaaggagacataattctcaagatcaatgggactgtaactgagaacatgtctttaacggatgctcgaaaattgatagaaaagtcaagaggaaaactacagctrgtggtgttgagagacagccagcagaccctcatcaacatcccgtcattaaatgacagtgactcagaaatagaagatatttcagaaatagagtcaaaccgatcattttctccagaggagagacgtcatcagtattctgattatgattatcattcctcaagtgagaagctgaaggaaaggccaagttccagagaggacacgccgagcagattgtcyaggatgggtgcgacacccactccctttaagtccacaggggatattgcaggcacagttgtcccagagaccaacaaggaacccagataccaagaggamcccccagctcctcaaccaaaagcagccccgaraacttttcttcgtcctagtcctgaagatgaagcaatatatggccctaataccaaaatggtaaggttcaagaagggagacagcgtgggcctccggttggctggtggcaatgatgtcgggatatttgttgctggcattcaagaagggacctcggcggagcaggagggccttcaagaaggagaccagattctgaaggtgaacacacaggatttcagaggattagtgcgggaggatgccgttctctacctgttagaaatccctaaaggtgaaatggtgaccattttagctcagagccgagccgatgtgtatagagacatcctggcttgtggcagaggggattcgttttttataagaagccactttgaatgtgagaaggaaactccacagagcctggccttcaccagaggggaggtcttccgagtggtagacacactgtatgayggcaagctgggcaactggctggctgtgaggattgggaacgagttggagaaaggcttaatccccaacaagagcagagctgaacaaatrgccagtgttcaaaatgcccagagagacaacgctggggaccgggcagatttctggagaatgcgtggccagaggtctggggtgaagaagaacctgaggaaaagtcgggaagacctcacagctgttgtgyctgtcagcaccaagttcccagcttatgagagggttttgctgcgagaagctggtttcaagagacctgtggtcttattcggccccatagctgatatagcaatggaaaaattggctaatgagttacctgactggtttcaaactgctaaaacggaaccaaaagatgcaggatctgagaaatccactggagtggtccggttaaataccgtgaggcaaattattgaacaggataagcatgcactactggatgtgactccgaaagctgtggacctgttgaattacacccagtggttcccaattgtgatttttttcaacccagactccagacaaggtgtcaamaccatgagacaaaggttaratccaacgtccaacaawagttctcgaaagttatttgatcamgccaacaagcttaaaaaaacgtgtgcacacctttttacagctacaatcaacctaaattcagccaatgatagctggtttggcagcttaaaggacactattcagcatcagcaaggagaagcggtttgggtctctgaaggaaagatggaagggatggatgatgaccccgaagaccgcatgtcctacttaacygccatgggcgcrgactatctgagttgcgacagccgcctcatcagtgactttgaagacacggacggtgaaggaggcgcctacactgacaatgagcyggatgagccagccgaggagccgctggtgtcgtccatcacccgctcctcggagccggtgcagcacgaggagatcgaaattgcccagaagcaycctgatatctatgcagttccaatcaaaacgcacaagccagaccctggcacgccccagcacacgagttccagaccccctgagccacagaaagctccttccagaccttatcaggataccagaggaagttatggcagtgatgccgaggaggaggagtaccgccagcagctgtcagaacactccaagcgcggttactatggccagtctgcccgataccgggacacagaattatagatgtctgagcacggactctcccaggcctgcctgcatggcatcagactagccactcctgccaggccgccgggatggttcttctccagttagaatgcaccatggagacgtggtgggactccagctcgtgtgtcctcatggagaacccaggggacagctggtgcaaattcagaactgagggctctrtttgtgggactgggttagaggagtctgtggctttttgttcagaattaagcagaacactgcagtcagatcctgttacttgcttcagtggaccgaaatctgtattctgtttgcgtacttgtaatatgtatattaagaagcaataactatttttcctcattaatagctgccttcaaggactgtttcaggtgccttggatgagaagtgtcttaaattttcttcctttgaagctttaggcagagccataatggactaaaacattttgactaagtttttataccagcttaatagctgtagttttccctgcactgtgtcatcttttcaaggcatttgtctttgtaatattttccataawtttggactgtctatatcataactatacttgatagtttggctataagtgytcaatagcttgaagcccaagaagttggtatcgaaatttgttgtttgtttaaacccaagtrctgcacaaaagcagatacttgagga

SEQ ID NO: 356 - DNA, 4484 bp, Homo sapiens
tgcccaggaggagtaggagcaggagcagaagcagaagcggggtccggagctgcgcgcctacgcgggacctgtgtccgaaatgccggtgcgaggagaccgcgggtttccaccccggcgggagctgtcaggttggctccgcgccccaggcatggaagagctgatatgggaacagtacactgtgaccctacaaaaggattccaaaagaggatttggaattgcagtgtccggaggcagagacaacccccactttgaaaatggagaaacgtcaattgtcatttctgatgtgctcccgggtgggcctgctgatgggctgctccaagaaaatgacagagtggtcatggtcaatggcacccccatggaggatgtgcttcattcgtttgcagttcagcagctcagaaaaagtgggaaggtcgctgctattgtggtcaagaggccccggaaggtccaggtggccgcacttcaggccagccctcccctggatcaggatgaccgggcttttgaggtgatggacgagtttgatggcagaagtttccggagtggctacagcgagaggagccggctgaacagccatggggggcgcagccgcagctgggaggacagcccggaaagggggcgtccccatgagcgggcccggagccgggagcgggacctcagccgggaccggagccgtggccggagcctggagcggggcctggaccaagaccatgcgcgcacccgagaccgcagccgtggccggagcctggagcggggcctggaccacgactttgggccatcccgggaccgggaccgtgaccgcagccgcggccggagcattgaccaggactacgagcgagcctatcaccgggcctacgacccagactacgagcgggcctacagcccggagtacaggcgcggggcccgccacgatgcccgctctcggggaccccgaagccgcagccgcgagcacccgcactcacggagccccagccccgagcctagggggcggccggggcccatcggggtcctcctgatgaaaagcagagcgaacgaagagtatggtctccggcttgggagtcagatcttcgtaaaggaaatgacccgaacgggtctggcaactaaagatggcaaccttcacgaaggagacataattctcaagatcaatgggactgtaactgagaacatgtctttaacggatgctcgaaaattgatagaaaagtcaagaggaaaactacagctrgtggtgttgagagacagccagcagaccctcatcaacatcccgtcattaaatgacagtgactcagaaatagaagatatttcagaaatagagtcaacccgatcattttctccagaggagagacgtcatcagtattctgattatgattatcattcctcaagtgagaagctgaaggaaaggccaagttccagagaggacacgccgagcagattgtcyaggatgggtgcgacacccactccctttaagtccacaggggatattgcaggcacagttgtcccagagaccaacaaggaacccagataccaagaggamcccccagctcctcaaccaaaagcagccccgaraacttttcttcgtcctagtcctgaagatgaagcaatatatggccctaataccaaaatggtaaggttcaagaagggagacagcgtgggcctccggttggctggtggcaatgatgtcgggatatttgttgctggcattcaagaagggacctcggcggagcaggagggccttcaagaaggagaccagattctgaaggtgaacacacaggatttcagaggattagtgcgggaggatgccgttctctacctgttagaaatccctaaaggtgaaatggtgaccattttagctcagagccgagccgatgtgtatagagacatcctggcttgtggcagaggggattcgttttttataagaagccactttgaatgtgagaaggaaactccacagagcctggccttcaccagaggggaggtcttccgagtggtagacacactgtatgayggcaagctgggcaactggctggctgtgaggattgggaacgagttggagaaaggcttaatccccaacaagagcagagctgaacaaatrgccagtgttcaaaatgcccagagagacaacgctggggaccgggcagatttctggagaatgcgtggccagaggtctggggtgaagaagaacctgaggaaaagtcgggaagacctcacagctgttgtgyctgtcagcaccaagttcccagcttatgagagggttttgctgcgagaagctggtttcaagagacctgtggtcttattcggccccatagctgatatagcaatggaaaaattggctaatgagttacctgactggtttcaaactgctaaaacggaaccaaaagatgcaggatctgagaaatccactggagtggtccggttaaataccgtgaggcaagttattgaacaggataagcatgcactactggatgtgactccgaaagctgtggacctgttgaattacacccagtggttctcaattgtgatttctttcacgccagactccagacaaggtgtcaacaccatgagacaaaggttagacccaacgtccaacaatagttctcgaaagttatttgatcacgccaacaagcttaaaaaaacgtgtgcacacctttttacagctacaatcaacctaaattcagccaatgatagctggtttggcagcttaaaggacactattcagcatcagcaaggagaagcggtttgggtctctgaaggaaagatggaagggatggatgatgaccccgaagaccgcatgtcctacttaacygccatgggcgcrgactatctgagttgcgacagccgcctcatcagtgactttgaagacacggacggtgaaggaggcgcctacactgacaatgagcyggatgagccagccgaggagccgctggtgtcgtccatcacccgctcctcggagccggtgcagcacgaggagagcataaggaaacccagcccagagccacgagctcagatgaggagggctgctagcagcgatcaacttagggacaatagcccgcccccagcattcaagccagagccgtccaaggccaaaacccagaacaaagaagaatcctatgacttctccaaatcctatgaatataagtcaaacccctctgccgttgctggtaatgaaactcctggggcatctaccaaaggttatcctcctcctgttgcagcaaaacctacctttgggcggtctatactgaagccctccactcccatccctcctcaagagggtgaggaggtgggagagagcagtgaggagcaagataatgctcccaaatcagtcctgggcaaagtcaaaatatttggagaagatggatcacaagggccagggttacaagagaatgcaggagctccaggaagcacagaatgcaaggatcgaaattgcccagaygcatcctgatatctatgcagttccaatcaaaacgcacaagccagaccctggcacgccccagcacacgagttccagaccccctgagccacagaaagctccttccagaccttatcaggataccagaggaagttatggcagtgatgccgaggaggaggagtaccgccagcagctgtcagaacactccaagcgcggttactatggccagtctgcccgataccgggacacagaattatagatgtctgagcacggactctcccaggcctgcctgcatggcatcagactagccactcctgccaggccgccgggatggttcttctccagttagaatgcaccatggagacgtggtgggactccagctcgtgtgtcctcatggagaacccaggggacagctggtgcaaattcagaactgagggctctrtttgtgggactgggttagaggagtctgtggctttttgttcagaattaagcagaacactgcagtcagatcctgttacttgcttcagtggaccgaaatctgtattctgtttgcgtacttgtaatatgtatattaagaagcaataactatttttcctcattaatagctgccttcaaggactgtttcagtgtgagtcagaatgtgaaaaakgaataaaaaatactgttgggctcaaactaaattcaaagaagtactttattgcaactcttttaagtgccttggatgagaagtgtcttaaattttcttcctttgaagctttaggcagagccataatggactaaaacattttgactaagtttttataccagcttaatagctgtagttttccctgcactgtgtcatcttttcaaggcatttgtctttgtaatattttccataawtttggactgtctatatcataactatacttgatagtttggctataagtgytcaatagcttgaagcccaagaagttggtatcgaaatttgttgtttgtttaaacccaagtrctgcacaaaagcagatacttgaggaaaacactatttccaaaagcacatgtattgacaacagttttataatttaataaaaaggaatacattgcaatccgt

SEQ ID NO: 357 - DNA, 1967 bp, Homo sapiens
cctggcaggaarcgagggtgcggcgcaatccggagaggacgccaggacgacgcccgagttccctttcaggctagaactcttcctttttctagcttggggtagaaggcggagccggagccccggaacccccgccctcggggtgcgaggcggcagcagggccgtcccctacatttgcatagcccctgggacgtggcgctgcacccaagcctcttctcagttggagggaactccaagtcccacagtgccacggggtggggtgcgtcactttcgctgcgttggaggctgaggagaattgagcctgggaggcgggtccggagagggctatggaaagccgccggcggggaatcccggccgtagagggacagtggataggtgcccgaggcctacagctggcctggggctcgtgtctgggcttcggacgttggggcccggtggcccaccctttccgtagttgtcccaratggagctggaattggatgctggtgaccaagacctgctggccttcctgctagaggaaagtgaagatttggggacggcacccgatgaggccgtgagggccccactggactgggcgctgccgctttctgaggtaccgagcgactgggaagtagatgatttgctgtgctccctgctgagtcccccagcgtcgttgaacattctcagctcctccaacccctgccttgtccaccatgaccacacctactccctcccacgggaaactgtctctatggatctagagagtgagagctgtagaaaagaggggacccagatgactccacagcatatggaggagctggcagagcaggagattgctaggctagtactgacagatgaggagaagagtctattggagaaggaggggcttattctgcctgagacacttcctctcactaagacagaggaacaaattctgaaacgtgtgcggaggaagattcgaaataaaagatctgctcaagagagccgcaggaaaaagaaggtgtatgttgggggtttagagagcagggtcttgaaatacacagcccagaatatggagcttcagaacaaagtacagcttctggaggaacagaatttgtcccttctagatcaactgaggaaactccaggccatggtgattgagatatcaaayaaaaccagcagcagcagcacctgcatcttggtcctactagtctccttctgcctcctccttgtacctgctatgtactcctctgacacaagggggagcctgccagctgagcatggagtgttgtcccgccagcttcgtgccctccccagtgaggacccttaccagctggagctgcctgccctgcagtcagaagtgccgaaagacagcacacaccagtggttggacggctcagactgtgtactccaggcccctggcaacacttcctgcctgctgcattacatgcctyaggctcccagtgcagagcctcccctggagtggccattccctgacctcttctcagagcctctctgccgaggtcccatcctccccctgcaggcaaatctcacaaggaagggaggatggcttcctactggtagcccctctgtcattttgcaggacagatactcaggctagatatgaggatatgtggggggtctcagcaggagcctggggggctccccatctgtgtccaaataaaaagcggtgggcaagggctggccgcagctcctgtgccctgtcaggacgactgagggctcaaacmcmccacacttaatggctttctgggtcttttatttgtacccatgtgtctgtcacaccatgaatgtacctggggaaatcaactgacctccctgaacatttcacgcagtcagggaacaggtgaggaaagaaataaataagtgattctaatgctgcctaggtcaccctcaacccccatttactggcacarttgggtggagagaagggaaggggtatgattgtcctgatggctcagggttgcaggaggttcagaggggaaggaggaaag

SEQ ID NO: 358 - DNA, 2137 bp, Homo sapiens
cctggcaggaarcgagggtgcggcgcaatccggagaggacgccaggacgacgcccgagttccctttcaggctagaactcttcctttttctagcttggggtagaaggcggagccggagccccggaacccccgccctcggggtgcgaggcggcagcagggccgtcccctacatttgcatagcccctgggacgtggcgctgcacccaagcctcttctcagttggagggaactccaagtcccacagtgccacggggtggggtgcgtcactttcgctgcgttggaggctgaggagaattgagcctgggaggcgggtccggagagggctatggaaagccgccggcggggaatcccggccgtagagggacagtggataggtgcccgaggcctacagctggcctggggctcgtgtctgggcttcggacgttggggcccggtggcccaccctttccgtagttgtcccaratggagctggaattggatgctggtgaccaagacctgctggccttcctgctagaggaaagtgaagatttggggacggcacccgatgaggccgtgagggccccactggactgggcgctgccgctttctgaggtaccgagcgactgggaagtagatgatttgctgtgctccctgctgagtcccccagcgtcgttgaacattctcagctcctccaacccctgccttgtccaccatgaccacacctactccctcccacgggaaactgtctctatggatctagagagtgagagctgtagaaaagaggggacccagatgactccacagcatatggaggagctggcagagcaggagattgctaggctagtactgacagatgaggagaagagtctattggagaaggaggggcttattctgcctgagacacttcctctcactaagacagaggaacaaattctgaaacgtgtgcggaggaagattcgaaataaaagatctgctcaagagagccgcaggaaaaagaaggtgtatgttgggggtttagagagcagggtcttgaaatacacagcccagaatatggagcttcagaacaaagtacagcttctggaggaacagaatttgtcccttctagatcaactgaggaaactccaggccatggtgattgagatatcaaayaaaaccagcagcagcagcacctgcatcttggtcctactagtctccttctgcctcctccttgtacctgctatgtactcctctgacacaagggggagcctgccagctgagcatggagtgttgtcccgccagcttcgtgccctccccagtgaggacccttaccagctggagctgcctgccctgcagtcagaagtgccgaaagacagcacacaccagtggttggacggctcagactgtgtactccaggcccctggcaacacttcctgcctgctgcattacatgcctyaggctcccagtgcagagcctcccctggagtggccattccctgacctcttctcagagcctctctgccgaggtcccatcctccccctgcaggcaaatctcacaaggaagggaggatggcttcctactggtagcccctctgtcattttgcaggacagatactcaggctagatatgaggatatgtggggggtctcagcaggagcctggggggctccccatctgtgtccaaataaaaagcggtgggcaagggctggccgcagctcctgtgccctgtcaggacgactgagggctcaaacmcmccacacttaatggctttctgggtcttttatttgtacccatgtgtctgtcacaccatgaatgtacctggggaaatcaactgacctccctgaacatttcacgcagtcagggaacaggtgaggaaagaaataaataagtgattctaatgctgcctaggtcaccctcaacccccatttactggcacarttgggtggagagaagggaaggggtatgattgtcctgatggctcagggttgcaggaggttcagaggggaaggaggaaaggtgtcttcttttccacatgggtcttccggtaccaccactgcaggtacctcaagcccatgcctatatgctttatcatgttgcttagggagacgttgttagcttgaaagggtttcctcttctctgtaaactcatgagccagacagatgcgccagccaaagggaggcacctgg

SEQ ID NO: 359 - DNA, 2208 bp, Homo sapiens
cctggcaggaarcgagggtgcggcgcaatccggagaggacgccaggacgacgcccgagttccctttcaggctagaactcttcctttttctagcttggggtagaaggcggagccggagccccggaacccccgccctcggggtgcgaggcggcagcagggccgtcccctacatttgcatagcccctgggacgtggcgctgcacccaagcctcttctcagttggagggaactccaagtcccacagtgccacggggtggggtgcgtcactttcgctgcgttggaggctgaggagaattgagcctgggaggcgggtccggagagggctatggaaagccgccggcggggaatcccggccgtagagggacagtggataggtgcccgaggcctacagctggcctggggctcgtgtctgggcttcggacgttggggcccggtggcccaccctttccgtagttgtcccaratggagctggaattggatgctggtgaccaagacctgctggccttcctgctagaggaaagtgaagatttggggacggcacccgatgaggccgtgagggccccactggactgggcgctgccgctttctgaggtaccgagcgactgggaagtagatgatttgctgtgctccctgctgagtcccccagcgtcgttgaacattctcagctcctccaacccctgccttgtccaccatgaccacacctactccctcccacgggaaactgtctctatggatctaggtgagtctgaaataagtttgcggggaggacagggttcatgggcctggctattcatactttcccttttgcagagagtgagagctgtagaaaagaggggacccagatgactccacagcatatggaggagctggcagagcaggagattgctaggctagtactgacagatgaggagaagagtctattggagaaggaggggcttattctgcctgagacacttcctctcactaagacagaggaacaaattctgaaacgtgtgcggaggaagattcgaaataaaagatctgctcaagagagccgcaggaaaaagaaggtgtatgttgggggtttagagagcagggtcttgaaatacacagcccagaatatggagcttcagaacaaagtacagcttctggaggaacagaatttgtcccttctagatcaactgaggaaactccaggccatggtgattgagatatcaaayaaaaccagcagcagcagcacctgcatcttggtcctactagtctccttctgcctcctccttgtacctgctatgtactcctctgacacaagggggagcctgccagctgagcatggagtgttgtcccgccagcttcgtgccctccccagtgaggacccttaccagctggagctgcctgccctgcagtcagaagtgccgaaagacagcacacaccagtggttggacggctcagactgtgtactccaggcccctggcaacacttcctgcctgctgcattacatgcctyaggctcccagtgcagagcctcccctggagtggccattccctgacctcttctcagagcctctctgccgaggtcccatcctccccctgcaggcaaatctcacaaggaagggaggatggcttcctactggtagcccctctgtcattttgcaggacagatactcaggctagatatgaggatatgtggggggtctcagcaggagcctggggggctccccatctgtgtccaaataaaaagcggtgggcaagggctggccgcagctcctgtgccctgtcaggacgactgagggctcaaacmcmccacacttaatggctttctgggtcttttatttgtacccatgtgtctgtcacaccatgaatgtacctggggaaatcaactgacctccctgaacatttcacgcagtcagggaacaggtgaggaaagaaataaataagtgattctaatgctgcctaggtcaccctcaacccccatttactggcacarttgggtggagagaagggaaggggtatgattgtcctgatggctcagggttgcaggaggttcagaggggaaggaggaaaggtgtcttcttttccacatgggtcttccggtaccaccactgcaggtacctcaagcccatgcctatatgctttatcatgttgcttagggagacgttgttagcttgaaagggtttcctcttctctgtaaactcatgagccagacagatgcgccagccaaagggaggcacctgg

SEQ ID NO: 360 - DNA, 8537 bp, Homo sapiens
gctgtacgtccaagatggcggcgccctgtaggctggagggactgtgaggtaaacagctgagggggaggagacggtggtttggtagtggccccaatgaagaaccttcagaacctgtagcacacgtcctggagccagcacagcgccttcgagygagagaatggcccaacaagcaaatgtcggggagcttcttgccatgctggactcccccatgctgggtgtgcgggacgacgtgacagctgtctttaaagagaacctcaattctgaccgtggccctatgcttgtaaacaccttggtggattattacctggaaaccagctctcagccggcattgcacatcctgaccaccttgcaagagccacatgacaagcaccycttggacaggattaacgaatatgtgggcaaagccgccactcgtttatccatcctctmgttactgggtcatgtcataagactgcagccatcttrraagcataagctctctcaagcacctcttttgccttctttactaaaatgtctcaagatggacactgacgtcgttgtcctcacaacaggcgtcttggtgttgataaccatgctaccaatgattccacagtctgggaaacagcatcttcttgatttctttgacatttttggccgtctgtcatcatggtgmctgaagaaaccaggccacgtggcggaagtctatctcgtccatctccatgccagtgtgtacgcactctttcatcgcctttatggaatgtacccttgcaacttcgtctcctttttgcgttctcattacagtatgaaagaaaacctggagacttttgaagaagtggtcaagccaatgatggagcatgtgygaattcatccggaattagtgactggatccaaggaccatgaactggaccctcgaaggtggaagagattagaaactcatgatgttgtgatcgagtgtgccaaaatctctctggatcccacagaagcctcatatgaakatggctattctgtgtctcaccaaatctcagcccgctttcctcatcgttcagccgatgtcaccaccagcccttatgctgacacayagaatagctatgggtgtgctacttctaccccttactccacgtctcggctgatgttgttaaataygccagggcagctacctcagactctgagttccccatcgacacggctgataactgaaccaccacaagctactctttggagcccatctatggtttgtggtatgaccactcctccaacttctcctggaaatgtcccacctgatctgtcacacccttacagtaaagtctttggtacaactgcaggtggaaaaggaactcctctgggaaccccagcaacctctcctcctccagccccactctgtcattcggatgactacgtgcacatttcactcccccaggccacagtcayaccccccaggaaggaagagagaatggattctgcaagaccatgtctacacagacaacaccatcttctgaatgacagaggatsagargagccacctggcagcaaaggttctgtcactctaagtgatcttccagggtttttaggtgatctggcctctgaagaagatagtattgaaaaagataaagaagaagctgcaatatctagagaactttctgagatcaccacagcagaggcagagcctgtggttcctyraggaggctttgactctcccttttacygagacagtctcccaggttctcagcggaagacccactcggcagcctccagttctcagggcgccagcgtgaaccctgagcctttacactcctccctggacaagcttgggcctgacacaccaaagcaagcctttactcccatagacctgccctgcggcagtgctgatgaaagccctgcrggagacagggaatgcyagacttctttgkagaccagtatcttcactcccagtccttgtaraattccacctccgacgagagtgggctttggaagcgggcagcctcccccgtatgatcatctttttgaggtggcattgccaaagacagcccatcattttgtcatcaggaagactgaggagctgtwaaagaaagcaaaaggaaacacagaggaagatggtgtgccctctacctccccaatggaagtgctggacagactgatacagcagggagcagacgcrcacagcaaggagctgaacaagttgcctttacccagcaagtctgtcgactggacccactttggaggctctcctccttcagatgagatccgcaccctccgagaccagttgcttttactgcacaaccagttactctatgagcgttttaagaggcagcagcatgccctccggaacaggcggctcctccgcaaggtgatcaaagcagcagctctggaggaacataatgctgccatgaaagatcagttgaagttayaagagaaggacatccagatgtgraaggttagtctgcagaaagaacaagctagatasaatcagctcyaggagyagcgtgacactatggtaaccaagctccacagccagatcagacagctgcagcatgaccgagaggaattctacaaccagagccaggaattacagacgaagctggaggactgcaggaacatgattgcggagctgcggatagaactgaagaaggccaacaacaaggtgtgtcacactgagctgctgctcagtcaggtttccyaaaagctctsaaacagtgagtcggtccagcagcagatggagttcttgaacaggcagctgttggttcttggggaggtcaacgagctctatttggaacaactgcagaacaagcactcagataccacaaaggaagtagaaatgatgaaagccgcctatcggaaagagctagaaaaaaacagaagccatgttctcyagyagastcagaggcttgatacctcccaaaaacggattttggaactggaatctcacctggccaagaaagaccaccttcttttggaacagaagaaatatctagaggatgtcaaactccaggcaagaggacagctgcaggcygcagagagcaggtatgaggctcagaaaaggataacccaggtgtttgaattggagatcttagatttatatggcaggttggagaaagatggcctcctgaaaaaacttgaagaagaaaaagcagaagcagctgaagcagcagaagaaaggcttgactgttgtaatgacgggtgctcagattccatggtagggcacaatgaagaggcatctggccacaacggtgagaccaagacccccaggcccagcagcgcccggggcagtagtggaagcagaggtggtggaggcagcagcagcagcagcagcgagctttctaccccagagaaacccccacaccagagggcaggcccattcagcagtcggtgggagacgactatgggagaagcgtctgccagcatccccaccactgtgggctcacttcccagttcaaaaagcttcctgggtatgaaggctcgagagttatttcgtaataagagcgagagccagtgtgatgaggacggyatgaccagtagcctttctgagagcctaaagacagaactgggcaaagacttgggtgtggaagccaagattcccctgaacctagatggccctcacccgtctcccccgaccccggacagtgttggacagctacatatcatggactacaatgagactcatcatgaacacagctaaggaatgatggtcaatcagtgttaacttgcatattgttggcacagaacaggaggtgtgaatgcacgtttcaaagctttcctgtttccagggtctgagtgcaagttcatgtgtggaaatgggacggaggtcctttggacagctgactgaatgcagaacggtttttggatctggcattgaaatgcctcttgaccttcccctccacccgccctaaccccctctcatttacctcgcagtgtgttctaatccaagggccagttggtgttcctcagtagctttactttcttcctttcccccccaaatggttgcgtcctttgaacctgtgcaatatgaggccaaatttaatctttgagtctaacacaccactttctgctttcccgaagttcagataactgggttggctctcaattagaccaggtagtttgttgcattgcaggtaagtctggttttgtcccttccaggaggacatagcctgcaaagctggttgtctttacatgaaagcgtttacatgagactttccgactgcttttttgattctgaagttcagcatctaaagcagcaggtctagaagaacaacggtttattcatacttgcattcttttggcagttctgataagcttcctagaaagttctgtgtaaacagaagcctgtttcagaaatctggagctggcactgtggagaccacacaccctttgggaaagctcttgtctcttcttcccccactacctcttatttatttggtgtttgcttgaatgctggtactattgtgaccacaggctggtgtgtaggtggtaaaacctgttctccataggagggaaggagcagtcactgggagaggttacccgagaagcacttgagcatgaggaactgcacctttaggccatctcagcttgctgggccttttgttaaacccttctgtctactggcctccctttgtgtgcatacgcctcttgttcatgtcagcttatatgtgacactgcagcagaaaggctctgaaggtccaaagagtttctgcaaagtgtatgtgaccatcatttcccaggccattagggttgcctcactgtagcaggttctaggctaccagaagaggggcagctttttcataccaattccaactttcaggggctgactctccagggagctgatgtcatcacactctccatgttagtaatggcagagcagtctaaacagagtccgggagaatgctggcaaaggctggctgtgtatacccactaggctgccccacgtgctcccgagagatgacactagtcagaaaaktggcagtggcagagaatccaaactcaacaagtgctcctgaaagaaaygctagaagcctaagaactgtggtctggtgttccagctgaggcagggggatttggtaggaaggagccagtgaacttggctttcctgtttctatctttcattaaaaagaatagaaggattcagtcataaagaggtaaaaaactgtcacggtacgaaatcttagtgccyacggaggcctcgagcagaragaatgaaagtcttttttttttttttttttttttagcatggcaataaatattctagcatccctaactaaaggggactagacagttagagactctgtcaccctagctataccagcagaaaacctgttcaggcaggctttctgggtgtgactgattcccagcctgtggcagggcgtggtcccaactactcagcctagcacaggctggcagttggtactgaattgtcagatgtggagtattagtgacaccacacatttaattcagmtttgtccaaaggaaagcttaaaacccaatacagtctagtttcctggttccgttttagaaaaggaaaacgtgaacaaacttagaaagggaaggaaatcccatcagtgaatcctgaaactggttttaagtgctttccttctcctcatgcccaagagatctgtgccatagaacaagataccaggcacttaaagccttttcctgaattggaaaggaaaagaggcccaagtgcaaaagaaaaaacattttagaaacggacagcttataaaaataaagggaagaaaggaggcagcatggagagaggcctgtgctagaagctccatggacgtgtctgcacagggtcctcagctcatccatgcggcctgggtgtccttttactcagctttataacaaatgtggctccaagctcaggtgcctttgagttctaggaggctgtgggttttattcaactacggttgggagaatgagacctggagtcatgttgaaggtgcccaacctaaaaatgtaggctttcatgttgcaaagaactccagagtcagtagttaggtttggtttggttttggacatgataaacctgccaagagtcaacaggtcacttgatcatgctgcagtgggtagttctaaggatggaaaggtgacagtattactctcgagaggcaattcagtcctgggcaaaggtattagtacaataagcgttaagggcagagtctaccttgaaaccaattaagcagcttggtattcataaatattgggattggatggcctccatccagaaatcactatgggtgagcatacctgtctcagctgtttggccaatgtgcataacctactcggatccccacctgacactaaccagagtcagcacaggccccgaggagcccgaagtctgctgctgtgcagcatggaattcctttaaaaaggtgcactacagttttagcggggagggggataggaagacgcagagcaaatgagctccggagtccctgcaggtgaataaacacacagatctgcatctgatagaactttgatggattttcaaaaagccgttgacaaggctctgctatacagtctataaaaattgttattatgggattggaagaaacacrtggtcatgaatagaaaaaaaacaaacccaaaggtaggaaggtcaaggtcatttcttagatggagaagttgtgaaagatgtccttggagatgagttttaggaccagcattactaaggcaggtgggcagacagtgacctctctaggtgtgtccacagagtttttcaggagagaaaactgcctgacctttgggactaagctgcggaatcttcttactaagcttgaagagtggagaggcgagaggtgagctactttgtgagccaaagcttatgtgacatggttggggaaacagtccaaactgttctgagaaggtgaactgttacgacccaggacaattagaaaaattcacccaccatgccgcacattactgggtaaaagcagggcagcagggaacaaaactccagactcttgggccgtccccatttgcaacagcacacatagtttctggtatatttgttgggaaagataaaactctagcagttgttgaggggaggatgtataaaatggtcatggggatgaaaggatctctgagaccacagaggctcagactcactgttaagaatagaaaactgggtatgcgtttcatgtagccagcagaactgaagtgtgctgtgacaagccaatgtgaatttctaccaaatagtagagcataccacttgaagaaggaaagaaccgaagagcaaacaaaagttctgcgtaatgagactcaccttttctcgctgaaagcactaagaggtgggaggaggcctgcacaggctggaggagggtttgggcagagcgaagacccggccaggaccttggtgagatggrgtgccgcccacctcctgcggatactcttggagagttgttcccccagggggctctgccccacctggagaaggaagctgcctggtgtggagtgactcaaatcagtatacctatctgctgcaccttcactctccagggtacatgctttaaaaccgacccgcaacaagtattggaaaaatgtatccagtctgaagatgtttgtgtatctgtttacatccagagttctgtgacacatgccccccagattgctgcaaagatcccaaggcattgattgcacttgattaagcttttgtctgtaggtgaaagaacaagtttaggtcgaggactggcccctaggctgctgctgtgacccttgtcccatgtggcttgtttgcctgtccgggactcttcgatgtgcccaggggagcgtgttcctgtctcttccatgccgtcctgcagtccttatctgctcgcctgagggaagagtagctgtagctacaagggaagcctgcctggaagagccgagcacctgtgcccatggcttctggtcatgaaacgagttaatgatggcagaggagcttcctccccacttcgcagcgccacattatccatcctctgagataagtaggctggtttaaccattggaatggacctttcagtggaaaccctgagagtctgagaacccccagaccaacccttccctccctttccccacctcttacagtgtttggacaggagggtatggtgctgctctgtgtagcaagtactttggcttatgaaagaggcagccacgcattttgcactaggaagaatcagtaatcacttttcagaagacttctatggaccacaaatatattacggaggaacagattttgctaagacataatctagttttataactcaatcatgaatgaaccatgtgtggcaaacttgcagtttaaaggggtcccatcagtgaaagaaactgattttttttaacggactgcttttagttaaattgaagaaagtcagctcttgtcaaaaggtctaaactttcccgcctcaatcctaaaagcatgtcaacaatccacatcagatgccataaatatgaactgcaggataaaatggtacaatcttagtgaatgggaattggaatcaaaagagtttgctgtccttcttagaatgttctaaaatgtcaaggcagttgcttgtgtttaactgtgaacaaataaaaatttattgttttgcact

SEQ ID NO: 361 - DNA, 8460 bp, Homo sapiens
tttggtagtggccccaatgaagaaccttcagaacctgtagcacacgtcctggagccagcacagcgccttcgagygagagaatggcccaacaagcaaatgtcggggagcttcttgccatgctggactcccccatgctgggtgtgcgggacgacgtgacagctgtctttaaagagaacctcaattctgaccgtggccctatgcttgtaaacaccttggtggattattacctggaaaccagctctcagccggcattgcacatcctgaccaccttgcaagagccacatgacaagcaccycttggacaggattaacgaatatgtgggcaaagccgccactcgtttatccatcctctmgttactgggtcatgtcataagactgcagccatcttrraagcataagctctctcaagcacctcttttgccttctttactaaaatgtctcaagatggacactgacgtcgttgtcctcacaacaggcgtcttggtgttgataaccatgctaccaatgattccacagtctgggaaacagcatcttcttgatttctttgacatttttggccgtctgtcatcatggtgmctgaagaaaccaggccacgtggcggaagtctatctcgtccatctccatgccagtgtgtacgcactctttcatcgcctttatggaatgtacccttgcaacttcgtctcctttttgcgttctcattacagtatgaaagaaaacctggagacttttgaagaagtggtcaagccaatgatggagcatgtgygaattcatccggaattagtgactggatccaaggaccatgaactggaccctcgaaggtggaagagattagaaactcatgatgttgtgatcgagtgtgccaaaatctctctggatcccacagaagcctcatatgaakatggctattctgtgtctcaccaaatctcagcccgctttcctcatcgttcagccgatgtcaccaccagcccttatgctgacacayagaatagctatgggtgtgctacttctaccccttactccacgtctcggctgatgttgttaaataygccagggcagctacctcagactctgagttccccatcgacacggctgataactgaaccaccacaagctactctttggagcccatctatggtttgtggtatgaccactcctccaacttctcctggaaatgtcccacctgatctgtcacacccttacagtaaagtctttggtacaactgcaggtggaaaaggaactcctctgggaaccccagcaacctctcctcctccagccccactctgtcattcggatgactacgtgcacatttcactcccccaggccacagtcayaccccccaggaaggaagagagaatggattctgcaagaccatgtctacacagacaacaccatcttctgaatgacagaggatsagargagccacctggcagcaaaggttctgtcactctaagtgatcttccagggtttttaggtgatctggcctctgaagaagatagtattgaaaaagataaagaagaagctgcaatatctagagaactttctgagatcaccacagcagaggcagagcctgtggttcctyraggaggctttgactctcccttttacygagacagtctcccaggttctcagcggaagacccactcggcagcctccagttctcagggcgccagcgtgaaccctgagcctttacactcctccctggacaagcttgggcctgacacaccaaagcaagcctttactcccatagacctgccctgcggcagtgctgatgaaagccctgcrggagacagggaatgcyagacttctttgkagaccagtatcttcactcccagtccttgtaraattccacctccgacgagagtgggctttggaagcgggcagcctcccccgtatgatcatctttttgaggtggcattgccaaagacagcccatcattttgtcatcaggaagactgaggagctgtwaaagaaagcaaaaggaaacacagaggaagatggtgtgccctctacctccccaatggaagtgctggacagactgatacagcagggagcagacgcrcacagcaaggagctgaacaagttgcctttacccagcaagtctgtcgactggacccactttggaggctctcctccttcagatgagatccgcaccctccgagaccagttgcttttactgcacaaccagttactctatgagcgttttaagaggcagcagcatgccctccggaacaggcggctcctccgcaaggtgatcaaagcagcagctctggaggaacataatgctgccatgaaagatcagttgaagttayaagagaaggacatccagatgtgraaggttagtctgcagaaagaacaagctagatasaatcagctcyaggagyagcgtgacactatggtaaccaagctccacagccagatcagacagctgcagcatgaccgagaggaattctacaaccagagccaggaattacagacgaagctggaggactgcaggaacatgattgcggagctgcggatagaactgaagaaggccaacaacaaggtgtgtcacactgagctgctgctcagtcaggtttccyaaaagctctsaaacagtgagtcggtccagcagcagatggagttcttgaacaggcagctgttggttcttggggaggtcaacgagctctatttggaacaactgcagaacaagcactcagataccacaaaggaagtagaaatgatgaaagccgcctatcggaaagagctagaaaaaaacagaagccatgttctcyagyagastcagaggcttgatacctcccaaaaacggattttggaactggaatctcacctggccaagaaagaccaccttcttttggaacagaagaaatatctagaggatgtcaaactccaggcaagaggacagctgcaggcygcagagagcaggtatgaggctcagaaaaggataacccaggtgtttgaattggagatcttagatttatatggcaggttggagaaagatggcctcctgaaaaaacttgaagaagaaaaagcagaagcagctgaagcagcagaagaaaggcttgactgttgtaatgacgggtgctcagattccatggtagggcacaatgaagaggcatctggccacaacggtgagaccaagacccccaggcccagcagcgcccggggcagtagtggaagcagaggtggtggaggcagcagcagcagcagcagcgagctttctaccccagagaaacccccacaccagagggcaggcccattcagcagtcggtgggagacgactatgggagaagcgtctgccagcatccccaccactgtgggctcacttcccagttcaaaaagcttcctgggtatgaaggctcgagagttatttcgtaataagagcgagagccagtgtgatgaggacggyatgaccagtagcctttctgagagcctaaagacagaactgggcaaagacttgggtgtggaagccaagattcccctgaacctagatggccctcacccgtctcccccgaccccggacagtgttggacagctacatatcatggactacaatgagactcatcatgaacacagctaaggaatgatggtcaatcagtgttaacttgcatattgttggcacagaacaggaggtgtgaatgcacgtttcaaagctttcctgtttccagggtctgagtgcaagttcatgtgtggaaatgggacggaggtcctttggacagctgactgaatgcagaacggtttttggatctggcattgaaatgcctcttgaccttcccctccacccgccctaaccccctctcatttacctcgcagtgtgttctaatccaagggccagttggtgttcctcagtagctttactttcttcctttcccccccaaatggttgcgtcctttgaacctgtgcaatatgaggccaaatttaatctttgagtctaacacaccactttctgctttcccgaagttcagataactgggttggctctcaattagaccaggtagtttgttgcattgcaggtaagtctggttttgtcccttccaggaggacatagcctgcaaagctggttgtctttacatgaaagcgtttacatgagactttccgactgcttttttgattctgaagttcagcatctaaagcagcaggtctagaagaacaacggtttattcatacttgcattcttttggcagttctgataagcttcctagaaagttctgtgtaaacagaagcctgtttcagaaatctggagctggcactgtggagaccacacaccctttgggaaagctcttgtctcttcttcccccactacctcttatttatttggtgtttgcttgaatgctggtactattgtgaccacaggctggtgtgtaggtggtaaaacctgttctccataggagggaaggagcagtcactgggagaggttacccgagaagcacttgagcatgaggaactgcacctttaggccatctcagcttgctgggccttttgttaaacccttctgtctactggcctccctttgtgtgcatacgcctcttgttcatgtcagcttatatgtgacactgcagcagaaaggctctgaaggtccaaagagtttctgcaaagtgtatgtgaccatcatttcccaggccattagggttgcctcactgtagcaggttctaggctaccagaagaggggcagctttttcataccaattccaactttcaggggctgactctccagggagctgatgtcatcacactctccatgttagtaatggcagagcagtctaaacagagtccgggagaatgctggcaaaggctggctgtgtatacccactaggctgccccacgtgctcccgagagatgacactagtcagaaaaktggcagtggcagagaatccaaactcaacaagtgctcctgaaagaaaygctagaagcctaagaactgtggtctggtgttccagctgaggcagggggatttggtaggaaggagccagtgaacttggctttcctgtttctatctttcattaaaaagaatagaaggattcagtcataaagaggtaaaaaactgtcacggtacgaaatcttagtgccyacggaggcctcgagcagaragaatgaaagtcttttttttttttttttttttttagcatggcaataaatattctagcatccctaactaaaggggactagacagttagagactctgtcaccctagctataccagcagaaaacctgttcaggcaggctttctgggtgtgactgattcccagcctgtggcagggcgtggtcccaactactcagcctagcacaggctggcagttggtactgaattgtcagatgtggagtattagtgacaccacacatttaattcagmtttgtccaaaggaaagcttaaaacccaatacagtctagtttcctggttccgttttagaaaaggaaaacgtgaacaaacttagaaagggaaggaaatcccatcagtgaatcctgaaactggttttaagtgctttccttctcctcatgcccaagagatctgtgccatagaacaagataccaggcacttaaagccttttcctgaattggaaaggaaaagaggcccaagtgcaaaagaaaaaacattttagaaacggacagcttataaaaataaagggaagaaaggaggcagcatggagagaggcctgtgctagaagctccatggacgtgtctgcacagggtcctcagctcatccatgcggcctgggtgtccttttactcagctttataacaaatgtggctccaagctcaggtgcctttgagttctaggaggctgtgggttttattcaactacggttgggagaatgagacctggagtcatgttgaaggtgcccaacctaaaaatgtaggctttcatgttgcaaagaactccagagtcagtagttaggtttggtttggttttggacatgataaacctgccaagagtcaacaggtcacttgatcatgctgcagtgggtagttctaaggatggaaaggtgacagtattactctcgagaggcaattcagtcctgggcaaaggtattagtacaataagcgttaagggcagagtctaccttgaaaccaattaagcagcttggtattcataaatattgggattggatggcctccatccagaaatcactatgggtgagcatacctgtctcagctgtttggccaatgtgcataacctactcggatccccacctgacactaaccagagtcagcacaggccccgaggagcccgaagtctgctgctgtgcagcatggaattcctttaaaaaggtgcactacagttttagcggggagggggataggaagacgcagagcaaatgagctccggagtccctgcaggtgaataaacacacagatctgcatctgatagaactttgatggattttcaaaaagccgttgacaaggctctgctatacagtctataaaaattgttattatgggattggaagaaacacrtggtcatgaatagaaaaaaaacaaacccaaaggtaggaaggtcaaggtcatttcttagatggagaagttgtgaaagatgtccttggagatgagttttaggaccagcattactaaggcaggtgggcagacagtgacctctctaggtgtgtccacagagtttttcaggagagaaaactgcctgacctttgggactaagctgcggaatcttcttactaagcttgaagagtggagaggcgagaggtgagctactttgtgagccaaagcttatgtgacatggttggggaaacagtccaaactgttctgagaaggtgaactgttacgacccaggacaattagaaaaattcacccaccatgccgcacattactgggtaaaagcagggcagcagggaacaaaactccagactcttgggccgtccccatttgcaacagcacacatagtttctggtatatttgttgggaaagataaaactctagcagttgttgaggggaggatgtataaaatggtcatggggatgaaaggatctctgagaccacagaggctcagactcactgttaagaatagaaaactgggtatgcgtttcatgtagccagcagaactgaagtgtgctgtgacaagccaatgtgaatttctaccaaatagtagagcataccacttgaagaaggaaagaaccgaagagcaaacaaaagttctgcgtaatgagactcaccttttctcgctgaaagcactaagaggtgggaggaggcctgcacaggctggaggagggtttgggcagagcgaagacccggccaggaccttggtgagatggrgtgccgcccacctcctgcggatactcttggagagttgttcccccagggggctctgccccacctggagaaggaagctgcctggtgtggagtgactcaaatcagtatacctatctgctgcaccttcactctccagggtacatgctttaaaaccgacccgcaacaagtattggaaaaatgtatccagtctgaagatgtttgtgtatctgtttacatccagagttctgtgacacatgccccccagattgctgcaaagatcccaaggcattgattgcacttgattaagcttttgtctgtaggtgaaagaacaagtttaggtcgaggactggcccctaggctgctgctgtgacccttgtcccatgtggcttgtttgcctgtccgggactcttcgatgtgcccaggggagcgtgttcctgtctcttccatgccgtcctgcagtccttatctgctcgcctgagggaagagtagctgtagctacaagggaagcctgcctggaagagccgagcacctgtgcccatggcttctggtcatgaaacgagttaatgatggcagaggagcttcctccccacttcgcagcgccacattatccatcctctgagataagtaggctggtttaaccattggaatggacctttcagtggaaaccctgagagtctgagaacccccagaccaacccttccctccctttccccacctcttacagtgtttggacaggagggtatggtgctgctctgtgtagcaagtactttggcttatgaaagaggcagccacgcattttgcactaggaagaatcagtaatcacttttcagaagacttctatggaccacaaatatattacggaggaacagattttgctaagacataatctagttttataactcaatcatgaatgaaccatgtgtggcaaacttgcagtttaaaggggtcccatcagtgaaagaaactgattttttttaacggactgcttttagttaaattgaagaaagtcagctcttgtcaaaaggtctaaactttcccgcctcaatcctaaaagcatgtcaacaatccacatcagatgccataaatatgaactgcaggataaaatggtacaatcttagtgaatgggaattggaatcaaaagagtttgctgtccttcttagaatgttctaaaatgtcaaggcagttgcttgtgtttaactgtgaacaaataaaaatttattgttttgcact

SEQ ID NO: 362 - DNA, 8569 bp, Homo sapiens
tgtacgtccaagatggcggcgccctgtaggctggagggactgtgagtgaccatgaaagacaccaggttgacagcactggaaactgaagtaccagttgtcgctagaacagtttggtagtggccccaatgaagaaccttcagaacctgtagcacacgtcctggagccagcacagcgccttcgagygagagaatggcccaacaagcaaatgtcggggagcttcttgccatgctggactcccccatgctgggtgtgcgggacgacgtgacagctgtctttaaagagaacctcaattctgaccgtggccctatgcttgtaaacaccttggtggattattacctggaaaccagctctcagccggcattgcacatcctgaccaccttgcaagagccacatgacaagcaccycttggacaggattaacgaatatgtgggcaaagccgccactcgtttatccatcctctmgttactgggtcatgtcataagactgcagccatcttrraagcataagctctctcaagcacctcttttgccttctttactaaaatgtctcaagatggacactgacgtcgttgtcctcacaacaggcgtcttggtgttgataaccatgctaccaatgattccacagtctgggaaacagcatcttcttgatttctttgacatttttggccgtctgtcatcatggtgmctgaagaaaccaggccacgtggcggaagtctatctcgtccatctccatgccagtgtgtacgcactctttcatcgcctttatggaatgtacccttgcaacttcgtctcctttttgcgttctcattacagtatgaaagaaaacctggagacttttgaagaagtggtcaagccaatgatggagcatgtgygaattcatccggaattagtgactggatccaaggaccatgaactggaccctcgaaggtggaagagattagaaactcatgatgttgtgatcgagtgtgccaaaatctctctggatcccacagaagcctcatatgaakatggctattctgtgtctcaccaaatctcagcccgctttcctcatcgttcagccgatgtcaccaccagcccttatgctgacacayagaatagctatgggtgtgctacttctaccccttactccacgtctcggctgatgttgttaaataygccagggcagctacctcagactctgagttccccatcgacacggctgataactgaaccaccacaagctactctttggagcccatctatggtttgtggtatgaccactcctccaacttctcctggaaatgtcccacctgatctgtcacacccttacagtaaagtctttggtacaactgcaggtggaaaaggaactcctctgggaaccccagcaacctctcctcctccagccccactctgtcattcggatgactacgtgcacatttcactcccccaggccacagtcayaccccccaggaaggaagagagaatggattctgcaagaccatgtctacacagacaacaccatcttctgaatgacagaggatsagargagccacctggcagcaaaggttctgtcactctaagtgatcttccagggtttttaggtgatctggcctctgaagaagatagtattgaaaaagataaagaagaagctgcaatatctagagaactttctgagatcaccacagcagaggcagagcctgtggttcctyraggaggctttgactctcccttttacygagacagtctcccaggttctcagcggaagacccactcggcagcctccagttctcagggcgccagcgtgaaccctgagcctttacactcctccctggacaagcttgggcctgacacaccaaagcaagcctttactcccatagacctgccctgcggcagtgctgatgaaagccctgcrggagacagggaatgcyagacttctttgkagaccagtatcttcactcccagtccttgtaraattccacctccgacgagagtgggctttggaagcgggcagcctcccccgtatgatcatctttttgaggtggcattgccaaagacagcccatcattttgtcatcaggaagactgaggagctgtwaaagaaagcaaaaggaaacacagaggaagatggtgtgccctctacctccccaatggaagtgctggacagactgatacagcagggagcagacgcrcacagcaaggagctgaacaagttgcctttacccagcaagtctgtcgactggacccactttggaggctctcctccttcagatgagatccgcaccctccgagaccagttgcttttactgcacaaccagttactctatgagcgttttaagaggcagcagcatgccctccggaacaggcggctcctccgcaaggtgatcaaagcagcagctctggaggaacataatgctgccatgaaagatcagttgaagttayaagagaaggacatccagatgtgraaggttagtctgcagaaagaacaagctagatasaatcagctcyaggagyagcgtgacactatggtaaccaagctccacagccagatcagacagctgcagcatgaccgagaggaattctacaaccagagccaggaattacagacgaagctggaggactgcaggaacatgattgcggagctgcggatagaactgaagaaggccaacaacaaggtgtgtcacactgagctgctgctcagtcaggtttccyaaaagctctsaaacagtgagtcggtccagcagcagatggagttcttgaacaggcagctgttggttcttggggaggtcaacgagctctatttggaacaactgcagaacaagcactcagataccacaaaggaagtagaaatgatgaaagccgcctatcggaaagagctagaaaaaaacagaagccatgttctcyagyagastcagaggcttgatacctcccaaaaacggattttggaactggaatctcacctggccaagaaagaccaccttcttttggaacagaagaaatatctagaggatgtcaaactccaggcaagaggacagctgcaggcygcagagagcaggtatgaggctcagaaaaggataacccaggtgtttgaattggagatcttagatttatatggcaggttggagaaagatggcctcctgaaaaaacttgaagaagaaaaagcagaagcagctgaagcagcagaagaaaggcttgactgttgtaatgacgggtgctcagattccatggtagggcacaatgaagaggcatctggccacaacggtgagaccaagacccccaggcccagcagcgcccggggcagtagtggaagcagaggtggtggaggcagcagcagcagcagcagcgagctttctaccccagagaaacccccacaccagagggcaggcccattcagcagtcggtgggagacgactatgggagaagcgtctgccagcatccccaccactgtgggctcacttcccagttcaaaaagcttcctgggtatgaaggctcgagagttatttcgtaataagagcgagagccagtgtgatgaggacggyatgaccagtagcctttctgagagcctaaagacagaactgggcaaagacttgggtgtggaagccaagattcccctgaacctagatggccctcacccgtctcccccgaccccggacagtgttggacagctacatatcatggactacaatgagactcatcatgaacacagctaaggaatgatggtcaatcagtgttaacttgcatattgttggcacagaacaggaggtgtgaatgcacgtttcaaagctttcctgtttccagggtctgagtgcaagttcatgtgtggaaatgggacggaggtcctttggacagctgactgaatgcagaacggtttttggatctggcattgaaatgcctcttgaccttcccctccacccgccctaaccccctctcatttacctcgcagtgtgttctaatccaagggccagttggtgttcctcagtagctttactttcttcctttcccccccaaatggttgcgtcctttgaacctgtgcaatatgaggccaaatttaatctttgagtctaacacaccactttctgctttcccgaagttcagataactgggttggctctcaattagaccaggtagtttgttgcattgcaggtaagtctggttttgtcccttccaggaggacatagcctgcaaagctggttgtctttacatgaaagcgtttacatgagactttccgactgcttttttgattctgaagttcagcatctaaagcagcaggtctagaagaacaacggtttattcatacttgcattcttttggcagttctgataagcttcctagaaagttctgtgtaaacagaagcctgtttcagaaatctggagctggcactgtggagaccacacaccctttgggaaagctcttgtctcttcttcccccactacctcttatttatttggtgtttgcttgaatgctggtactattgtgaccacaggctggtgtgtaggtggtaaaacctgttctccataggagggaaggagcagtcactgggagaggttacccgagaagcacttgagcatgaggaactgcacctttaggccatctcagcttgctgggccttttgttaaacccttctgtctactggcctccctttgtgtgcatacgcctcttgttcatgtcagcttatatgtgacactgcagcagaaaggctctgaaggtccaaagagtttctgcaaagtgtatgtgaccatcatttcccaggccattagggttgcctcactgtagcaggttctaggctaccagaagaggggcagctttttcataccaattccaactttcaggggctgactctccagggagctgatgtcatcacactctccatgttagtaatggcagagcagtctaaacagagtccgggagaatgctggcaaaggctggctgtgtatacccactaggctgccccacgtgctcccgagagatgacactagtcagaaaaktggcagtggcagagaatccaaactcaacaagtgctcctgaaagaaaygctagaagcctaagaactgtggtctggtgttccagctgaggcagggggatttggtaggaaggagccagtgaacttggctttcctgtttctatctttcattaaaaagaatagaaggattcagtcataaagaggtaaaaaactgtcacggtacgaaatcttagtgccyacggaggcctcgagcagaragaatgaaagtcttttttttttttttttttttttagcatggcaataaatattctagcatccctaactaaaggggactagacagttagagactctgtcaccctagctataccagcagaaaacctgttcaggcaggctttctgggtgtgactgattcccagcctgtggcagggcgtggtcccaactactcagcctagcacaggctggcagttggtactgaattgtcagatgtggagtattagtgacaccacacatttaattcagmtttgtccaaaggaaagcttaaaacccaatacagtctagtttcctggttccgttttagaaaaggaaaacgtgaacaaacttagaaagggaaggaaatcccatcagtgaatcctgaaactggttttaagtgctttccttctcctcatgcccaagagatctgtgccatagaacaagataccaggcacttaaagccttttcctgaattggaaaggaaaagaggcccaagtgcaaaagaaaaaacattttagaaacggacagcttataaaaataaagggaagaaaggaggcagcatggagagaggcctgtgctagaagctccatggacgtgtctgcacagggtcctcagctcatccatgcggcctgggtgtccttttactcagctttataacaaatgtggctccaagctcaggtgcctttgagttctaggaggctgtgggttttattcaactacggttgggagaatgagacctggagtcatgttgaaggtgcccaacctaaaaatgtaggctttcatgttgcaaagaactccagagtcagtagttaggtttggtttggttttggacatgataaacctgccaagagtcaacaggtcacttgatcatgctgcagtgggtagttctaaggatggaaaggtgacagtattactctcgagaggcaattcagtcctgggcaaaggtattagtacaataagcgttaagggcagagtctaccttgaaaccaattaagcagcttggtattcataaatattgggattggatggcctccatccagaaatcactatgggtgagcatacctgtctcagctgtttggccaatgtgcataacctactcggatccccacctgacactaaccagagtcagcacaggccccgaggagcccgaagtctgctgctgtgcagcatggaattcctttaaaaaggtgcactacagttttagcggggagggggataggaagacgcagagcaaatgagctccggagtccctgcaggtgaataaacacacagatctgcatctgatagaactttgatggattttcaaaaagccgttgacaaggctctgctatacagtctataaaaattgttattatgggattggaagaaacacrtggtcatgaatagaaaaaaaacaaacccaaaggtaggaaggtcaaggtcatttcttagatggagaagttgtgaaagatgtccttggagatgagttttaggaccagcattactaaggcaggtgggcagacagtgacctctctaggtgtgtccacagagtttttcaggagagaaaactgcctgacctttgggactaagctgcggaatcttcttactaagcttgaagagtggagaggcgagaggtgagctactttgtgagccaaagcttatgtgacatggttggggaaacagtccaaactgttctgagaaggtgaactgttacgacccaggacaattagaaaaattcacccaccatgccgcacattactgggtaaaagcagggcagcagggaacaaaactccagactcttgggccgtccccatttgcaacagcacacatagtttctggtatatttgttgggaaagataaaactctagcagttgttgaggggaggatgtataaaatggtcatggggatgaaaggatctctgagaccacagaggctcagactcactgttaagaatagaaaactgggtatgcgtttcatgtagccagcagaactgaagtgtgctgtgacaagccaatgtgaatttctaccaaatagtagagcataccacttgaagaaggaaagaaccgaagagcaaacaaaagttctgcgtaatgagactcaccttttctcgctgaaagcactaagaggtgggaggaggcctgcacaggctggaggagggtttgggcagagcgaagacccggccaggaccttggtgagatggrgtgccgcccacctcctgcggatactcttggagagttgttcccccagggggctctgccccacctggagaaggaagctgcctggtgtggagtgactcaaatcagtatacctatctgctgcaccttcactctccagggtacatgctttaaaaccgacccgcaacaagtattggaaaaatgtatccagtctgaagatgtttgtgtatctgtttacatccagagttctgtgacacatgccccccagattgctgcaaagatcccaaggcattgattgcacttgattaagcttttgtctgtaggtgaaagaacaagtttaggtcgaggactggcccctaggctgctgctgtgacccttgtcccatgtggcttgtttgcctgtccgggactcttcgatgtgcccaggggagcgtgttcctgtctcttccatgccgtcctgcagtccttatctgctcgcctgagggaagagtagctgtagctacaagggaagcctgcctggaagagccgagcacctgtgcccatggcttctggtcatgaaacgagttaatgatggcagaggagcttcctccccacttcgcagcgccacattatccatcctctgagataagtaggctggtttaaccattggaatggacctttcagtggaaaccctgagagtctgagaacccccagaccaacccttccctccctttccccacctcttacagtgtttggacaggagggtatggtgctgctctgtgtagcaagtactttggcttatgaaagaggcagccacgcattttgcactaggaagaatcagtaatcacttttcagaagacttctatggaccacaaatatattacggaggaacagattttgctaagacataatctagttttataactcaatcatgaatgaaccatgtgtggcaaacttgcagtttaaaggggtcccatcagtgaaagaaactgattttttttaacggactgcttttagttaaattgaagaaagtcagctcttgtcaaaaggtctaaactttcccgcctcaatcctaaaagcatgtcaacaatccacatcagatgccataaatatgaactgcaggataaaatggtacaatcttagtgaatgggaattggaatcaaaagagtttgctgtccttcttagaatgttctaaaatgtcaaggcagttgcttgtgtttaactgtgaacaaataaaaatttattgttttgcact

SEQ ID NO: 363 - DNA, 4096 bp, Homo sapiens
cgggctcacagcggtggcaaagcccagcmgcgcgggccgcgccgccgcccccgccgcgcgccgggccggccccgcgcccgcgctgcgagccttccatggtgcagcgcatgtgggccgaggcggccgggcctgctggcggcgccgagccgctgtttccgggctcccggcggagccgcagcgtgtgggacgccgtgcgcctggaggtgggcgtccccgacagctgcccggtggtgctgcacagcttcacgcagctagaccccgacctgccgcgcccggagagctccacgcaggagatcggtgaggagctgatcaacggagtcatctactccatctccctgcgcaaggtkcagctgcaccacggaggcaacaaggggcagcgctggctcgggtatgagaatgagtcggccctgaacctttatgagacttgcaaggtgcggaccgtgaaggctggcacgctggagaagctggtrgagcacctggtgccagccttccagggcagcgacctctcctacgtcaccatcttcctgtgtacctatagagccttcaccaccacccaacaggtcctggacctgctgttcaaaaggtacggtagatgtgacgccctcacggcctcctctagatacggctgcatcctcccctattccgacgaggatggtggaccccaggaccaacttaaaaatgccatctcctccatcctgggcacctggctggaccagtactcggaggatttctgtcaacctccggactttccctgcctcaagcagctggtggcctacgtgcagctcaacatgccaggctcagacctggagcgccgtgcccaccttctcctggcccagctggagcactcrgaacccattgaggcagagcctgaggctctgtcaccagtgccagctctaaaaccaactccagagctcgagctagctctaacaccagctcgagcacccagcccagtgccggctccagccccggagccagagccagctccaacaccagctccaggttcagagctagaagtagctccagcaccagctccggagctccagcaggctccagagccagctgtgggactagaatcggctccagcgccagctctggaactagagccagctccagaacaggatccagctccctcacaaactctagagctggagccagctccagcrccagttccatcattacagccttcctggccttcacctgtggttgcagagaaygggctgagtgaggagaagcctcacctcttggtgttccctccagatctggtggcagagcagtttacactgatggatgcggaactgttcaagaaggtggtgccctaccactgcctgggctccatctggtcccagcgggacaagaagggcaaggagcacctggcgcccaccatccgcgccactgtcacccagttcaacagtgtggccaactgtgtcatcaccacctgcctcgggaaccgaagcacgaaagccccagacagggccagggtggtggagcactggatcgaggtggccagggagtgccggatcctcaagaacttctcgtcactgtatgccatcctctckgccctgcagagcaactccatccaccgtctgaagaagaygtgggaagacgtttccagggacagtttccggatctttcagaagctgtcagagatcttctcagatgagaacaactactcattgagccgggagctgctcatcaaggagggcacctccaagtttgccaccctggagatgaaccccaagagagcccagaaacggccgaaggagacgggcatcatccagggcaccgttccctacctgggcacgttcctcaccgacctggtgatgctggacactgccatgaaggactatctgtatggcagactcatcaactttgagaagaggaggaaggagttcgaggtgatcgcccagatcaagctgctgcagtcggcctgcaacaactacagcatcgcgccagatgagcaatttggggcctggttccgggccgtggagcggctcagcgagactgagagctacaacctgtcgtgcgagctggagcccccatcygagtcagccagcaacaccctcaggaccaagaagaacacagccattgtcaagcgctggagcgaccgccaggcccccagyactgagctcagtaccagtggcagctcccactccaagtcctgtgaccagctcaggtgtggcccctacctcagcagcggggacatcgctgacgcgctcagcgtgcactcggcyggctcctctagctccgacgtggaggagatcaacmtcagcttcgtcccggagtctcctgatggccaggaaaagaaggtgactgcctgcccttctccccaatatcctttcccatctccccactccaaatccatgcatggggccaggaagccctggatcctgaacacagcttctagaaggttccccatctggcagctggcctggggtgcccccacagggcagtgggatctgctgatcttaccgtctccctcagttctgggaatcagcctcacagtcatccccggagacctccggcatcagctcagcctccagcagcacctcgtcctcctcagcctccaccacgcccgtggctgccacacgcacccacaagcgctctgtctcagggctctgcaactccagctccgcgctgccgctctacaaccagcaggtgggcgactgctgtatcatccgcgtcagcctggacgtggacaatggcaacatgtacaagagcatcctggtaagccggcgggggtggcctgggtgcctccctccactggcggcaaatgcaccctgaacacagtgcaccatccctgccctyccggggtctaccttgtagttggcggggaaggacagatgtcagccaggtacagaaatgaagaaggtagtgatcagggacaaggctggcctgagggcagagggggaggaaaggagcagccgtgcaaagcycccaggagtgaccagccaagataaggctccggctgtaatccgcaaggccatggacaaacacaacctggaggaggaggarccggaggactatgagctgctgcagattctctcagatgaccggaagctgaagatccctgaaaacgccaacgtcttctatgccatgaactctacygccaactatgactttgtcctsaagaagcggaccttcaccaagggagtgaaggtcaagcacggagccagctccaccctccctcgcatgaagcagaaaggactcaagattgccaagggcatcttctgagggcatcctcccagggtctggctggctggtagccaagcacttatggaccagagtggcccaggccagctgggcgccttcctcccacctgccagcccagggtaccccagactccagtttcatcctgaacctctcccgctgctgggattgacgcctgccattggtcaggctgacctggcctcccgtggaccactcgctgccttaggtgccttctgctctctggaaccagaggactagctgacttttgccaaggagcagtgccaacgggcatggcatggtgccctgcctgcccccgggcrccacctctgtacacttccctgacaccttcccaggtgtgggtcactgccacctgtgcccatgggcaccccagagcacccactgtgaccactgcagttctctcatgcccacaggcactggcctgtgaccttcgcaggggtcccggcccctcccaccactctagcctttctcaggctgcaccaaagattccatcatcagggccaactgagagtgagggagtctcacccaccgcttaccccagccctcccctgggagcagagagagaaaccctcttcatggaccagactctgcacccggtgagtgaggacagtcccagctgagtcccatcgatgttgaatctcatgccactgcaagtgccattcaccactgcgtcctgggctttacgagaccatgcaagacgggggttagtgaggaaggaggatttggggtgggggtggggtgattgaatatttgtataaaaagcaaaaagaaaaaaaaaatgtttgtttactgattggggaggggcaatatttatttgttgtaaatagcaaatgctagacttgaatattatattaaaatcctgtttctacta

SEQ ID NO: 364 - DNA, 2567 bp, Homo sapiens
cgggctcacagcggtggcaaagcccagcmgcgcgggccgcgccgccgcccccgccgcgcgccgggccggccccgcgcccgcgctgcgagccttccatggtgcagcgcatgtgggccgaggcggccgggcctgctggcggcgccgagccgctgtttccgggctcccggcggagccgcagcgtgtgggacgccgtgcgcctggaggtgggcgtccccgacagctgcccggtggtgctgcacagcttcacgcagctagaccccgacctgccgcgcccggagagctccacgcaggagatcggtgaggagctgatcaacggagtcatctactccatctccctgcgcaaggtkcagctgcaccacggaggcaacaaggggcagcgctggctcgggtatgagaatgagtcggccctgaacctttatgagacttgcaaggtgcggaccgtgaaggctggcacgctggagaagctggtrgagcacctggtgccagccttccagggcagcgacctctcctacgtcaccatcttcctgtgtacctatagagccttcaccaccacccaacaggtcctggacctgctgttcaaaagatacggctgcatcctcccctattccgacgaggatggtggaccccaggaccaacttaaaaatgccatctcctccatcctgggcacctggctggaccagtactcggaggatttctgtcaacctccggactttccctgcctcaagcagctggtggcctacgtgcagctcaacatgccaggctcagacctggagcgccgtgcccaccttctcctggcccagctggagcactcrgaacccattgaggcagagcctgaggctctgtcaccagtgccagctctaaaaccaactccagagctcgagctagctctaacaccagctcgagcacccagcccagtgccggctccagccccggagccagagccagctccaacaccagctccaggttcagagctagaagtagctccagcaccagctccggagctccagcaggctccagagccagctgtgggactagaatcggctccagcgccagctctggaactagagccagctccagaacaggatccagctccctcacaaactctagagctggagccagctccagcrccagttccatcattacagccttcctggccttcacctgtggttgcagagaaygggctgagtgaggagaagcctcacctcttggtgttccctccagatctggtggcagagcagtttacactgatggatgcggaactgttcaagaaggtggtgccctaccactgcctgggctccatctggtcccagcgggacaagaagggcaaggagcacctggcgcccaccatccgcgccactgtcacccagttcaacagtgtggccaactgtgtcatcaccacctgcctcgggaaccgaagcacgaaagccccagacagggccagggtggtggagcactggatcgaggtggccagggagtgccggatcctcaagaacttctcgtcactgtatgccatcctctckgccctgcagagcaactccatccaccgtctgaagaagaygtgggaagacgtttccagggacagtttccggatctttcagaagctgtcagagatcttctcagatgagaacaactactcattgagccgggagctgctcatcaaggagggcacctccaagtttgccaccctggagatgaaccccaagagagcccagaaacggccgaaggagacgggcatcatccagggcaccgttccctacctgggcacgttcctcaccgacctggtgatgctggacactgccatgaaggactatctgtatggcagactcatcaactttgagaagaggaggaaggagttcgaggtgatcgcccagatcaagctgctgcagtcggcctgcaacaactacagcatcgcgccagatgagcaatttggggcctggttccgggccgtggagcggctcagcgagactgagagctacaacctgtcgtgcgagctggagcccccatcygagtcagccagcaacaccctcaggaccaagaagaacacagccattgtcaagcgctggagcgaccgccaggcccccagyactgagctcagtaccagtggcagctcccactccaagtcctgtgaccagctcaggtgtggcccctacctcagcagcggggacatcgctgacgcgctcagcgtgcactcggcyggctcctctagctccgacgtggaggagatcaacmtcagcttcgtcccggagtctcctgatggccaggaaaagaagttctgggaatcagcctcacagtcatccccggagacctccggcatcagctcagcctccagcagcacctcgtcctcctcagcctccaccacgcccgtggctgccacacgcacccacaagcgctctgtctcagggctctgcaactccagctccgcgctgccgctctacaaccagcaggtgggcgactgctgtatcatccgcgtcagcctggacgtggacaatggcaacatgtacaagagcatcctggtaagccggcgggggtggcctgggtgcctccctccactggcggcaaatgcaccc

SEQ ID NO: 365 - DNA, 3835 bp, Homo sapiens
ggacaacaggcccggctgccccgcggggggaacacccgcgtcggcccgcgggagggaggcctgagcgcgcccccgagcgcgtccccgagctcacgcggcggggcgcgcccctcgcacctgcgggcgggctggggcggggccgcggctgtccccgcccacccgggcccgagcccggggagccggggcggaaccgagcggcgaggcccgagcggccggagcgcggcgcggcgcagacaatgggagcggcgctggcggctgccggggcggccccgagggccgcagagtcctgggcccggcggggaccggaggccgcgccatgagccccgcagccgggcgcacccctgcgccgcgcgcgggcccaggcgagcggcctctgcgagccccgggtcccgccctggggccggcgatgtgccaccgaggctgaggatgatggtagattgccagagctccacgcaggagatcggtgaggagctgatcaacggagtcatctactccatctccctgcgcaaggtkcagctgcaccacggaggcaacaaggggcagcgctggctcgggtatgagaatgagtcggccctgaacctttatgagacttgcaaggtgcggaccgtgaaggctggcacgctggagaagctggtrgagcacctggtgccagccttccagggcagcgacctctcctacgtcaccatcttcctgtgtacctatagagccttcaccaccacccaacaggtcctggacctgctgttcaaaagatacggctgcatcctcccctattccgacgaggatggtggaccccaggaccaacttaaaaatgccatctcctccatcctgggcacctggctggaccagtactcggaggatttctgtcaacctccggactttccctgcctcaagcagctggtggcctacgtgcagctcaacatgccaggctcagacctggagcgccgtgcccaccttctcctggcccagctggagcactcrgaacccattgaggcagagcctgaggctctgtcaccagtgccagctctaaaaccaactccagagctcgagctagctctaacaccagctcgagcacccagcccagtgccggctccagccccggagccagagccagctccaacaccagctccaggttcagagctagaagtagctccagcaccagctccggagctccagcaggctccagagccagctgtgggactagaatcggctccagcgccagctctggaactagagccagctccagaacaggatccagctccctcacaaactctagagctggagccagctccagcrccagttccatcattacagccttcctggccttcacctgtggttgcagagaaygggctgagtgaggagaagcctcacctcttggtgttccctccagatctggtggcagagcagtttacactgatggatgcggaactgttcaagaaggtggtgccctaccactgcctgggctccatctggtcccagcgggacaagaagggcaaggagcacctggcgcccaccatccgcgccactgtcacccagttcaacagtgtggccaactgtgtcatcaccacctgcctcgggaaccgaagcacgaaagccccagacagggccagggtggtggagcactggatcgaggtggccagggagtgccggatcctcaagaacttctcgtcactgtatgccatcctctckgccctgcagagcaactccatccaccgtctgaagaagaygtgggaagacgtttccagggacagtttccggatctttcagaagctgtcagagatcttctcagatgagaacaactactcattgagccgggagctgctcatcaaggagggcacctccaagtttgccaccctggagatgaaccccaagagagcccagaaacggccgaaggagacgggcatcatccagggcaccgttccctacctgggcacgttcctcaccgacctggtgatgctggacactgccatgaaggactatctgtatggcagactcatcaactttgagaagaggaggaaggagttcgaggtgatcgcccagatcaagctgctgcagtcggcctgcaacaactacagcatcgcgccagatgagcaatttggggcctggttccgggccgtggagcggctcagcgagactgagagctacaacctgtcgtgcgagctggagcccccatcygagtcagccagcaacaccctcaggaccaagaagaacacagccattgtcaagcgctggagcgaccgccaggcccccagyactgagctcagtaccagtggcagctcccactccaagtcctgtgaccagctcaggtgtggcccctacctcagcagcggggacatcgctgacgcgctcagcgtgcactcggcyggctcctctagctccgacgtggaggagatcaacmtcagcttcgtcccggagtctcctgatggccaggaaaagaagttctgggaatcagcctcacagtcatccccggagacctccggcatcagctcagcctccagcagcacctcgtcctcctcagcctccaccacgcccgtggctgccacacgcacccacaagcgctctgtctcagggctctgcaactccagctccgcgctgccgctctacaaccagcaggtgggcgactgctgtatcatccgcgtcagcctggacgtggacaatggcaacatgtacaagagcatcctggtgaccagccaagataaggctccggctgtaatccgcaaggccatggacaaacacaacctggaggaggaggarccggaggactatgagctgctgcagattctctcagatgaccggaagctgaagatccctgaaaacgccaacgtcttctatgccatgaactctacygccaactatgactttgtcctsaagaagcggaccttcaccaagggagtgaaggtcaagcacggagccagctccaccctccctcgcatgaagcagaaaggactcaagattgccaagggcatcttctgagggcatcctcccagggtctggctggctggtagccaagcacttatggaccagagtggcccaggccagctgggcgccttcctcccacctgccagcccagggtaccccagactccagtttcatcctgaacctctcccgctgctgggattgacgcctgccattggtcaggctgacctggcctcccgtggaccactcgctgccttaggtgccttctgctctctggaaccagaggactagctgacttttgccaaggagcagtgccaacgggcatggcatggtgccctgcctgcccccgggcrccacctctgtacacttccctgacaccttcccaggtgtgggtcactgccacctgtgcccatgggcaccccagagcacccactgtgaccactgcagttctctcatgcccacaggcactggcctgtgaccttcgcaggggtcccggcccctcccaccactctagcctttctcaggctgcaccaaagattccatcatcagggccaactgagagtgagggagtctcacccaccgcttaccccagccctcccctgggagcagagagagaaaccctcttcatggaccagactctgcacccggtgagtgaggacagtcccagctgagtcccatcgatgttgaatctcatgccactgcaagtgccattcaccactgcgtcctgggctttacgagaccatgcaagacgggggttagtgaggaaggaggatttggggtgggggtggggtgattgaatatttgtataaaaagcaaaaagaaaaaaaaaatgtttgtttactgattggggaggggcaatatttatttgttgtaaatagcaaatgctagacttgaatattatattaaaatcctgtttctacta

SEQ ID NO: 366 - DNA, 4226 bp, Homo sapiens
ggacaacaggcccggctgccccgcggggggaacacccgcgtcggcccgcgggagggaggcctgagcgcgcccccgagcgcgtccccgagctcacgcggcggggcgcgcccctcgcacctgcgggcgggctggggcggggccgcggctgtccccgcccacccgggcccgagcccggggagccggggcggaaccgagcggcgaggcccgagcggccggagcgcggcgcggcgcagacaatgggagcggcgctggcggctgccggggcggccccgagggccgcagagtcctgggcccggcggggaccggaggccgcgccatgagccccgcagccgggcgcacccctgcgccgcgcgcgggcccaggcgagcggcctctgcgagccccgggtcccgccctggggccggcgatgtgccaccgaggctgaggatgatggtagattgccagagctccacgcaggagatcggtgaggagctgatcaacggagtcatctactccatctccctgcgcaaggtkcagctgcaccacggaggcaacaaggggcagcgctggctcgggtatgagaatgagtcggccctgaacctttatgagacttgcaaggtgcggaccgtgaaggctggcacgctggagaagctggtrgagcacctggtgccagccttccagggcagcgacctctcctacgtcaccatcttcctgtgtacctatagagccttcaccaccacccaacaggtcctggacctgctgttcaaaagatacggctgcatcctcccctattccgacgaggatggtggaccccaggaccaacttaaaaatgccatctcctccatcctgggcacctggctggaccagtactcggaggatttctgtcaacctccggactttccctgcctcaagcagctggtggcctacgtgcagctcaacatgccaggctcagacctggagcgccgtgcccaccttctcctggcccagctggagcactcrgaacccattgaggcagagcctgaggctctgtcaccagtgccagctctaaaaccaactccagagctcgagctagctctaacaccagctcgagcacccagcccagtgccggctccagccccggagccagagccagctccaacaccagctccaggttcagagctagaagtagctccagcaccagctccggagctccagcaggctccagagccagctgtgggactagaatcggctccagcgccagctctggaactagagccagctccagaacaggatccagctccctcacaaactctagagctggagccagctccagcrccagttccatcattacagccttcctggccttcacctgtggttgcagagaaygggctgagtgaggagaagcctcacctcttggtgttccctccagatctggtggcagagcagtttacactgatggatgcggaactgttcaagaaggtggtgccctaccactgcctgggctccatctggtcccagcgggacaagaagggcaaggagcacctggcgcccaccatccgcgccactgtcacccagttcaacagtgtggccaactgtgtcatcaccacctgcctcgggaaccgaagcacgaaagccccagacagggccagggtggtggagcactggatcgaggtggccagggagtgccggatcctcaagaacttctcgtcactgtatgccatcctctckgccctgcagagcaactccatccaccgtctgaagaagaygtgggaagacgtttccagggacagtttccggatctttcagaagctgtcagagatcttctcagatgagaacaactactcattgagccgggagctgctcatcaaggagggcacctccaagtttgccaccctggagatgaaccccaagagagcccagaaacggccgaaggagacgggcatcatccagggcaccgttccctacctgggcacgttcctcaccgacctggtgatgctggacactgccatgaaggactatctgtatggcagactcatcaactttgagaagaggaggaaggagttcgaggtgatcgcccagatcaagctgctgcagtcggcctgcaacaactacagcatcgcgccagatgagcaatttggggcctggttccgggccgtggagcggctcagcgagactgagagctacaacctgtcgtgcgagctggagcccccatcygagtcagccagcaacaccctcaggaccaagaagaacacagccattgtcaagcgctggagcgaccgccaggcccccagyactgagctcagtaccagtggcagctcccactccaagtcctgtgaccagctcaggtgtggcccctacctcagcagcggggacatcgctgacgcgctcagcgtgcactcggcyggctcctctagctccgacgtggaggagatcaacmtcagcttcgtcccggagtctcctgatggccaggaaaagaaggtgactgcctgcccttctccccaatatcctttcccatctccccactccaaatccatgcatggggccaggaagccctggatcctgaacacagcttctagaaggttccccatctggcagctggcctggggtgcccccacagggcagtgggatctgctgatcttaccgtctccctcagttctgggaatcagcctcacagtcatccccggagacctccggcatcagctcagcctccagcagcacctcgtcctcctcagcctccaccacgcccgtggctgccacacgcacccacaagcgctctgtctcagggctctgcaactccagctccgcgctgccgctctacaaccagcaggtgggcgactgctgtatcatccgcgtcagcctggacgtggacaatggcaacatgtacaagagcatcctggtaagccggcgggggtggcctgggtgcctccctccactggcggcaaatgcaccctgaacacagtgcaccatccctgccctyccggggtctaccttgtagttggcggggaaggacagatgtcagccaggtacagaaatgaagaaggtagtgatcagggacaaggctggcctgagggcagagggggaggaaaggagcagccgtgcaaagcycccaggagtgaccagccaagataaggctccggctgtaatccgcaaggccatggacaaacacaacctggaggaggaggarccggaggactatgagctgctgcagattctctcagatgaccggaagctgaagatccctgaaaacgccaacgtcttctatgccatgaactctacygccaactatgactttgtcctsaagaagcggaccttcaccaagggagtgaaggtcaagcacggagccagctccaccctccctcgcatgaagcagaaaggactcaagattgccaagggcatcttctgagggcatcctcccagggtctggctggctggtagccaagcacttatggaccagagtggcccaggccagctgggcgccttcctcccacctgccagcccagggtaccccagactccagtttcatcctgaacctctcccgctgctgggattgacgcctgccattggtcaggctgacctggcctcccgtggaccactcgctgccttaggtgccttctgctctctggaaccagaggactagctgacttttgccaaggagcagtgccaacgggcatggcatggtgccctgcctgcccccgggcrccacctctgtacacttccctgacaccttcccaggtgtgggtcactgccacctgtgcccatgggcaccccagagcacccactgtgaccactgcagttctctcatgcccacaggcactggcctgtgaccttcgcaggggtcccggcccctcccaccactctagcctttctcaggctgcaccaaagattccatcatcagggccaactgagagtgagggagtctcacccaccgcttaccccagccctcccctgggagcagagagagaaaccctcttcatggaccagactctgcacccggtgagtgaggacagtcccagctgagtcccatcgatgttgaatctcatgccactgcaagtgccattcaccactgcgtcctgggctttacgagaccatgcaagacgggggttagtgaggaaggaggatttggggtgggggtggggtgattgaatatttgtataaaaagcaaaaagaaaaaaaaaatgtttgtttactgattggggaggggcaatatttatttgttgtaaatagcaaatgctagacttgaatattatattaaaatcctgtttctacta

SEQ ID NO: 367 - DNA, 3705 bp, Homo sapiens
cgggctcacagcggtggcaaagcccagcmgcgcgggccgcgccgccgcccccgccgcgcgccgggccggccccgcgcccgcgctgcgagccttccatggtgcagcgcatgtgggccgaggcggccgggcctgctggcggcgccgagccgctgtttccgggctcccggcggagccgcagcgtgtgggacgccgtgcgcctggaggtgggcgtccccgacagctgcccggtggtgctgcacagcttcacgcagctagaccccgacctgccgcgcccggagagctccacgcaggagatcggtgaggagctgatcaacggagtcatctactccatctccctgcgcaaggtkcagctgcaccacggaggcaacaaggggcagcgctggctcgggtatgagaatgagtcggccctgaacctttatgagacttgcaaggtgcggaccgtgaaggctggcacgctggagaagctggtrgagcacctggtgccagccttccagggcagcgacctctcctacgtcaccatcttcctgtgtacctatagagccttcaccaccacccaacaggtcctggacctgctgttcaaaaggtacggtagatgtgacgccctcacggcctcctctagatacggctgcatcctcccctattccgacgaggatggtggaccccaggaccaacttaaaaatgccatctcctccatcctgggcacctggctggaccagtactcggaggatttctgtcaacctccggactttccctgcctcaagcagctggtggcctacgtgcagctcaacatgccaggctcagacctggagcgccgtgcccaccttctcctggcccagctggagcactcrgaacccattgaggcagagcctgaggctctgtcaccagtgccagctctaaaaccaactccagagctcgagctagctctaacaccagctcgagcacccagcccagtgccggctccagccccggagccagagccagctccaacaccagctccaggttcagagctagaagtagctccagcaccagctccggagctccagcaggctccagagccagctgtgggactagaatcggctccagcgccagctctggaactagagccagctccagaacaggatccagctccctcacaaactctagagctggagccagctccagcrccagttccatcattacagccttcctggccttcacctgtggttgcagagaaygggctgagtgaggagaagcctcacctcttggtgttccctccagatctggtggcagagcagtttacactgatggatgcggaactgttcaagaaggtggtgccctaccactgcctgggctccatctggtcccagcgggacaagaagggcaaggagcacctggcgcccaccatccgcgccactgtcacccagttcaacagtgtggccaactgtgtcatcaccacctgcctcgggaaccgaagcacgaaagccccagacagggccagggtggtggagcactggatcgaggtggccagggagtgccggatcctcaagaacttctcgtcactgtatgccatcctctckgccctgcagagcaactccatccaccgtctgaagaagaygtgggaagacgtttccagggacagtttccggatctttcagaagctgtcagagatcttctcagatgagaacaactactcattgagccgggagctgctcatcaaggagggcacctccaagtttgccaccctggagatgaaccccaagagagcccagaaacggccgaaggagacgggcatcatccagggcaccgttccctacctgggcacgttcctcaccgacctggtgatgctggacactgccatgaaggactatctgtatggcagactcatcaactttgagaagaggaggaaggagttcgaggtgatcgcccagatcaagctgctgcagtcggcctgcaacaactacagcatcgcgccagatgagcaatttggggcctggttccgggccgtggagcggctcagcgagactgagagctacaacctgtcgtgcgagctggagcccccatcygagtcagccagcaacaccctcaggaccaagaagaacacagccattgtcaagcgctggagcgaccgccaggcccccagyactgagctcagtaccagtggcagctcccactccaagtcctgtgaccagctcaggtgtggcccctacctcagcagcggggacatcgctgacgcgctcagcgtgcactcggcyggctcctctagctccgacgtggaggagatcaacmtcagcttcgtcccggagtctcctgatggccaggaaaagaagttctgggaatcagcctcacagtcatccccggagacctccggcatcagctcagcctccagcagcacctcgtcctcctcagcctccaccacgcccgtggctgccacacgcacccacaagcgctctgtctcagggctctgcaactccagctccgcgctgccgctctacaaccagcaggtgggcgactgctgtatcatccgcgtcagcctggacgtggacaatggcaacatgtacaagagcatcctggtgaccagccaagataaggctccggctgtaatccgcaaggccatggacaaacacaacctggaggaggaggarccggaggactatgagctgctgcagattctctcagatgaccggaagctgaagatccctgaaaacgccaacgtcttctatgccatgaactctacygccaactatgactttgtcctsaagaagcggaccttcaccaagggagtgaaggtcaagcacggagccagctccaccctccctcgcatgaagcagaaaggactcaagattgccaagggcatcttctgagggcatcctcccagggtctggctggctggtagccaagcacttatggaccagagtggcccaggccagctgggcgccttcctcccacctgccagcccagggtaccccagactccagtttcatcctgaacctctcccgctgctgggattgacgcctgccattggtcaggctgacctggcctcccgtggaccactcgctgccttaggtgccttctgctctctggaaccagaggactagctgacttttgccaaggagcagtgccaacgggcatggcatggtgccctgcctgcccccgggcrccacctctgtacacttccctgacaccttcccaggtgtgggtcactgccacctgtgcccatgggcaccccagagcacccactgtgaccactgcagttctctcatgcccacaggcactggcctgtgaccttcgcaggggtcccggcccctcccaccactctagcctttctcaggctgcaccaaagattccatcatcagggccaactgagagtgagggagtctcacccaccgcttaccccagccctcccctgggagcagagagagaaaccctcttcatggaccagactctgcacccggtgagtgaggacagtcccagctgagtcccatcgatgttgaatctcatgccactgcaagtgccattcaccactgcgtcctgggctttacgagaccatgcaagacgggggttagtgaggaaggaggatttggggtgggggtggggtgattgaatatttgtataaaaagcaaaaagaaaaaaaaaatgtttgtttactgattggggaggggcaatatttatttgttgtaaatagcaaatgctagacttgaatattatattaaaatcctgtttctacta

SEQ ID NO: 368 - DNA, 4149 bp, Homo sapiens
cccaccccagcccaaccacagcatccacacrggaatggtgccccaggggaccaaggtcttgtccttcaccatcccacagcccygctctgcagagtggtggccgggcccggccgaggacccccaggcctctgcggcctcagcctgggggcagccctggccctgccacttggcatcttggtgaccctggggtggccatcagctcgaggagacttgagcccctcctcgcttaccagcatgcccaccstggggtggcttccggagaaccgggacatctctgaggaccagtcctcagcagagcagacccaggcactggcttctcaggccagccagttcctggccaaggtggagtcctttgaaagactgatacaggcaggacgtctcatgccccaggaccaagtcaagggcttccagcggctgaaggctgcccacgcggccctagaggaggagtacctgaaggcttgtcgggagcaacaccctgcccagcygcttgccggctccaaggggacgcctggaagatttgatcctcgcagggagctggaggcagagatataccgtctgggaagctgcctggaagagctgaaggaacacatagaccagacccagcaagagcctgagccgcccgggtcagactcagctctggacagcaccccagccctgccctgcctycatcagccaaygcacctgcctgctccttctggacaagcccccatgccagccatcaagacctcctgccctgagcctgctaccaccactgccgccgccagcactggcccctgcccattgcacgtaaatgtggaggtgagctctggcaacagtgaggtggaggacaggccacaggaccccctggcccgactcaggcacaaggagctgcagatggarcaagtttaccatggcctcatggagcggtacctcagtgtgaagtctctcccagaagccatgagaatggaggaggaggaagaaggagaggaggaggaggaggaagaggggggaggtgactccctggaagttgatggggtggctgcaactccagggaaagcagaggccaccagggtcctcccaaggcagtgcccggtgcaggctgagaaaagtcatggggctcccctggaggaggccacggagaagatggtatctatgaagccaccaggtttccaggcatccctggctagagacgggcacatgtcaggcctgggcaaggctgaggcagcccctccaggccctggygtgccaccccaccctccaggcaccaagtccgcagcatcccaccaaagtagtatgaccagcctggagggaagcggcatctctgagcgccttccacagaagcctttgcaccgaggcggtgggccccacctggaggagacctggatggcrtccccagagacagacagtggctttgtgggctcagaaacaagcagagtttcacccctcacccagactccagagcaccggctctcccacatcagcacagcaggaacattagcccagccctttgctgcatctgtgcccagggatggagcttcctaccccaaggccaggggttctctgattcccagaagagccacagagcccagcacaccccggagccaagcacagaggtacctctccagcccaagtgggcctctccggcagagggcacccaacttcagcctggagcggacactggcagccgagatggcggttcctggctcagagtttgaggggcacaaacggatttctgaacagccccttcccaacaagacaatcagcccacccccagcccccgcccctgcygctgcgcctctaccctgtggaccaacrgagaccatccccagcttcctgctcaccagggcagggcgagaycaggccatctgtgagctgcaagaagaggtgtcccggcttcgtctgcggctggaagacagcctgcaccrgccactccagggcagcccgrcacrcccagcatctgcctttgaccgccccgcccggacccgcggccrgccagcagactccccagccacctggggctcccattatggcagtaaatccacagagagattgcctggtgagcctagaggtgaagagcagattgtccctccaggaaggcagcgagccaggtcttcctcagtgcctcgrgaggtgctccgactgtccctgagttcagaatctgagctgccctccctaccactgttctctgagaagagcaagaccaccaaggacagtccacaggcagctcgggatggaaagagaggggtgggcagtgctggatggccagacagggtcaccttccggggccaatacacaggccacgaataccatgttctgtcccctaaggcggtcccaaaaggcaatggcacagtctcctgtccccactgccggcccattaggacccaggatgcgggtggtgctgtcacaggggacccactgggaccgcctcccgctgatacccttcagtgtcccctgtgtggtcaagttgggtctcccccagaggcagatggtccaggctcagccacctctggggcagagaaggccaccacgaggagaaaagcaycttcaactcccagccccaagcagaggagcaagcaggcggggtcgtcgccacgcccaccccccggactgtggtrtctggcaacagcgcccccagcaccagcccctccagcctttgcctacatctcctcggttcccrtcatgccttatccacctgccgctgtgtactatgcgcctgcaggacctacctcagcccaaccagctgccaagtggccgcccacagcctctcccccaccagcccggagacaccggcactccatccagctcgacctgggcgacctagaggagctcaacaaggccctgagccgggccgtgcaggctgccgagagcgtccgctctaccaccaggcagatgagaagctcgctgtcagccgacctgcgccaggctcacagcctgcggggctcctgcctcttctgacttcactgggggcccagaggcagatgggtgggtgggtgggcaggtggcctgccaggccaggagtgggctggagctgctgaggcccagaaggcccgcatagttcctcaccaggagggtctccctccagcacaggtcccgcctgctcagtccctgtgctttccaagtggagggggtgtcagctyggtcaccaagagaagtgacttcccaggagcaccagtcccctcacagaggtgctgtgagcgaggcctccttcggtccaggcagaacctcaggcagtctctcctggtcctgcatgtgtgcaactccagctaataataggtattttatatacagatggacagatatttttttaaactggggagttttcctgatcttgggtcctctttagggggccagacaagaaaggcctacggtttctggagcaaacctgtcccccacctgtgaccagtcactctggggcaagcatcactgggaagggcatagccggagacctttctcctagtgactggtagtcagtggggcattttaggatgtcagggccccagggtgacatgtgtccagcttttctatggcagcagaggcctttccctcagacaagctacaaagtgcccaggatgccatccaccatggtccccttcagtacctcacgcatggtccccagcttctcctaggatcccagtggcrtttatcagtggccagctacctgccaggcccgggctggggcacggtctgyggccatgaggccaggccgcctcccgcacccctaccccgtggcagcagcatacctctgcatttctggaatgtgtgtgcatcaatgatgtttgtatatttgaggcatttaaaaatctattttcgttacgagggcaaatgaagaatgaatattgatcttaaaaaaagaaaagaagacaaaaaaaatacccaaagccatccgtgtctctgctgtatgtcattaacttttgccttcaatgtcaagtttatggggtggtaggtttgatgcccagccaagccctttcccaggggacctgttgggtgctctgcctgcctccctctggtggcttctgtttctccagttttccccctttgcctatctcagaaccataaatctttcaactgcggagggccttgaggtggggctgcctagccaagtcccttttgactgaggccagagatgtaaatgaggcacacagcaagttgctgtctacaagagtatgcacc

SEQ ID NO: 369 - DNA, 3244 bp, Homo sapiens
gtacctcagtgtgaagtctctcccagaagccatgagaatggaggaggaggaagaaggagaggaggaggaggaggaagaggggggaggtgactccctggaagttgatggggtggctgcaactccagggaaagcagaggccaccagggtcctcccaaggcagtgcccggtgcaggctgagaaaagtcatggggctcccctggaggaggccacggagaagatggtatctatgaagccaccaggtttccaggcatccctggctagagacgggcacatgtcaggcctgggcaaggctgaggcagcccctccaggccctggygtgccaccccaccctccaggcaccaagtccgcagcatcccaccaaagtagtatgaccagcctggagggaagcggcatctctgagcgccttccacagaagcctttgcaccgaggcggtgggccccacctggaggagacctggatggcrtccccagagacagacagtggctttgtgggctcagaaacaagcagagtttcacccctcacccagactccagagcaccggctctcccacatcagcacagcaggaacattagcccagccctttgctgcatctgtgcccagggatggagcttcctaccccaaggccaggggttctctgattcccagaagagccacagagcccagcacaccccggagccaagcacagaggtacctctccagcccaagtgggcctctccggcagagggcacccaacttcagcctggagcggacactggcagccgagatggcggttcctggctcagagtttgaggggcacaaacggatttctgaacagccccttcccaacaagacaatcagcccacccccagcccccgcccctgcygctgcgcctctaccctgtggaccaacrgagaccatccccagcttcctgctcaccagggcagggcgagaycaggccatctgtgagctgcaagaagaggtgtcccggcttcgtctgcggctggaagacagcctgcaccrgccactccagggcagcccgrcacrcccagcatctgcctttgaccgccccgcccggacccgcggccrgccagcagactccccagccacctggggctcccattatggcagtaaatccacagagagattgcctggtgagcctagaggtgaagagcagattgtccctccaggaaggcagcgagccaggtcttcctcagtgcctcgrgaggtgctccgactgtccctgagttcagaatctgagctgccctccctaccactgttctctgagaagagcaagaccaccaaggacagtccacaggcagctcgggatggaaagagaggggtgggcagtgctggatggccagacagggtcaccttccggggccaatacacaggccacgaataccatgttctgtcccctaaggcggtcccaaaaggcaatggcacagtctcctgtccccactgccggcccattaggacccaggatgcgggtggtgctgtcacaggggacccactgggaccgcctcccgctgatacccttcagtgtcccctgtgtggtcaagttgggtctcccccagaggcagatggtccaggctcagccacctctggggcagagaaggccaccacgaggagaaaagcaycttcaactcccagccccaagcagaggagcaagcaggcggggtcgtcgccacgcccaccccccggactgtggtrtctggcaacagcgcccccagcaccagcccctccagcctttgcctacatctcctcggttcccrtcatgccttatccacctgccgctgtgtactatgcgcctgcaggacctacctcagcccaaccagctgccaagtggccgcccacagcctctcccccaccagcccggagacaccggcactccatccagctcgacctgggcgacctagaggagctcaacaaggccctgagccgggccgtgcaggctgccgagagcgtccgctctaccaccaggcagatgagaagctcgctgtcagccgacctgcgccaggctcacagcctgcggggctcctgcctcttctgacttcactgggggcccagaggcagatgggtgggtgggtgggcaggtggcctgccaggccaggagtgggctggagctgctgaggcccagaaggcccgcatagttcctcaccaggagggtctccctccagcacaggtcccgcctgctcagtccctgtgctttccaagtggagggggtgtcagctyggtcaccaagagaagtgacttcccaggagcaccagtcccctcacagaggtgctgtgagcgaggcctccttcggtccaggcagaacctcaggcagtctctcctggtcctgcatgtgtgcaactccagctaataataggtattttatatacagatggacagatatttttttaaactggggagttttcctgatcttgggtcctctttagggggccagacaagaaaggcctacggtttctggagcaaacctgtcccccacctgtgaccagtcactctggggcaagcatcactgggaagggcatagccggagacctttctcctagtgactggtagtcagtggggcattttaggatgtcagggccccagggtgacatgtgtccagcttttctatggcagcagaggcctttccctcagacaagctacaaagtgcccaggatgccatccaccatggtccccttcagtacctcacgcatggtccccagcttctcctaggatcccagtggcrtttatcagtggccagctacctgccaggcccgggctggggcacggtctgyggccatgaggccaggccgcctcccgcacccctaccccgtggcagcagcatacctctgcatttctggaatgtgtgtgcatcaatgatgtttgtatatttgaggcatttaaaaatctattttcgttacgagggcaaatgaagaatgaatattgatcttaaaaaaagaaaagaagacaaaaaaaatacccaaagccatccgtgtctctgctgtatgtcattaacttttgccttcaatgtcaagtttatggggtggtaggtttgatgcccagccaagccctttcccaggggacctgttgggtgctctgcctgcctccctctggtggcttctgtttctccagttttccccctttgcctatctcagaaccataaatctttcaactgcggagggccttgaggtggggctgcctagccaagtcccttttgactgaggccagagatgtaaatgaggcacacagcaagttgctgtctacaagagtatgcacc

SEQ ID NO: 370 - DNA, 5874 bp, Homo sapiens
gattggaggcctttgtttgccgctcaactccaggaaaccacccgcgctcggcggccgccagcagtcctggaaggtgggaatgatctggagaccaggagtaagaagacctgagtttagatccccagcctggattcagttctgagtgcctcagttttcccttccacaaaatgaggaggggcaactgaagacggaggtgcccaaggtcagaaggaagcaccacacagagggcacaggcaggatggccgatgstgacaggaaccagcggtgactctggggcccctggcagcagmtctgtctcctgaagatgaagtggcccaggtgaagcccaggccagccccaatggccagctcggagactgagatccgctgggctgagcctggcctggggaagggcccccagcggcggcgctgggcctgggccgaggacaagagggatgtggatagaagtagttcacaaagctgggaagaagagagactctttcccaatgccaccagccccgagctcctagaggacttccgcctggcccagcagcacctgccgcccctggagtgggacccacacccgcagcccgatgggcatcaggattccgagtcaggagagacttcgggagaagaggctgaagcagaggatgtggacagcccagcaagttcccatgagcctcttgcctggctyccccagcagggccgtcagctggacatgactgaagaggagccagatgggaccctcggaagtctggaggttgaggaggctggagagagctcctcaaggttggggtatgaggctggtctcagcttggaaggccatggaaacaccagccccatggctcttgggcatggtcaggccaggggctgggtggcttctggcgaacaagccagtggggacaaactttctgaacattccgaggtcaacccatccgttgaactcagcccggcaaggtcctggagcagtgggacagtgagcctcgaccaccctagtgacagccttgattctacctgggaaggagagaccgatggcccccagcccactgccctggcagaaaccttgccagagggccccagccaccacctcctaagcccagatggcagaactggaggcagtgttgctcgggcaacccccatggaattccaggactcctcagctcccccrgcccagagtccgcagcatgccacagatagatggagragagaaacgaccagattcttctgccctcagcccaaggaacacatctggaagcagacaaagacgtcacctaagccactcccttcccgattcattggctccatcagccccctgaatccccagcccaggccaacgcggcagggcaggccgctgcccagacagggagccactctggctggccgctcctcttctaatgcccccaagtatggccgggggcagttgaactacccactccctgatttctccaaggtagggccccgggtgagattccccaaagatgagagctaccgtccccccaagtccagaagccacaacaggaagcctcaggcccctgccaggcccctcatcttcaagtctccagctgagattgtgcaggaggtgctgttgagcagtggagaagcagccctggcaaaggacacgcctcctgcccaccctatcaccagggtaccccaagaatttcagacgcctgagcaagccactgagctggtccatcagctccaggaagactaccacaggctcctcaccaagtacgctgaggccgagaacaccattgaccagctacgcctcggggccaaggtgaacctgttctctgacccaccccagcccaaccacagcatccacacrggaatggtgccccaggggaccaaggtcttgtccttcaccatcccacagcccygctctgcagagtggtggccgggcccggccgaggacccccaggcctctgcggcctcagggtggccatcagctcgaggagacttgagcccctcctcgcttaccagcatgcccaccstggggtggcttccggagaaccgggacatctctgaggaccagtcctcagcagagcagacccaggcactggcttctcaggccagccagttcctggccaaggtggagtcctttgaaagactgatacaggcaggacgtctcatgccccaggaccaagtcaagggcttccagcggctgaaggctgcccacgcggccctagaggaggagtacctgaaggcttgtcgggagcaacaccctgcccagcygcttgccggctccaaggggacgcctggaagatttgatcctcgcagggagctggaggcagagatataccgtctgggaagctgcctggaagagctgaaggaacacatagaccagacccagcaagagcctgagccgcccgggtcagactcagctctggacagcaccccagccctgccctgcctycatcagccaaygcacctgcctgctccttctggacaagcccccatgccagccatcaagacctcctgccctgagcctgctaccaccactgccgccgccagcactggcccctgcccattgcacgtaaatgtggaggtgagctctggcaacagtgaggtggaggacaggccacaggaccccctggcccgactcaggcacaaggagctgcagatggarcaagtttaccatggcctcatggagcggtacctcagtgtgaagtctctcccagaagccatgagaatggaggaggaggaagaaggagaggaggaggaggaggaagaggggggaggtgactccctggaagttgatggggtggctgcaactccagggaaagcagaggccaccagggtcctcccaaggcagtgcccggtgcaggctgagaaaagtcatggggctcccctggaggaggccacggagaagatggtatctatgaagccaccaggtttccaggcatccctggctagagacgggcacatgtcaggcctgggcaaggctgaggcagcccctccaggccctggygtgccaccccaccctccaggcaccaagtccgcagcatcccaccaaagtagtatgaccagcctggagggaagcggcatctctgagcgccttccacagaagcctttgcaccgaggcggtgggccccacctggaggagacctggatggcrtccccagagacagacagtggctttgtgggctcagaaacaagcagagtttcacccctcacccagactccagagcaccggctctcccacatcagcacagcaggaacattagcccagccctttgctgcatctgtgcccagggatggagcttcctaccccaaggccaggggttctctgattcccagaagagccacagagcccagcacaccccggagccaagcacagaggtacctctccagcccaagtgggcctctccggcagagggcacccaacttcagcctggagcggacactggcagccgagatggcggttcctggctcagagtttgaggggcacaaacggatttctgaacagccccttcccaacaagacaatcagcccacccccagcccccgcccctgcygctgcgcctctaccctgtggaccaacrgagaccatccccagcttcctgctcaccagggcagggcgagaycaggccatctgtgagctgcaagaagaggtgtcccggcttcgtctgcggctggaagacagcctgcaccrgccactccagggcagcccgrcacrcccagcatctgcctttgaccgccccgcccggacccgcggccrgccagcagactccccagccacctggggctcccattatggcagtaaatccacagagagattgcctggtgagcctagaggtgaagagcagattgtccctccaggaaggcagcgagccaggtcttcctcagtgcctcgrgaggtgctccgactgtccctgagttcagaatctgagctgccctccctaccactgttctctgagaagagcaagaccaccaaggacagtccacaggcagctcgggatggaaagagaggggtgggcagtgctggatggccagacagggtcaccttccggggccaatacacaggccacgaataccatgttctgtcccctaaggcggtcccaaaaggcaatggcacagtctcctgtccccactgccggcccattaggacccaggatgcgggtggtgctgtcacaggggacccactgggaccgcctcccgctgatacccttcagtgtcccctgtgtggtcaagttgggtctcccccagaggcagatggtccaggctcagccacctctggggcagagaaggccaccacgaggagaaaagcaycttcaactcccagccccaagcagaggagcaagcaggcggggtcgtcgccacgcccaccccccggactgtggtrtctggcaacagcgcccccagcaccagcccctccagcctttgcctacatctcctcggttcccrtcatgccttatccacctgccgctgtgtactatgcgcctgcaggacctacctcagcccaaccagctgccaagtggccgcccacagcctctcccccaccagcccggagacaccggcactccatccagctcgacctgggcgacctagaggagctcaacaaggccctgagccgggccgtgcaggctgccgagagcgtccgctctaccaccaggcagatgagaagctcgctgtcagccgacctgcgccaggctcacagcctgcggggctcctgcctcttctgacttcactgggggcccagaggcagatgggtgggtgggtgggcaggtggcctgccaggccaggagtgggctggagctgctgaggcccagaaggcccgcatagttcctcaccaggagggtctccctccagcacaggtcccgcctgctcagtccctgtgctttccaagtggagggggtgtcagctyggtcaccaagagaagtgacttcccaggagcaccagtcccctcacagaggtgctgtgagcgaggcctccttcggtccaggcagaacctcaggcagtctctcctggtcctgcatgtgtgcaactccagctaataataggtattttatatacagatggacagatatttttttaaactggggagttttcctgatcttgggtcctctttagggggccagacaagaaaggcctacggtttctggagcaaacctgtcccccacctgtgaccagtcactctggggcaagcatcactgggaagggcatagccggagacctttctcctagtgactggtagtcagtggggcattttaggatgtcagggccccagggtgacatgtgtccagcttttctatggcagcagaggcctttccctcagacaagctacaaagtgcccaggatgccatccaccatggtccccttcagtacctcacgcatggtccccagcttctcctaggatcccagtggcrtttatcagtggccagctacctgccaggcccgggctggggcacggtctgyggccatgaggccaggccgcctcccgcacccctaccccgtggcagcagcatacctctgcatttctggaatgtgtgtgcatcaatgatgtttgtatatttgaggcatttaaaaatctattttcgttacgagggcaaatgaagaatgaatattgatcttaaaaaaagaaaagaagacaaaaaaaatacccaaagccatccgtgtctctgctgtatgtcattaacttttgccttcaatgtcaagtttatggggtggtaggtttgatgcccagccaagccctttcccaggggacctgttgggtgctctgcctgcctccctctggtggcttctgtttctccagttttccccctttgcctatctcagaaccataaatctttcaactgcggagggccttgaggtggggctgcctagccaagtcccttttgactgaggccagagatgtaaatgaggcacacagcaagttgctgtctacaagagtatgcacc

SEQ ID NO: 371 - DNA, 1902 bp, Homo sapiens
atggagcggtacctcagtgtgaagtctctcccagaagccatgagaatggaggaggaggaagaaggagaggaggaggaggaggaagaggggggaggtgactccctggaagttgatggggtggctgcaactccagggaaagcagaggccaccagggtcctcccaaggcagtgcccggtgcaggctgagaaaagtcatggggctcccctggaggaggccacggagaagatggtatctatgaagccaccaggtttccaggcatccctggctagagacgggcacatgtcaggcctgggcaaggctgaggcagcccctccaggccctggygtgccaccccaccctccaggcaccaagtccgcagcatcccaccaaagtagtatgaccagcctggagggaagcggcatctctgagcgccttccacagaagcctttgcaccgaggcggtgggccccacctggaggagacctggatggcrtccccagagacagacagtggctttgtgggctcagaaacaagcagagtttcacccctcacccagactccagagcaccggctctcccacatcagcacagcaggaacattagcccagccctttgctgcatctgtgcccagggatggagcttcctaccccaaggccaggggttctctgattcccagaagagccacagagcccagcacaccccggagccaagcacagaggtacctctccagcccaagtgggcctctccggcagagggcacccaacttcagcctggagcggacactggcagccgagatggcggttcctggctcagagtttgaggggcacaaacggatttctgaacagccctttcccaacaagacaatcagcccacccccagcccccgcccctgcygctgcgcctctaccctgtggaccaacrgagaccatccccagcttcctgctcaccagggcagggcgagaycaggccatctgtgagctgcaagaagaggtgtcccggcttcgtctgcggctggaagacagcctgcaccrgccactccagggcagcccgrcacrcccagcatctgcctttgaccgccccgcccggacccgcggccrgccagcagactccccagccacctggggctcccattatggcagtaaatccacagagagattgcctggtgagcctagaggtgaagagcagattgtccctccaggaaggcagcgagccaggtcttcctcagtgcctcgrgaggtgctccgactgtccctgagttcagaatctgagctgccctccctaccactgttctctgagaagagcaagaccaccaaggacagtccacaggcagctcgggatggaaagagaggggtgggcagtgctggatggccagacagggtcaccttccggggccaatacacaggccacgaataccatgttctgtccctaaggcggtcccaaaaggcaatggcacagtctcctgtccccactgccggcccattaggacccaggatgcgggtggtgctgtcacaggggacccactgggaccgcctcccgctgatacccttcagtgtcccctgtgtggtcaagttgggtctcccccagaggcagatggtccaggctcagccacctctggggcagagaaggccaccacgaggagaaaagcaycttcaactcccagccccaagcagaggagcaagcaggcggggtcgtcgccacgcccaccccccggactgtggtrtctggcaacagcgcccccagcaccagcccctccagcctttgcctacatctcctcggttcccrtcatgccttatccacctgccgctgtgtactatgcgcctgcaggacctacctcagcccaaccagctgccaagtggccgcccacagcctctcccccaccagcccggagacaccggcactccatccagctcgacctgggcgacctag

SEQ ID NO: 372 - DNA, 6571 bp, Homo sapiens
caaagcctggagaagtggaatctcgtcagcgccgctccctgcgcgggactcgcggarcggcactgagcatgctcagttgccggarcccgttctggtctcaagtaggaagctagtgcgctgtaaccgcatctgatctgggcgctccgggaagggcgagactggagcagagccgctgggcgccggagccgaggcgagcgccgcgcgcaccactggttggagttgctgtgggtgagctgctgtggtctgtagccaagcatgctgtggtcggatctgcccagccgtggaacagaaacatttgctggatggaaaatccataaaagaaagctcctgtgaaaagctgaggctgacaataatttaagcaaaatcagatcgatctctttgggctgcctgacctccttgggtgcttgctattaattaacagactttgtggggaaaaaaaggagcttgccttctgagctttgtaccaaagacctgggaaaaatttcaaattataacctatttcctgcaccattgctgacgcctggtgatccatgtcagaagtacttccagctgactcaggtgttgacaccttggcagtgtttatggccagcagcggaactacagacgtcacaaatcggaacagcccagccacaccaccaaacacccttaacctccgatcctcccacaatgaactgttgaacgctgaaataaaacacacagaaaccaagaacagcacacctcccaaatgcaggaaaaaatatgcactaactaacatccaggcggccatgggcctctcggatccagctgcacagcccctgctgggaaatggctctgccaacatcaagctggtgaaaaatggggagaaccagctccgtaaggctgcagagcaagggcagcaggaccccaacaaaaacctgagccccactgcagtcatcaacataacttctgagaagttagagggtaaagagccccacccacaggattcctcgagctgtgagattttaccctcccagcccaggagaactaagagcttcctaaattacyatgcagatctggaaacctcagccagagaactagagcagaaccraggcaatcaccatgggactgcggaagagaaatcccagccagtccagggccaggcctccaccatcattgggaatgghgatttgctgctgcagaaaccaaacagaccccagtccagccctgaagacggccaagtagccacagtgtcatccagcccagaraccaagaaggatcatccgaaaacaggggccaaaaccgactgtgcactgcaccggatccagaacctggcaccgagcgatgaggagtccagctggacaacgttgtcccaagacagtgcctcacccagctccccggatgaaacagatatatggagtgatcactcatttcagactgatccagatttgccgcctggctggaaaagagtcagtgacattgccgggacctattattggcacatcccaacaggaacgactcagtgggaacggcccgtctccatcccagcagatctccagggttctaggaaagggtcacttagttctgtaacgccatctcccaccccagagaacgagaaacagccatggagtgattttgctgttctgaatgggggaaagattaatagtgacatttggaaggcaaccactgttaacccggaccccagtttaaaagagtttgaaggagcaaccctacgctatgcatctttgaaactcagaaatgccccacaccctgatgatgatgattcttgtagtatcaacagtgacccagaagccaagtgttttgctgtgcgttctctgggatgggtagagatggcagaagaggacctcgcccccgstaaaagtagtgttgcggtcaacaactgcatcaggcaactttcctactgcaaaaatgacatccgagacacagtcgggatttggggagaggggaaagacatgtacctgatcctggagaatgacatgctcagcctggtggaccccatggaccgcagcgtgctgcactcgcagcccatcgtcagcatccgcgtgtggggcgtgggccgcgacaatggccgggattttgcttatgtagcaagagataaagatacaagaattttgaaatgtcatgtatttcgatgtgacacaccagcaaaagccattgccacaagtctccacgagatctgctccaagattatggctgaacggaagaatgccaaagcgctggcctgcagctccttacaggaaagggccaatgtgaacctcgatgtccctttgcaagtagattttccaacaccaaagactgagctggtccagaagttccacgtgcrgtacttgggcatgttacctgtagacaaaccagtcggaatggatattttgaacagtgccatagaaaatcttatgacctcatccaacaaggaggactggctgtcagtgaacatgaacgtggctgatgccactgtgactgtcatcagtgaaaagaatgaagaggaagtcttagtggaatgtcgtgtgcgattcctgtccttcatgggtgttgggaaggacgtccacacatttgccttcatcatggacacggggaaccagcgctttgagtgccacgttttctggtgcgagcctaatgctggtaacgtgtctgaggcggtgcaggccgcctgcatgttacgatatcagaagtgcttggtagccaggccgccttctcagaaagttcgaccacctccaccgccagcagattcagtaaccagaagagtcacaaccaatgtaaaacgaggggtcttatccctcattgacactttgaaacagaaacgccctgtcaccgaaatgccatagctgcacatgcaaaaggactcggctatttacctgaagattgactagctacactaaagaaaatgaactccgccatccgaccttccatccagttgctgatgctttgtcttcagagaatttacccttaaccaagcagtgttagacaagcatgttctctcgtcttgccaccatcatgtgatatgaaaagaagcatgaataattttttttgctgtaagttacatcatgcgcagtggaaggtctttttcttattgtaaatattgtgaacattacttaacttcacacacacacagagaagagtgtggccccacccctcctagtgaactaacgctgcgtccttggaatgaatgatgcgtgagttagtttcactgtcttcttggctggacctgtcacaagcaacctttaagtcctacagcactttgccctgttttcaacattggagtaggcactgcatagcagataccattgaattgctgtaaaaataggatggcgagtttgtgttttaatttttcataaaattgaacctgttggttgacaaaattggctgttggcatcagtatagaaaccaactggcagctttccctgacaagctctttgacacatggacaccatttcatgtctacagctgtttgtgggatgttggaaaaaaatgaaacttcaaaattgatgaaaaactaaattcgaggaattaaaatcgaacaaaacatagcctttcttttccgatggttttcaaactgattatttttaaaagagattaataaaatcataatgcattttgggtgggacatatttcaaacttctgccttatattgtacggtgcagctagagaattatagttcactatggccattctctacataaacattaagatgaaatactcctcatcagcctttcatccttagtttgagaattagctgatatgcaatttgaagttgaggaaatatcattgatatttctatcatgcacgattattttagatttctaccaccgtgtgatttttgctagtccatgtgctagaggtaaacgttctgctggaattctgcatccagctctatccccctctgatgctttttgcccagaaagctgtctgtccatcatgtattgtccatggcaacaaattacattaggttgaacctttccttgattttatgtatttaatattagaatttgttggactcaactagatatattttttaatttatattttttccattttactttgaagatttgaaatgttcatacctgagcaaagtctacacaggagtaatggactgtttaacaagtttcccaaaacagcattttcctgctccttcgtatgtaggtgagaaacttagctggaaagacatacaaatttagactctcgttgacattgtcgttttaaaaggaagttgctaaggcgatcaatctcaatattagtcttgtttacttcttcttaatgtcaaaattaacatttacaacatccaattataaaagtaatgctttatgtttatacactgctatgtacttgtcaaaatggtttccacattcttatcacatctgagccttaccaggtagagaaggtactaaatacactttagaagtaaaaatatgaagtaccgagaggctaaacccactggcctaagatctcaccaaagttcatgaaaaccaggactaggacccacggctcccaaagcccgttcttgctgtgttgtgctgcctccatatccgtcaggaagagcctttccagaatgattctgggcatatactaagaagagcaggtatggaaagatctattgtcagggaatcttagaattccctacacgagtgggagaaagatgtccaaattccttacgcagtggtattcatgatggtgccctatctaagtccaggactgttttcctacagcgtgcctcaaaagtgttgtagagggcaggattctacattcacagcctgttccatctacgagattttccagatgctacttgtggtagacattcctaactcatggtacttagccaccagagatcatgatggaatgagtgggtggcttttctacctgccattccctcagaattcatgaggggtgggggacagggggaccggaattgtcttagcaccccaatgttatgacaaaactatgctactttagaaacgcagtctgtttttcaccaattgacatactactgatctgaagtaaccagtgccatcataagaaattactgcattaagaaaatccttgctgtgccctttgaaaagctgttcagaaatcatttacagtgatctttcatctcggtcgctgtagtgaaacattttagtgtgataaatttcaaaattctaaacaaattacccacttttatattggaaatctctaccagaactccctcttcattttttaaggcatacatttgcttgttttcaagatcaagaattctgagctagctttaagtagcaaactgatttatatgtgcaattataggatgcattaagatgaatgatagcctttacatattgaaaaytttgcagacgttttgttttgaaaatggcattgtatagtaaatgcaaattaattttgtaaaattatgttaaagagtatgttcagacactttctgccatggccaaaaagtatgtatgaaagtatgtgtgtatttgtttgtaaaaggatgccaatgttttacctgatatcttagtgacacttcagttatctatgcattctttagatctgtgattcggtaaacaggcagccatgttcacgatgccttctatgtcttaccatatttttaattaacctgttaaatacagcttaaaatatttttattttatttattctatttttactgaaatatactgcattattgtgttaatgtattmtctttcctggatattatctcccagtgtatccagatctaagtaatctcagtgaactatacattgcctaaaaagtggttttgtaatgatttgtagtcacatttctattgggatatgtagaagaaaaggcaaaatgcttaaagttccttttattttttaaaagcagctagatagacacagacttgccacctcatacatctgctccttggcaacatcaaggggaacgactagccaacatgcctatggctaaaaactttcctttgcagactaaagcactgcttggtgcttcrtttttctacccttcacaacatgtgtgatttcatctaagagatatatacatgtacacatgccctttgtttccacctggatacaagatcactcatagctaattaggaccattgttttttgttcatctgtcttgttgcatgaagggacattagacccatttccattaaaataagttcttggtgataaactgtggcactgctacttctttttaaatccactttatgatttcaagatggacacttgtaagatgactcgacacaaggccattgcctggaagccccagagctttcctctgtttgtatggcccgttcatgtcccaggcattgcaacacaaactcaagatttcaccacaacatgacaagcattttcctaactgatattagcacaatttaactaataagccccttcgctctctagttggccaggcttaacctaatacacatctaacgtgtgtgccacacggccagtagaaagtttaacttcagcttcagggsaaagatacccactcacaccgtgtcaacgcaagcagtagttcctggcctccagagcagcttacttcccctgaaagaacgctttgttttcctttatgcccttttcctgttgaccacttttacacatttaaatgtaatttgttgtgagaataaatt

SEQ ID NO: 373 - DNA, 4268 bp, Homo sapiens
ctggagcagagccgctgggcgccggagccgaggcgagcgccgcgcgcaccactggttggagttgctgtgggtgagctgctgtggtctgtagccaagcatgctgtggtcggatctgcccagccgtggaacagaaacatttgctggatggaaaatccataaaagaaagctcctgtgaaaagctgaggctgacaataatttaagcaaaatcagatcgatctctttgggctgcctgacctccttgggtgcttgctattaattaacagactttgtggggaaaaaaaggagcttgccttctgagctttgtaccaaagacctgggaaaactaaccatctcagtctttcctgaggacttgggaactgccgaggcctctgccaatgtgttgactgtcgctatgggctcactgttgtccaggcagctcatatttcaaattataacctatttcctgcaccattgctgacgcctggtgatccatgtcagaagtacttccagctgactcaggtgttgacaccttggcagtgtttatggccagcagcggaactacagacgtcacaaatcggaacagcccagccacaccaccaaacacccttaacctccgatcctcccacaatgaactgttgaacgctgaaataaaacacacagaaaccaagaacagcacacctcccaaatgcaggaaaaaatatgcactaactaacatccaggcggccatgggcctctcggatccagctgcacagcccctgctgggaaatggctctgccaacatcaagctggtgaaaaatggggagaaccagctccgtaaggctgcagagcaagggcagcaggaccccaacaaaaacctgagccccactgcagtcatcaacataacttctgagaagttagagggtaaagagccccacccacaggattcctcgagctgtgagattttaccctcccagcccaggagaactaagagcttcctaaattacyatgcagatctggaaacctcagccagagaactagagcagaaccraggcaatcaccatgggactgcggaagagaaatcccagccagtccagggccaggcctccaccatcattgggaatgghgatttgctgctgcagaaaccaaacagaccccagtccagccctgaagacggccaagtagccacagtgtcatccagcccagaraccaagaaggatcatccgaaaacaggggccaaaaccgactgtgcactgcaccggatccagaacctggcaccgagcgatgaggagtccagctggacaacgttgtcccaagacagtgcctcacccagctccccggatgaaacagatatatggagtgatcactcatttcagactgatccagatttgccgcctggctggaaaagagtcagtgacattgccgggacctattattggcacatcccaacaggaacgactcagtgggaacggcccgtctccatcccagcagatctccagggttctaggaaagggtcacttagttctgtaacgccatctcccaccccagagaacgaggatttgcatgcagccactgttaacccggaccccagtttaaaagagtttgaaggagcaaccctacgctatgcatctttgaaactcagaaatgccccacaccctgatgatgatgattcttgtagtatcaacagtgacccagaagccaagtgttttgctgtgcgttctctgggatgggtagagatggcagaagaggacctcgcccccgstaaaagtagtgttgcggtcaacaactgcatcaggcaactttcctactgcaaaaatgacatccgagacacagtcgggatttggggagaggggaaagacatgtacctgatcctggagaatgacatgctcagcctggtggaccccatggaccgcagcgtgctgcactcgcagcccatcgtcagcatccgcgtgtggggcgtgggccgcgacaatggccgggattttgcttatgtagcaagagataaagatacaagaattttgaaatgtcatgtatttcgatgtgacacaccagcaaaagccattgccacaagtctccacgagatctgctccaagattatggctgaacggaagaatgccaaagcgctggcctgcagctccttacaggaaagggccaatgtgaacctcgatgtccctttgcaagtagattttccaacaccaaagactgagctggtccagaagttccacgtgcrgtacttgggcatgttacctgtagacaaaccagtcggaatggatattttgaacagtgccatagaaaatcttatgacctcatccaacaaggaggactggctgtcagtgaacatgaacgtggctgatgccactgtgactgtcatcagtgaaaagaatgaagaggaagtcttagtggaatgtcgtgtgcgattcctgtccttcatgggtgttgggaaggacgtccacacatttgccttcatcatggacacggggaaccagcgctttgagtgccacgttttctggtgcgagcctaatgctggtaacgtgtctgaggcggtgcaggccgcctgcatgttacgatatcagaagtgcttggtagccaggccgccttctcagaaagttcgaccacctccaccgccagcagattcagtaaccagaagagtcacaaccaatgtaaaacgaggggtcttatccctcattgacactttgaaacagaaacgccctgtcaccgaaatgccatagctgcacatgcaaaaggactcggctatttacctgaagattgactagctacactaaagaaaatgaactccgccatccgaccttccatccagttgctgatgctttgtcttcagagaatttacccttaaccaagcagtgttagacaagcatgttctctcgtcttgccaccatcatgtgatatgaaaagaagcatgaataattttttttgctgtaagttacatcatgcgcagtggaaggtctttttcttattgtaaatattgtgaacattacttaacttcacacacacacagagaagagtgtggccccacccctcctagtgaactaacgctgcgtccttggaatgaatgatgcgtgagttagtttcactgtcttcttggctggacctgtcacaagcaacctttaagtcctacagcactttgccctgttttcaacattggagtaggcactgcatagcagataccattgaattgctgtaaaaataggatggcgagtttgtgttttaatttttcataaaattgaacctgttggttgacaaaattggctgttggcatcagtatagaaaccaactggcagctttccctgacaagctctttgacacatggacaccatttcatgtctacagctgtttgtgggatgttggaaaaaaatgaaacttcaaaattgatgaaaaactaaattcgaggaattaaaatcgaacaaaacatagcctttcttttccgatggttttcaaactgattatttttaaaagagattaataaaatcataatgcattttgggtgggacatatttcaaacttctgccttatattgtacggtgcagctagagaattatagttcactatggccattctctacataaacattaagatgaaatactcctcatcagcctttcatccttagtttgagaattagctgatatgcaatttgaagttgaggaaatatcattgatatttctatcatgcacgattattttagatttctaccaccgtgtgatttttgctagtccatgtgctagaggtaaacgttctgctggaattctgcatccagctctatccccctctgatgctttttgcccagaaagctgtctgtccatcatgtattgtccatggcaacaaattacattaggttgaacctttccttgattttatgtatttaatattagaatttgttggactcaactagatatattttttaatttatattttttccattttactttgaagatttgaaatgttcatacctgagcaaagtctacacaggagtaatggactgtttaacaagtttcccaaaacagcattttcctgctccttcgtatgtaggtgagaaacttagctggaaagacatacaaatttagactctcgttgacattgtcgttttaaaaggaagttgctaaggcgatcaatctcaatattagtcttgtttacttcttcttaatgtcaaaattaacatttacaacatccaattataaaagtaatgctttatgtttataaaaaaaaaaaaaaaaaaaaaaaaaaaaaaaaaaaaaaaaaaaaaaaaaaaaaaaaaaaaaaaaaaaaaaaaaaaaaaaaaaaaaaaaaaaaaaaaaaaa

SEQ ID NO: 374 - DNA, 3332 bp, Homo sapiens
cccaggtttactcttacgccactgacgtaacgtcatcgtgcgggacgtggacggaagaaaaaagagagtgagcgagcgccggaatcagcccggcgtggagtgcggacccgcggtagtgccagggggcgaaggcggcggtggtgaggaagatactttggttagtgaccacatcgcagcatgttgagtcaagtttaccgctgtgggttccagcccttcaaccaacatcttctgccctgggtcaagtgtacaaccgtcttcagatctcattgtatccagccttcagtcatcagacatgttcgttcttggagcaacatcccgtttatcactgtacccctcagtcgtacacatggcaagtccttcgcccaccgcagtgagctgaagcatgccaagagaatcgtggtgaagctcggcagtgccgtggtgacccraggggatgaatgtggcctggccctggggcgcttggcatctattgttgagcaggtatcagtgctgcagaatcagggcagagagatgatgctggtgaccagtggagccgtagcctttggcaaacaacgcttgcgccatgagatccttctgtctcagagcgtgcggcaggccctccactcggggcagaaccagctgaaagaaatggcaattccagtcttagaggcacgagcctgtgcagctgccggacagagtgggctgatggccttgtatgaggctatgtttacccagtacagcatctgtgctgcccagattttggtgaccaatttggatttccatgatgagcagaagcgccggaacctcaatggaacacttcatgaactccttagaatgaacattgtccccattgtcaacacaaatgatgctgttgtccccccagctgagcccaacagtgacctgcagggggtaaatgttattagtgttaaagataatgatagcctggctgcccgactggctgtggaaatgaaaactgatctcttgattgttctttcagatgtagaaggcctttttgacagccccccaggttcagatgatgcaaagcttattgatatattttatcccggagatcagcagtctgtgacatttggamycaagtctagagtgggaatgggtggcatggaagccaaggtgaaagcagccctctgggctttgcaaggtggcacttctgttgttattgccaatggaacccacccaaaggtgtctgggcacgtcatcacagacattgtggaggggaagaaagttggtaccttcttttcagaagtaaagcctgcaggccctactgttgagcagcagggagaaatggcgcgatmtggaggaaggatgttggccaccttggaacctgagcagagagcagaaattatccatcatctggctgatctgttgacggaccagcgtgatgagatcctgttagccaacaaaaaagacttggaggaggcagaggggagacttgcagctcctctgctgaaacgtttaagcctctccacatccaaattgaacagcctggccatcggtctgcgacagatcgcagcctcctcccaggacagcgtgggacgtgttttgcgccgcacccgaatcgccaaaaacttggaactggaacaagtgactgtcccaattggagttctgctggtgatctttgaatctcgtcctgactgtctaccccaggtggcagctttggctatcgcaagtggcaatggcttgttactcaaaggagggaaggaggctgcacacagcaaccggattctccacctcctgacccaggaggctctctcaatccatggagtcaaggaggccgtgcaactggtgaataccagagaagaagttgaagatctttgccgcctagacaaaatgatagatctgatcattccacgtggctcttcccagctggtcagagacatccagaaagctgctaaggggattccagtgatggggcacagcgaagggatctgtcacatgtatgtggattccgaggccagtgttgataaggtcaccaggctagtcagagactctaaatgtgaatatccagctgcctgtaatgctttggagactttgttaatccaccgggatctgctcaggacaccattatttgaccagatcattgatatgctgagagtggaacaggtaaaaattcatgcaggccccaaatttgcctcctatctgaccttcagcccctcygaagtgaagtcactccgaactgagtatggggacctggaattatgcattgaagtagtggacaacgttcaggatgccattgaccacatccacaagtatggcagctcccacacggatgtcatcgtcacagaggacgaaaacacagcggagttcttcctgcagcacgtagacagtgcctgtgtgttctggaatgccagcactcgcttttctgatggttaccgctttggactgggagctgaagtgggaatcagtacatcgagaatccacgcccggggaccagtaggacttgagggactgcttactactaagtggctgctgcgagggaaggaccacgtggtctcagatttctcagagcatggaagtttaaaatatcttcatgagaacctccctattcctcagagaaacaccaactgaaaagagccaggaaaacccgggaattttccaaaaggtcttcacgttaaacttgtcttatctcaggagagagcccgctcttgtctcccagttcctggtagggtctgcctgttggaaagtgtacctggatgcttctgggctccgtttggcaatagcartcttggctgatgtgcacagtctggctcccagctcaccctttttttttaaagtaagaaaatagttgctaccgrtagggactttgccaagtccaattatcttctaggattgaaaggtgcattttccccataaaaaaggcgaggaaaacccatggctgctttgtgtcacctcagtgacttacagtcccccttggcatttagttggtactagagccagtcatccttaacaaatcttttcacattttatttctttcacatgyagtcatcttcaaaaaggaaagatttggaattttagaaaaggggcaactcttctttttagcattctcatcagaaatggggtaaattaataagcattccagatgcttgcagcttcctgcatccaggagatgctgtgttccccgtgatgcagctggaacccaagctgcagcaggagatgcaagtttcaggatgttccccactgagctggaggaatatctacagcagtgatgyttgaaatttttgtatgaattattttgtcgtcctacccttttcctccaaaacaaaaattagaggattattttaatactttggattcttcccccttttttgagaaataaagttttttatgaaaagcct

SEQ ID NO: 375 - DNA, 3354 bp, Homo sapiens
aggcggcggtggtgaggaaggtacgcggcgagcggcggggatggctaggcgcccgcgtctctgcggaagctgttgcgcgcccaggctcaagcgcgaggggcgtgagcgccgggccgctggagcggggacgctgccggagcaggtgccggggcccggggatctggcccatggatactttggttagtgaccacatcgcagcatgttgagtcaagtttaccgctgtgggttccagcccttcaaccaacatcttctgccctgggtcaagtgtacaaccgtcttcagatctcattgtatccagccttcagtcatcagacatgttcgttcttggagcaacatcccgtttatcactgtacccctcagtcgtacacatggcaagtccttcgcccaccgcagtgagctgaagcatgccaagagaatcgtggtgaagctcggcagtgccgtggtgacccraggggatgaatgtggcctggccctggggcgcttggcatctattgttgagcaggtatcagtgctgcagaatcagggcagagagatgatgctggtgaccagtggagccgtagcctttggcaaacaacgcttgcgccatgagatccttctgtctcagagcgtgcggcaggccctccactcggggcagaaccagctgaaagaaatggcaattccagtcttagaggcacgagcctgtgcagctgccggacagagtgggctgatggccttgtatgaggctatgtttacccagtacagcatctgtgctgcccagattttggtgaccaatttggatttccatgatgagcagaagcgccggaacctcaatggaacacttcatgaactccttagaatgaacattgtccccattgtcaacacaaatgatgctgttgtccccccagctgagcccaacagtgacctgcagggggtaaatgttattagtgttaaagataatgatagcctggctgcccgactggctgtggaaatgaaaactgatctcttgattgttctttcagatgtagaaggcctttttgacagccccccaggttcagatgatgcaaagcttattgatatattttatcccggagatcagcagtctgtgacatttggamycaagtctagagtgggaatgggtggcatggaagccaaggtgaaagcagccctctgggctttgcaaggtggcacttctgttgttattgccaatggaacccacccaaaggtgtctgggcacgtcatcacagacattgtggaggggaagaaagttggtaccttcttttcagaagtaaagcctgcaggccctactgttgagcagcagggagaaatggcgcgatmtggaggaaggatgttggccaccttggaacctgagcagagagcagaaattatccatcatctggctgatctgttgacggaccagcgtgatgagatcctgttagccaacaaaaaagacttggaggaggcagaggggagacttgcagctcctctgctgaaacgtttaagcctctccacatccaaattgaacagcctggccatcggtctgcgacagatcgcagcctcctcccaggacagcgtgggacgtgttttgcgccgcacccgaatcgccaaaaacttggaactggaacaagtgactgtcccaattggagttctgctggtgatctttgaatctcgtcctgactgtctaccccaggtggcagctttggctatcgcaagtggcaatggcttgttactcaaaggagggaaggaggctgcacacagcaaccggattctccacctcctgacccaggaggctctctcaatccatggagtcaaggaggccgtgcaactggtgaataccagagaagaagttgaagatctttgccgcctagacaaaatgatagatctgatcattccacgtggctcttcccagctggtcagagacatccagaaagctgctaaggggattccagtgatggggcacagcgaagggatctgtcacatgtatgtggattccgaggccagtgttgataaggtcaccaggctagtcagagactctaaatgtgaatatccagctgcctgtaatgctttggagactttgttaatccaccgggatctgctcaggacaccattatttgaccagatcattgatatgctgagagtggaacaggtaaaaattcatgcaggccccaaatttgcctcctatctgaccttcagcccctcygaagtgaagtcactccgaactgagtatggggacctggaattatgcattgaagtagtggacaacgttcaggatgccattgaccacatccacaagtatggcagctcccacacggatgtcatcgtcacagaggacgaaaacacagcggagttcttcctgcagcacgtagacagtgcctgtgtgttctggaatgccagcactcgcttttctgatggttaccgctttggactgggagctgaagtgggaatcagtacatcgagaatccacgcccggggaccagtaggacttgagggactgcttactactaagtggctgctgcgagggaaggaccacgtggtctcagatttctcagagcatggaagtttaaaatatcttcatgagaacctccctattcctcagagaaacaccaactgaaaagagccaggaaaacccgggaattttccaaaaggtcttcacgttaaacttgtcttatctcaggagagagcccgctcttgtctcccagttcctggtagggtctgcctgttggaaagtgtacctggatgcttctgggctccgtttggcaatagcartcttggctgatgtgcacagtctggctcccagctcaccctttttttttaaagtaagaaaatagttgctaccgrtagggactttgccaagtccaattatcttctaggattgaaaggtgcattttccccataaaaaaggcgaggaaaacccatggctgctttgtgtcacctcagtgacttacagtcccccttggcatttagttggtactagagccagtcatccttaacaaatcttttcacattttatttctttcacatgyagtcatcttcaaaaaggaaagatttggaattttagaaaaggggcaactcttctttttagcattctcatcagaaatggggtaaattaataagcattccagatgcttgcagcttcctgcatccaggagatgctgtgttccccgtgatgcagctggaacccaagctgcagcaggagatgcaagtttcaggatgttccccactgagctggaggaatatctacagcagtgatgyttgaaatttttgtatgaattattttgtcgtcctacccttttcctccaaaacaaaaattagaggattattttaatactttggattcttcccccttttttgagaaataaagttttttatgaaaagcct

SEQ ID NO: 376 - DNA, 3403 bp, Homo sapiens
cccaggtttactcttacgccactgacgtaacgtcatcgtgcgggacgtggacggaagaaaaaagagagtgagcgagcgccggaatcagcccggcgtggagtgcggacccgcggtagtgccagggggcgaaggcggcggtggtgaggaagatactttggttagtgaccacatcgcagcatgttgagtcaagtttaccgctgtgggttccagcccttcaaccaacatcttctgccctgggtcaagtgtacaaccgtcttcagatctcattgtatccagccttcagtcatcagacatgttcgttcttggagcaacatcccgtttatcactgtacccctcagtcgtacacatggcaagtccttcgcccaccgcagtgagctgaagcatgccaagagaatcgtggtgaagctcggcagtgccgtggtgacccraggggatgaatgtggcctggccctggggcgcttggcatctattgttgagcaggtatcagtgctgcagaatcagggcagagagatgatgctggtgaccagtggagccgtagcctttggcaaacaacgcttgcgccatgagatccttctgtctcagagcgtgcggcaggccctccactcggggcagaaccagctgaaagaaatggcaattccagtcttagaggcacgagcctgtgcagctgccggacagagtgggctgatggccttgtatgaggctatgtttacccagtacagcatctgtgctgcccagattttggtgaccaatttggatttccatgatgagcagaagcgccggaacctcaatggaacacttcatgaactccttagaatgaacattgtccccattgtcaacacaaatgatgctgttgtccccccagctgagcccaacagtgacctgcagggggtaaatgttattagtgttaaagataatgatagcctggctgcccgactggctgtggaaatgaaaactgatctcttgattgttctttcagatgtagaaggcctttttgacagccccccaggttcagatgatgcaaagcttattgatatattttatcccggagatcagcagtctgtgacatttggamycaagtctagagtgggaatgggtggcatggaagccaaggtgaaagcagccctctgggctttgcaaggtggcacttctgttgttattgccaatggaacccacccaaaggtgtctgggcacgtcatcacagacattgtggaggggaagaaagttggtaccttcttttcagaagtaaagcctgcaggccctactgttgagcagcagggagaaatggcgcgatmtggaggaaggatgttggccaccttggaacctgagcagagagcagaaattatccatcatctggctgatctgttgacggaccagcgtgatgagatcctgttagccaacaaaaaagacttggaggaggcagaggggagacttgcagctcctctgctgaaacgtttaagcctctccacatccaaattgaacagcctggccatcggtctgcgacagatcgcagcctcctcccaggacagcgtgggacgtgttttgcgccgcacccgaatcgccaaaaacttggaactggaacaagtgactgtcccaattggagttctgctggtgatctttgaatctcgtcctgactgtctaccccaggtggcagctttggctatcgcaagtggcaatggcttgttactcaaaggagggaaggaggctgcacacagcaaccggattctccacctcctgacccaggaggctctctcaatccatggagtcaaggaggccgtgcaactggtgaataccagagaagaagttgaagatctttgccgcctagacaaaatgatagatctgatcattccacgtggctcttcccagctggtcagagacatccagaaagctgctaaggggattccagtgatggggcacagcgaagggatctgtcacatgtatgtggattccgaggccagtgttgataaggtcaccaggctagtcagagactctaaatgtgaatatccagctgcctgtaatgctttggagactttgttaatccaccgggatctgctcaggacaccattatttgaccagatcattgatatgctgagagtggaacaggtaaaaattcatgcaggccccaaatttgcctcctatctgaccttcagcccctcygaagtgaagtcactccgaactgagtatggggacctggaattatgcattgaagtagtggacaacgttcaggatgccattgaccacatccacaagtatggcagctcccacacggatgtcatcgtcacagaggacgaaaacacagcggagttcttcctgcagcacgtagacagtgcctgtgtgttctggaatgccagcactcgcttttctgatggttaccgctttggactgggagctgaagtgggaatcagtacatcgagaatccacgcccggggaccagtaggacttgagggactgcttactactaagtggctgctgcgagggaaggaccacgtggtctcagatttctcagagcatggaagtttaaaatatcttcatgagaacctccctattcctcagagaaacaccaactgaaaagagccaggaaaacccgggaattttccaaaaggtcttcacgttaaacttgtcttatctcaggagagagcccgctcttgtctcccagttcctggtagggtctgcctgttggaaagtgtacctggatgcttctgggctccgtttggcaatagcartcttggctgatgtgcacagtctggctcccagctcaccctttttttttaaagtaagaaaatagttgctaccgrtagggactttgccaagtccaattatcttctaggattgaaaggtgcattttccccataaaaaaggcgaggaaaacccatggctgctttgtgtcacctcagtgacttacagtcccccttggcatttagttggtactagagccagtcatccttaacaaatcttttcacattttatttctttcacatgyagtcatcttcaaaaaggaaagatttggaattttagaaaaggggcaactcttctttttagcattctcatcagaaagtcacaaaaatcgatggaatcatttccactgggaagattgaccttttgtatttatttgtggggtaaattaataagcattccagatgcttgcagcttcctgcatccaggagatgctgtgttccccgtgatgcagctggaacccaagctgcagcaggagatgcaagtttcaggatgttccccactgagctggaggaatatctacagcagtgatgyttgaaatttttgtatgaattattttgtcgtcctacccttttcctccaaaacaaaaattagaggattattttaatactttggattcttcccccttttttgagaaataaagttttttatgaaaagcctgtgcgtgattgaa

SEQ ID NO: 377 - DNA, 1082 bp, Homo sapiens
cgctcgcctccctcgctccacgcgcgcccggactcggcggccaggcttgcgcgcggttcccctcccggtgggcggattcctgggcaagatgaagtgggtgtgggcgctcttgctgttggcggcgctgggcagcggccgcgcggagcgcgactgccgagtgagcagcttccgagtcaaggagaacttcgacaaggctcgcttctctgggacctggtacgccatggccaagaaggaccccgagggcctctttctgcaggacaacawcgtcgcggagttctccgtggacgagaccggccagatgagcgccacagccaagggccgagtccgtcttttgaataactgggacgtgtgcgcagacatggtgggcaccttcacagacaccgaggaccctgccaagttcaagatgaagtactggggcgtagcctcctttctccagaaaggaaatgatgaccactggatcgtcgacacrgactacgacacgtatgccgtgcagtactcctgccgcctcctgaacctcgatggcacctgtgctgacagctactccttcgtgttttcccgggaccccaacggcctgcccccagaagcgcagaagattgtaaggcagcggcaggaggagctgtgcctggccaggcagtacaggctgatcgtccacaacggttactgcgatggcagatcagaaagaaaccttttgtagcaatatcaagaatctagtttcatctgagaacttctgattagctctcagtcttcagctctatttatcttaggagtttaatttgcccttctctccccatcttccctcagttcccataaaaccttcattacacataaagatacacgtgggggtcagtgaatctgcttgcctttcctgaaagtttctggggcttaagattccagactctgattcattaaactatagtcacccgtgtcctgtgattttagttttcatttgtgtttatgtctgtgctgcagacggatgggtggggtgcgcttctttataccaggagcacgtggctctttctgacctttggcctgttctagtgcctaatctccattattaaatactggcttctcccaacttcctg

SEQ ID NO: 378 - DNA, 1064 bp, Homo sapiens
cgctccacgcgcgcccggactcggcggccaggcttgcgcgcgtctcccgcagggcggattcctgggcaagatgaagtgggtgtgggcgctcttgctgttggcggcgctgggcagcggccgcgcggagcgcgactgccgagtgagcagcttccgagtcaaggagaacttcgacaaggctcgcttctctgggacctggtacgccatggccaagaaggaccccgagggcctctttctgcaggacaacawcgtcgcggagttctccgtggacgagaccggccagatgagcgccacagccaagggccgagtccgtcttttgaataactgggacgtgtgcgcagacatggtgggcaccttcacagacaccgaggaccctgccaagttcaagatgaagtactggggcgtagcctcctttctccagaaaggaaatgatgaccactggatcgtcgacacrgactacgacacgtatgccgtgcagtactcctgccgcctcctgaacctcgatggcacctgtgctgacagctactccttcgtgttttcccgggaccccaacggcctgcccccagaagcgcagaagattgtaaggcagcggcaggaggagctgtgcctggccaggcagtacaggctgatcgtccacaacggttactgcgatggcagatcagaaagaaaccttttgtagcaatatcaagaatctagtttcatctgagaacttctgattagctctcagtcttcagctctatttatcttaggagtttaatttgcccttctctccccatcttccctcagttcccataaaaccttcattacacataaagatacacgtgggggtcagtgaatctgcttgcctttcctgaaagtttctggggcttaagattccagactctgattcattaaactatagtcacccgtgtcctgtgattttagttttcatttgtgtttatgtctgtgctgcagacggatgggtggggtgcgcttctttataccaggagcacgtggctctttctgacctttggcctgttctagtgcctaatctccattattaaatactggcttctcccaacttcctg

SEQ ID NO: 379 - DNA, 1017 bp, Homo sapiens
catcctttataaaatgaaaaactacttggatgaattattccaaaattcctgcacaagtggacctcagaaggcagacggagcgcgactgccgagtgagcagcttccgagtcaaggagaacttcgacaaggctcgcttctctgggacctggtacgccatggccaagaaggaccccgagggcctctttctgcaggacaacawcgtcgcggagttctccgtggacgagaccggccagatgagcgccacagccaagggccgagtccgtcttttgaataactgggacgtgtgcgcagacatggtgggcaccttcacagacaccgaggaccctgccaagttcaagatgaagtactggggcgtagcctcctttctccagaaaggaaatgatgaccactggatcgtcgacacrgactacgacacgtatgccgtgcagtactcctgccgcctcctgaacctcgatggcacctgtgctgacagctactccttcgtgttttcccgggaccccaacggcctgcccccagaagcgcagaagattgtaaggcagcggcaggaggagctgtgcctggccaggcagtacaggctgatcgtccacaacggttactgcgatggcagatcagaaagaaaccttttgtagcaatatcaagaatctagtttcatctgagaacttctgattagctctcagtcttcagctctatttatcttaggagtttaatttgcccttctctccccatcttccctcagttcccataaaaccttcattacacataaagatacacgtgggggtcagtgaatctgcttgcctttcctgaaagtttctggggcttaagattccagactctgattcattaaactatagtcacccgtgtcctgtgattttagttttcatttgtgtttatgtctgtgctgcagacggatgggtggggtgcgcttctttataccaggagcacgtggctctttctgacctttggcctgttctagtgcctaatctccattattaaatactggcttctcccaacttcctg

SEQ ID NO: 380 - DNA, 1318 bp, Homo sapiens
aggcgccaatttggcatggccagggcctgggcactcacgcaccagggagcctcgcgggtccgctctcgctctgtgaggccacggtcttcccgccaggttgactcgagcctcctgccagagccactggccccggaggccaccctagaccgcagctggcggccgctggcacgagtgcagggtaactgagccagggccgctggcgcatttggcctggccgaggccaccccgcgcggccgctccactgtgcccgaggctgtcctggaggtgaggccggcccacagggaccctgcccgtgcccgggctccgggcggattcctgggcaagatgaagtgggtgtgggcgctcttgctgttggcggcgctgggcagcggccgcgcggagcgcgactgccgagtgagcagcttccgagtcaaggagaacttcgacaaggctcgcttctctgggacctggtacgccatggccaagaaggaccccgagggcctctttctgcaggacaacawcgtcgcggagttctccgtggacgagaccggccagatgagcgccacagccaagggccgagtccgtcttttgaataactgggacgtgtgcgcagacatggtgggcaccttcacagacaccgaggaccctgccaagttcaagatgaagtactggggcgtagcctcctttctccagaaaggaaatgatgaccactggatcgtcgacacrgactacgacacgtatgccgtgcagtactcctgccgcctcctgaacctcgatggcacctgtgctgacagctactccttcgtgttttcccgggaccccaacggcctgcccccagaagcgcagaagattgtaaggcagcggcaggaggagctgtgcctggccaggcagtacaggctgatcgtccacaacggttactgcgatggcagatcagaaagaaaccttttgtagcaatatcaagaatctagtttcatctgagaacttctgattagctctcagtcttcagctctatttatcttaggagtttaatttgcccttctctccccatcttccctcagttcccataaaaccttcattacacataaagatacacgtgggggtcagtgaatctgcttgcctttcctgaaagtttctggggcttaagattccagactctgattcattaaactatagtcacccgtgtcctgtgattttagttttcatttgtgtttatgtctgtgctgcagacggatgggtggggtgcgcttctttataccaggagcacgtggctctttctgacctttggcctgttctagtgcctaatctccattattaaatactggcttctcccaacttcctg

SEQ ID NO: 381 - DNA, 3096 bp, Homo sapiens
atgggcctgctggccagtgctggtttgttgctgttgctggtcatcggccaccccagaagcctaggactgaagtgtggaattcgcatggtcaacatgaaaagtaaggaacctgccgtgggatctagattcttctctagaattagtagttggagaaattcaacagtgactggacatccatggcaggtctccctaaaatcagatgagcaccacttctgtggaggaagcttgattcaagaagatcgggttgttacagcagcacactgcctggacagcctcagtgagaagcagctgaagaatataactgtgacttctggggagtacagcctctttcagaaggataagcaagaacagaatattcctgtctcaaaaattattacccatcctgaatacaacagcygtgaatatatgagtcctgatattgcactgctgtatctaaaacacaaagtcaagtttggaaatgctgttcagccaatctgtcttcctgacagcgatgataaagttgaaccaggaattctttgcttatccagtggatggggcaagatttccaaaacatcagaatattcaaatgtcctacaagaaatggaacttcccatcatggatgacagagcgtgtaatactgtgctcaagagcatgaacctccctcccctgggaaggaccatgctgtgtgctggcttccctgatkggggaatggacgcctgccagggggactctggaggaccactggtttgtagaagaggtggtggaatctggattcttgctgggataacttcctgggtagctggttgtgctggaggttcagttcccgtaagaaacaaccatgtgaaggcatcacttggcattttctccaaagtgtctgagttgatggattttatcactcaaaacctgttcacaggtttggatcggggccaacccctctcaaaagtgggctcaaggtatataacaaaggccctgagttctgtccaagaagtgaatggaagccagagaggaragggtaaggtctgtggaaaaatattgccytcaccattgctggcagagaccagtgaggccatggttccatttgtttctgatacagaagacagtggcagtggctttgagcttaccgttactgctgtacagaagtcagaagcagggtcaggttgtgggagtctggctatattggtagaagaagggacaaatcactctgccaagtatcctgatttgtatcccagtaacayaaggtgtcattggttcatttgtgctccagagaagcacattataaagttgacatttgaggactttgctgtcaaatttagtccaaactgtatttatgatgctgttgtgatttacggtgattctgaagaaaagcacaagttagctaaactttgtggaatgttgaccatcacttcaatattcagttctagtaacatgacggtgatatactttaaaagtgatggtaaaaatcgtttacaaggcttcaaggcyagatttaccattttgccctcagagtctttaaacaaatttgaaccaaagttacctccccaaaacaatcctgtatctaccgtaaaagctattstgcatgatgtctgtggcatccctccatttagtccccagtggctttccagaagaatcgcaggaggggaagaagcctgcccccactgttggccatggcaggtgggtytgaggtttctaggcgattaccaatgtggaggtgccatcatcaacccagtgtggattctgaccgcagcccactgtgtgcaattgaagaataatccactctcctggactattattgctggggaccatgacagaaacctgaaggaatcaacagagcaggtgagaagggccaaacacataatagtgcatgaagactttaacacactaagttatgactctgacattgccctaatacaactaagctytcctctggagtacaactcggtggtgaggccagtatgtctcccacacagcgcagagcctctattttcctcggrgatctgtgctgtgaccggatggggaagcatcagtgcagagctacatctgaacttaaatacatttctaacaacactttctgcttacttcatcatcgagctctctctgaatgtttcttcattagatggtggcctagcaagtcgcctacagcagattcaagtgcatgtgttagaaagagaggtctgtgaacacacttactattctgcccatccaggagggatcacagagaagatgatctgtgctggctttgcagcatctrgagagaaagatttctgccagggagactctggtgggccactagtatgtagacatgaaaatggtccctttgtcctctatggcattgtcagctggggagctggctgtgtccagccatggaagccgggtgtatttgccagagtgatgatcttcttggactggatccaatcaaaaatcaatggtcctgcttcacttcagacaaataataaatgcaaaaccttaaaacaacaattgccaccacccacaccttcaccagacagtgcatcttggccaggttgttgctctgaagcagagctagaaaagcctagaggcttttttcccacaccacggtatctactggattatagaggaagactggaatgttcttgggtgctcagagtttcascaagcagtatggcaaaatttaccattgagtatctgtcactcctggggtctcctgtgtgtcaagactcagttctaattatttatgaagaaagacacagtaagagaaagacggcaggtccaaaggacagtaaaataaccagactttcccaaagttcaaacagagagcacttggtcccttgtgaggatgttcttctgaccaagccagaagggatcatgcagatcccaagaaattctcacagaactactatgggttgccaatggagattagtagcccctttaaatcacatcattcagcttaatattattaacttcccgatgaagccaacaacttttgtctgtcatggtcatctgcgtgtttacgaaggatttggaccaggaaaaaaattaatagctcatttacatggctccaagaaagagtttatcttgatatccagtgctgcttacctgactgtgcattttaagactgatgagtctgagagaaagaggttt

SEQ ID NO: 382 - DNA, 6396 bp, Homo sapiens
cactagacctttcagcaaatgaactaagagatattgatgccctaagccagaaatgctgtataagtgttcatttggagcatcttgaaaagctggagcttcaccagaatgcactcacgagctttccacaacagctatgtgaaactctgaagagtttgacacatttggacttgcacagtaataaatttacatcatttccttcttatttgttgaaaatgagttgtattgctaatcttgatgtctctcgaaatgacattggaccctcagtggttttagatcctacagtgaaatgtccaactctgaaacagtttaacctgtcatataaccagctgtcttttgtacctgagaacctcactgatgtggtagagaaactggagcagctcattttagaaggaaataaaatatcagggatatgctcccccttgagactgaaggaactgaagattttaaaccttagtaagaaccacatttcatccctatcagagaactttcttgaggcttgtcctaaagtggagagtttcagtgccagaatgaattttcttgtttcaggatgctctgtggtacctcaggggaatctgattcagactgtggagtcaggaaagcatttctgtgcctgtgacatttaagttgggtctggaaagaggagcatccaaaaggaccttgaagcttgtgtatggtcagtgtgtcatctcagctgaatctcacaatgatcctaatggtcatacctaggacaggtatgacctctgcccaattgaggaaattgaagccgtgagattttttgtgtgatgcttacagctgctatgcctttcttgcctccttctatgacaatcctaaaattatctcagaacaaattttcctgtattccagaagcaattttaaatcttccacacttgcggtctttagatatgagcagcaatgatattcagtacctaccaggtcccgcacactggaaatctttgaacttaagggaactcttatttagccataatcagatcagcatcttggacttgagtgaaaaagcatatttatggtctagagtagagaaactgcatctttctcacaataaactgaaagagattcctsctgagattggctgtcttgaaaatctgacatctctggatgtcagttacaacttggaactaagatcctttcccaatgaaatggggaaattaagcaaaatatgggatcttcctttggatgaactgcatcttaactttgattttaaacatataggatgtaaagccaaagacatcataaggtttcttcaacagcgattaaaaaaggctgtgccttataaccgaatgaaacttatgattgtgggaaatactgggagtggtaaaaccaccttattgcagcaattaatgaaaaccaagaaatcagatcttggaatgcaaagtgccacagttggcatagatgtgaaagactggcctatccaaataagagacaaaagaaagagagatctcgtcctaaatgtgtgggattttgcaggtcrtgaggaattctatagtactcatccccattttatgacgcagcgagcattgtaccttgctgtctatgacctcagcaagggacaggctgaagttgatgccatgaagccttggctcttcaatataaaggctcgcgcttcttcttcccctgtgattctcgttggcacacatttggatgtttctgatgagaagcaacgcaaagcctgcatgagtaaaatcaccaaggaactcctgaataagcgagggttccctgccatacgagattaccactttgtgaatgccaccgaggaatctgatgctttggcaaaacttcggaaaaccatcataaacgagagccttaatttcaagatccgagatcagcttgttgttggacagctgattccagactgctatgtagaacttgaaaaaatcattttatcggagcgtaaaaatgtgccaattgaatttcccgtaattgaccggaaacgattattacaactagtgagagaaaatcagctgcagttagatgaaaatgagcttcctcacgcagttcactttctaaatgaatcaggagtccttcttcattttcaagacccagcactgcagttaagtgacttgtactttgwggaacccaagtggctttgtaaaatcatggcacagattttgacagtgaaagtggaaggttgtccaaaacaccctaagggmattatttcgcgtagagatgtggaaaaatttctttcaaaraaaaggaaatttccaaagaactacaygwcacagtattttaagctcctagaaaaattccagattgctttgccaataggagaagaatatttgctggttccaagcagtttgtctgaccacaggcctgtgatagagcttccccattgtgagaactctgaaattatcatccgactatatgaaatgccttattttccaatgggattttggtcaagattaatcaatcgattacttgagatttcaccttacatgctttcagggagagaacgagcacttcgcccaaacagaatgtattggcgacaaggcatttacttaaattggtctcctgaagcttattgtctggtaggatctgaagtcttagacaatcatccagagagtttcttaaaaattacagttccttcttgtagaaaaggctgtattcttttgggccaagttgtggaccacattgattctctcatggaagaatggtttcctgggttgctggagattgatatttgtggtgaaggagaaactctgttgaagaaatgggcattatatagttttaatgatggygaagaacatcaaaaaatcttacttgatgacttgatgaagaaagcagaggaaggagatctcttagtaaatccagatcaaccaaggctcaccattccaatatctcagattgcccctgacttgattttggctgacctgcctagaaatattatgttgaataatgatgagttggaatttgaacaagctccagagtttctcctaggtgatggcagttttggatcagtttaccgagcagcctatgaaggagaagaagtggctgtgaagatttttaataaacatacatcactcaggctgttaagacaagagcttgtggtgctttgccacctccaccaccccagtttgatatctttgctggcagctgggattcgtccccggatgttggtgatggagttagcctccaagggttccttggatcgcctgcttcagcaggacaaagccagcctcactagaaccctacagcacaggattgcactccacgtagctgatggtttgagatacctccactcagccatgattatataccgagacctgaaaccccacaatgtgctgcttttcacactgtatcccaatgctgccatcattgcaaagattgctgactacggcattgctcagtactgctgtagaatggggataaaaacatcagagggcacaccagggtttcgtgcacctgaagttgccagaggaaatgtcatttataaccaacaggctgatgtttattcatttggtttactactctatgacattttgacaactggaggtagaatagtagagggtttgaagtttccaratgagtttgatgaattagaaatacaaggaaaattacctgatccagttaaagaatatggttgtgccccatggcctatggttgaraaattaattaaacagtgtttgaaagaaaatcctcaagaaaggcctacttctgcccaggtctttgacattttgaattcagctgaattagtctgtctgacgagacgcattttattacctaaaaacgtaattgttgaatgcatggttgctacacatcacaacagcaggaatgcaagcatttggctgggctgtgggcacaccgacagaggacagctctcatttcttgacttaaatactgaaggatacacttctgaggaagttgctgatagtagaatattgtgcttagccttggtgcatcttcctgttgaaaaggaaagctggattgtgtctgggacacagtctggtactctcctggtcatcaataccgaagatgggaaaaagagacataccctagaaaagatgactgattctgtcacttgtttgtattgcaattccttttccaagcaaagcaaacaaaaaaattttcttttggttggaaccgctgatggcaagttagcaatttttgaagataagactgttaagcttaaaggagctgctcctttgaagatactaaatataggaaatgtcagtactccattgatgtgtttgagtgaatccacaaattcaacggaaagaaatgtaatgtggggaggatgtggcacaaagattttctccttttctaatgatttcaccattcagaaactcattgagacaagaacaagccaactgttttcttatgcagctttcagtgattccaacatcataacagtggtggtagacactgctctctatattgctaagcaaaatagccctgttgtggaagtgtgggataagaaaactgaaaaactctgtggrctaatagactgcgtgcactttttaagggaggtaayggtaaaagaaaacaaggaatcaaaacacaaaatgtcttattctgggagagtgaaaaccctctgccttcagaagaacactgctctttggataggaactggaggaggccatattttactcctggatctttcaactcgtcgacttatacgtgtaatttacaacttttgtaattcggtcagagtcatgatgacagcacagctaggcaaccttaaaaatgtcatgctggtattgggctacaaccggaaaaatactgaaggtacacaaaagcagaaagagatacaatcttgcttgaccgtttgggacatcaatcttccacatgaagtgcaaaatttagaaaaacacattgaagtgagaaaagaattagctgaaaaaatgagacgaacatctgttgagtaagagagaaataggaattgtctttggataggaaaattattctctcctcttgtaaatatttattttaaaaatgttcacatggaaagggtactcacattttttgaaatagctcgtgtgtatgaaggaatgttattatttttaatttaaatatatgtaaaaatacttaccagtaaatgtgtattttaaaraactatttaaaacacaatgttatatttcttataaataccagttactttcgttcattaattaatgaaaataaatctgtgaagtacctaatttaagtactcatactaaaatttataaggccgataattttttgttttcttgtctgtaatggaggtaaactttattttaaattctgtgcttmagacaggactattgcttgtygatttttctagaaatctgcacggtataatgaaaatattaagacagtttcccatgtaatgtattccttcttagattgcatcgaaatgcactatcatatatgcttgtaaatattcaaatgaatttgcactaataaagtcctttgttggtatgtgaattctctttgttgctgttgcaaacagtgcatcttacacaacttcactcaattcaaaagaaaactccattaaaagtactaatgaaaaaacatgacatactgtcaaagtcctcatatctaggaaagacacagaaactctctttgtcacagaaactctctgtgtctttcctagacataatagagttgtttttcaactctatstttgaatgtggataccctgaattttgtataattagtgtaaatacagtgttcagtccttcaagtgatatttttatttttttattcataccactagctacttgttttctaatctgcttcattctaatgcttatattcatcttttccctaaatttgtgatgctgcagatcctacatcattcagatagaaacctttttttttttcagaattatagaattccacagctcctaccaagaccatgaggataaatatctaacacttttcagttgctgaaggagaaaggagctttagttatgatggataaaaatatctgccaccctaggcttccaaattatacttaaattgtttacatagcttaccacaataggagtatcagggccaaatacctatgtaataatttgaggtcatttctgctttaggaaaagtactttcggtaaattctttggccctgaccagtattcattatttcagataattccctgtgataggacaactagtacatttaatattctcagaacttatggcattttactatgtgaaaactttaaatttatttatattaagggtaatcaaattcttaaagatgaaagattttctgtattttaaaggaagctatgctttaacttgttatgtaattaacaaaaaaatcatatataatagagctctttgttccagtgttatctctttcattgttactttgtatttgcaatttwttttaccaaagacaaattaaaaaaatgaataccatatttaaatggaataataaaggttttttaaaaactt

SEQ ID NO: 383 - DNA, 1952 bp, Homo sapiens
ggttgtcttaacaagaagagaaggcttcaatggattctcttgtggtccttgtgctctgtctctcatgtttgcttctcctttcactctggagacagagctctgggagaggaaaactccctcctggccccactcctctcccagtgattggaaatatcctacagataggtattaaggacatcagcaaatccttaaccaatctctcaaaggtctatggccctgtgttcactctgtattttggcctgaaacccatagtggtgctgcatggatatgaagcagtgaaggaagccctgattgatcttggagaggagttttctggaagaggcattttcccactggctgaaagagctaacagaggatttggaattgttttcagcaatggaaagaaatggaaggagatccrgcgtttctccctcatgacgctgcggaattttgggatggggaagaggagcattgaggacygtgttcaagaggaagcccrctgccttgtggaggagttgagaaaaaccaaggcctcaccctgtgatcccactttcatcctgggctgtgctccctgcaatgtgatctgctccattattttccataaacgttttgattataaagatcagcaatttcttaacttaatggaaaagttgaatgaaaacatcaagattktgagcagcccctggatccagatctgcaataatttttctcctatcattgattacttcccgggaactcacaacaaattacttaaaaacgttgcttttatgaaaagttatattttggaaaaagtaaaagaacrccaagaatcaatggacatgaacaaccctcaggactttattgattgcttcctgatgaaaatggagaaggaaaagcacaaccaaccatctgaatttactattgaaagcttggaaaacactgcagttgacttgtttggagctgggacagagacgacaagcacaaccctgagatatgctctccttctcctgctgaagcacccagaggtcacagctaaagtccaggaagagattgaacgtgtgattggcagaaaccggagcccctgcatgcaagacaggagccacatgccctacacagatgctgtggtgcacgaggtccagagatrcmttgascttctccccaccagcctgccccatgcagtgacctgtgacattaaattcagaaactatctcattcccaagggcacaaccatattaatttccctgacttctgtgctacatgacaacaaagaatttcccaacccagagatgtttgaccctcatcactttctggatgaaggtggcaattttaagaaaagtaaatacttcatgcctttctcagcaggaaaacggatttgtgtgggagaagccctggcyggcatggagctgtttttattcctgacctccattttacagaactttaacctgaaatctctggttgacccaaagaaccttgacaccactccagttgtcaatggwtttgcctctgtgccgcccttctaccagctgtgcttcattcctgtctgaagaagagcagatggcctggctgctgctgtgcagtccctgcagctctctttcctctggggcattatccatctttcactatctgtaatgccttttctcacctgtcatctcacattttcccttccctgaagatctagtgaacattcgacctccattacggagagtttcctatgtttcactgtgcaaatatatctgctattctccatactctgtaacagttgcattgactgtcacataatgctcatacttatctaatgttgagttattaatatgttattattaaatagagaaatatgatttgtgtattataattcaaaggcatttcttttctgcatgttctaaataaaaagcattattatttgctgagtcagtttattagaccttccttcttttatgcataatgtaggtcagaaattaaagaaaatagagttccaggaggccatgctggttctc

SEQ ID NO: 384 - DNA, 1432 bp, Homo sapiens
ggttgtcttaacaagaagagaaggcttcaatggattctcttgtggtccttgtgctctgtctctcatgtttgcttctcctttcactctggagacagagctctgggagaggaaaactccctcctggccccactcctctcccagtgattggaaatatcctacagataggtattaaggacatcagcaaatccttaaccaatctctcaaaggtctatggccctgtgttcactctgtattttggcctgaaacccatagtggtgctgcatggatatgaagcagtgaaggaagccctgattgatcttggagaggagttttctggaagaggcattttcccactggctgaaagagctaacagaggatttggaattgttttcagcaatggaaagaaatggaaggagatccrgcgtttctccctcatgacgctgcggaattttgggatggggaagaggagcattgaggacygtgttcaagaggaagcccrctgccttgtggaggagttgagaaaaaccaagggtgggtgaccctactccatatcactgaccttactggactactatcttctctactgacattcttggaaacatttcaggggtggccatatctttcattatgagtcctggttgttagctcatgtgaagcgggggtttgaagctgagagccaagggaatttgcacatatttgtgctgtgtgtgtacaggcatgattgtgcrtacagtgtgggtataaaaggttcatttaatcccatgttctcytgaactttgcttttttgctttcaaataagaaatgatgaatatagattttgagttcattttttgaaagagttaaagagcagtgtttttcccattacctattccagaacatgtcaccagagaatacttgacaagtcaacatggtgggaatggccctatcatacccatatggagcatgaaccaaatggcatgtgcttttatttaattggactgtgtttgtatggtcagcctcactgacttctctggggtttcttttaggcccgtgcttgccattctggccagtaatgacattctacagtttttattgcttaggcatatcttagtgcagttctcatcaattattatttctctgtaaacacagcattattttaaaaatagtattaattatttcttgttactgtattgatttatatattttcagtaaatacatcctgtagcataattctgtgaaatacccaaatgtcaatttataaaatgatttatttaacaagattttacttattagtaataactctgtaatctgcattccctatgtatgatttggctctgtttcagttttgcttatctctttccaaccatatttatgaaattttggcttagaaatttatgttaattattttttttccatggccaactctactcatctatgaagttttacaatgaatctgtttatcagcttggatacc

SEQ ID NO: 385 - DNA, 6035 bp, Homo sapiens
gcggggccagctgcagcgtgtagtgcgagtggggcggacgcgcgcagcccgcccgcccggcgaccagcaaggagttggcatcctttggaagagttcgtgaaagctttctgcccagagctcctggaccaatgcatcttcccaccaccttaaaccactgacagggtcttgctctgtctcccaggctggagtgcagtggtggaatcacagctcactgcagcctcgacgtcctgggctcaagcgatcctcccactttagcctcctgagtagagcagttcagagccccagttgcagacgacttgtcctgccaccaccatgagttctgaatgtgatggtggttccaaagctgtgatgaatggcttggcacctggcagcaatgggcaagacaaagcaactgccgaccctttacgcgcacgctctatttctgctgttaaaatcattcctgtgaagacagtgaaaaacgcctcaggcctagttctccctacagacatggatcytacaaaaatctgcactgggaagggagcggtgactctccgggcctcgtcttcctacagggaaaccccaagcagtagccctgcgagccctcaggaaacccggcaacacgaaagcaaaccaggtctggagccagagccttcttcagcagatgagtggaggctttcttccagtgctgatgccaatggaaatgcccagccctcttcactcgctgccaagggctacagaagtgtgcatcccaaccttccttctgacaagtcccagaggtggccccaccacagccagccagcccgcgcctctggctcctttgcccccattagccagrcgccaccatccttctcaccaccacctccgctggtccctcctgcccyggaggacctccgcagagtctcrgagcctgacctcacrggagctgtttcgagtaccgattccagtcctctactaaatgaagtttcttcttcccttattggaactgattcccaagcctttccatcagttagcaagccttcatccgcctatccctccacaacgattgtcaatcctactattgtgctcttgcaacacaatcgagaacagcaaaaacgactcagtagcctttcagatcctgtctcagaaagaagagtgggagagcaggactcagcaccaacccaggaaaaacccacctcacctggcaaggctattgaaaaaagagcaaaggatgacagtaggcgggtggtgaagagcactcaggacttaagcgatgtttccatggatgaagtgggcatcccactccggaacactgagagatcaaaagactggtacaagactatgtttaaacagatccacaaactgaacagagatgatgattcagatctgtactctcccagatactcattttctgaagacacaaaatctcccctttctgtgcctcgstcaaaaagtgagatgagctrcattgatggtgagaaggtagtcaagaggtcggccacactacccctcccagcccgctcttcctcactgaagtcaagctcagaaagaaatgactgggaacccccagataagaaagtagayacaagaaaatatcgtgcagagcccaagagcatttaygaatatcagcctggcaagtcttccgttctgaccaacgaaaagatgagtcgggatataagcccagaagagatagatttaaagaatgaaccttggtataaattcttttcggaattggagtttgggaaaccgcctcccaaaaagatatgggattatactcctggagactgctctatccttcctagagaggatagaaagagctcagccatcagccctactccggaaatttcttcagagactcctggatatatatattcttccaacttccatgcagtgaagagggaatcagacggggctcctggggatctcacyagcttggagaatgagagacaaatttataaaagtgtcttggaaggtggtgacatccctcttcagggcctgagtgggctcaagcgaccatccagctctgcttccactaaagattcagaatcgccaagacattttataccagctgattacttggaatccacggaagaatttattcgaagacgtcatgatgataaagagatgagacctgccagagccaaatttgactttaaagctcagacactraaggagcttcctctgcagaagggagatattgtttacatttataagcaaattgatcagaactggtatgaaggagaacaccacggccgggtgggaatcttcccacgcacctacatcgagcttcttcctcctgctgagaaggcacagcccaaaaagttgacaccagtgcaggttttggaatatggagaagctattgctaagtttaactttaatggtgatacacaagtagaaatgtccttcagaaagggtgagaggatcacactgctccggcaggtagatgagaactggtacgaagggaggatcccggggacatcccgacaaggcatcttccccatcacctacgtggatgtgatcaagcgaccactggtgaaaaaccctgtggattacatggacctgcctttctcctcctccccaagtcgcagtgccactgcaagcccacagcaacctcaagcccagcagcgaagagtcacccccgacaggagtcaaacctcacaagatttatttagctatcaagcattatatagctatataccacagaatgatgatgagttggaactccgcgatggagatatcgttgatgtcatggaaaaatgtgacgatggatggtttgttggtacttcaagaaggacaargcartttggtacttttccaggcaactatgtaaaacctttgtatctataagaagactgaaaaccatggagattatttttattggaggaggaagcatcattcatgaaccgatctttttagttgagtcagtaggaaaattaatacagtggataaagtaagaagcaaaagacagggacagagaagtgttgtgtttaaaacccaagcctgtctaaggttactgtgtattagacagggccgaactagtgtgctgagcaaaaagaattgaagcaaattgtatttacttagccgcttctgggagccacttcagcctttcccctcccctccacttcttgggtaatctgacctgaagcatagtccaggagcagagttagccagaaatgcctcctgctgccccagccttagagagctcccatctcaatcattgagcctgaaggcttcaagcycaagaatgcaacaagacccccagcctacatttctcagctcccctggagccagctgatcctgtaacgctgctggaggtcagtctgagctaccaagactgtccctagacaaaggtggagtcccccacactgcccaagaccaaatccctcactcaacctgctgaggtgtggatggggaaacagaggcaaaactgaggcacctgatgcattcagcctgctgtgcagcagtgccattgactgccctgatgttcagagagaaacgcacacaaggtttgcccatgagaattggggagcagatggccaagcagataggttatgtctgttttctgagtgatgaagtcaggaagccctgtggctctggaggccacttgtggttcattcttttcccatatccttggcttttagaaatggttaccttcaggacagtgcagctgcatttatcagagcactattgctaagttttcttttctggcttgtgtttttctgggacagtttagaattgggaggcctattctcatagaacaccaaaaatgatgttcagtgattcatttaacatacaccaatgtactctrgctgctggggggacaaccataagcaagacatgcccagggtttgccgtggctccagatctactccctgtaggagttcaaggatcacacaaacggtagtaaccagggttgtgaatctgagtacaccctggcaaggcttctcttcagactgaagcagcaattctgccactaccagcagcaaccaggabgtctgttctttgtgggggccagatcagaagagagaggcccctgtgacgcccgggctgcttggtcacaactctgtccaattcaaggatgtttatcggcctctcttagatcctgagtgagacaaatacagaaatgacccattccctgcccaccagaaactcagaggtgattggggagactgacacaggaaaatgaacttaatcaagagagactgtgatatgtgctaagaagggtgtgagggagggagagatgaattttccctggagggatcctagaaagcattgtcatattgccatctccattagctcacttttaaacaactagggtgctggaagaacctttgtctgagggtagttcatagctggaaatacttggaatattttccagagtctctaaactctcatcttcccccacagatacacatccaagctcacaaataggagtagcaattctaggtggtagggttgtgtacggaacccctggctgtctgcatatatctcagaattaccccaggaccattgtcccaaagtctagagtctttacaggtaggatcccatcagcttcccatcccccaccagacagccacagtaccctcactttctccctattgttctttcaaatcctgttctcaggaaagaaactgccactaattcattcacactaaggtgtaaatgattgataataggaatgagttacctcttcccacagacatttgtttttaagtatgacagagcagggccttaatcccaagggaaaaggttatggaactggagggggtgagctttctgggtagaaggagacttcctgaatttccttaaaacccagtaagagtaagacctgttgttttggaaggtctgctccaccatctaagagcactgtttttttttkkttgttgttgttgttgttttacggtctctgagggaatatagtaaaaatgcatatgcacgtgcaatttgcacggcagcatttcaccgattgtggactgtattggctaatgtgtttcctggtctttagatgcaaaccattaataacactatcttatctcatagttttttcaggggtgcttcttgattagtagggaattttgaacacctctttaaatacagctagaaaataaaaccaatttgtaaagccacatttgcatatgatgccagcctcacgcatttgtatatctccagaaattcaggtatgcctcaccaatttgcccgtctttaataaaatcttgtgttaaaatttgcatcacgtcgccttccyatgtatgacgaaacaagaaacagagatttccaattgctcttttktcttcagacatttagtaatataaagtacctatttttatgctgaaatgtttatacaggtttattaatagcaagtgcaactaactggcggcatgccttgcaacacattttgatatattagccatgcttccgggtaaaggcaagccccaaactccttatcttttgcagtctctctgggatcagtaaaagaaaaaaaaaataatgtgcttaagaagtgggactgtaaatatgtatatttaactttgtatagcccatgtacctaccttgtatagaaaaataaytttaaaaatttgaatggaagggggtaaaggargtcatgaagtttttttgcatttttatttaaatgaaggaattccaaataactcacctacagatttttagcacaaaaatagccattgtaaagtgttaaaatttacgataagtattctattggggaggaaaggtaactmtgatctcagttacagtttttttttcctttttaatttcattattttgggtttttggtttttgcagtcctatttatctgcagtygtattaagtcctattgctagaataggttactacaaaaaagrttatattctgaaagaaaaataactgacattatatataaccaattaatttaaagtattgccatttaaattacacactgagagcatgtcctatgcagacatagatttttctgttcatttatttttcttcattgcagtggattgatttgataaatagatgtgttgaattactacatttgctgtacatattatttaataaactttattcagaattgcgtggcatat

SEQ ID NO: 386 - DNA, 6548 bp, Homo sapiens
gcggggccagctgcagcgtgtagtgcgagtggggcggacgcgcgcagcccgcccgcccggcgaccagcaaggagttggcatcctttggaagagttcgtgaaagctttctgcccagagctcctggaccaatgcatcttcccaccaccttaaaccactgacagggtcttgctctgtctcccaggctggagtgcagtggtggaatcacagctcactgcagcctcgacgtcctgggctcaagcgatcctcccactttagcctcctgagtagagcagttcagagccccagttgcagacgacttgtcctgccaccaccatgagttctgaatgtgatggtggttccaaagctgtgatgaatggcttggcacctggcagcaatgggcaagacaaagcaactgccgaccctttacgcgcacgctctatttctgctgttaaaatcattcctgtgaagacagtgaaaaacgcctcaggcctagttctccctacagacatggatcytacaaaaatctgcactgggaagggagcggtgactctccgggcctcgtcttcctacagggaaaccccaagcagtagccctgcgagccctcaggaaacccggcaacacgaaagcaaaccaggtctggagccagagccttcttcagcagatgagtggaggctttcttccagtgctgatgccaatggaaatgcccagccctcttcactcgctgccaagggctacagaagtgtgcatcccaaccttccttctgacaagtcccaggatgccacttcctccagtgcagcccagccggaggtaatagttgtccctctctacctggttaatactgacagagggcaagaaggcactgccagacctccaacacctctggggcctcttggctgcgtccccacaatcccagcgactgcctctgccgcctcacctctgaccttcccgactctagatgatttcattccccctcatctgcagaggtggccccaccacagccagccagcccgcgcctctggctcctttgcccccattagccagrcgccaccatccttctcaccaccacctccgctggtccctcctgcccyggaggacctccgcagagtctcrgagcctgacctcacrggagctgtttcgagtaccgattccagtcctctactaaatgaagtttcttcttcccttattggaactgattcccaagcctttccatcagttagcaagccttcatccgcctatccctccacaacgattgtcaatcctactattgtgctcttgcaacacaatcgagaacagcaaaaacgactcagtagcctttcagatcctgtctcagaaagaagagtgggagagcaggactcagcaccaacccaggaaaaacccacctcacctggcaaggctattgaaaaaagagcaaaggatgacagtaggcgggtggtgaagagcactcaggacttaagcgatgtttccatggatgaagtgggcatcccactccggaacactgagagatcaaaagactggtacaagactatgtttaaacagatccacaaactgaacagagacactcctgaagaaaacccttatttccctacgtacaaattccctgaacttcctgaaatccagcaaacttccgaagagacaaagtcttgctctgtcatgtcacccaggctggagtgcagtggtacagtcatakctcactgcagcctcaaactcctagactcaagcaatcctcccacctcagcctcccaagtagctgggactgcagatgatgattcagatctgtactctcccagatactcattttctgaagacacaaaatctcccctttctgtgcctcgstcaaaaagtgagatgagctrcattgatggtgagaaggtagtcaagaggtcggccacactacccctcccagcccgctcttcctcactgaagtcaagctcagaaagaaatgactgggaacccccagataagaaagtagayacaagaaaatatcgtgcagagcccaagagcatttaygaatatcagcctggcaagtcttccgttctgaccaacgaaaagatgagtcgggatataagcccagaagagatagatttaaagaatgaaccttggtataaattcttttcggaattggagtttgggaaaccgcctcccaaaaagatatgggattatactcctggagactgctctatccttcctagagaggatagaaagactaatctagacaaagatctcagcctctgccagacagagttagaggcagatttagaaaaaatggagacgcttaataaagcacccagtgcaaacgtgccacagagctcagccatcagccctactccggaaatttcttcagagactcctggatatatatattcttccaacttccatgcagtgaagagggaatcagacggggctcctggggatctcacyagcttggagaatgagagacaaatttataaaagtgtcttggaaggtggtgacatccctcttcagggcctgagtgggctcaagcgaccatccagctctgcttccactaaagattcagaatcgccaagacattttataccagctgattacttggaatccacggaagaatttattcgaagacgtcatgatgataaagagatgagacctgccagagccaaatttgactttaaagctcagacactraaggagcttcctctgcagaagggagatattgtttacatttataagcaaattgatcagaactggtatgaaggagaacaccacggccgggtgggaatcttcccacgcacctacatcgagcttcttcctcctgctgagaaggcacagcccaaaaagttgacaccagtgcaggttttggaatatggagaagctattgctaagtttaactttaatggtgatacacaagtagaaatgtccttcagaaagggtgagaggatcacactgctccggcaggtagatgagaactggtacgaagggaggatcccggggacatcccgacaaggcatcttccccatcacctacgtggatgtgatcaagcgaccactggtgaaaaaccctgtggattacatggacctgcctttctcctcctccccaagtcgcagtgccactgcaagcccacagcaacctcaagcccagcagcgaagagtcacccccgacaggagtcaaacctcacaagatttatttagctatcaagcattatatagctatataccacagaatgatgatgagttggaactccgcgatggagatatcgttgatgtcatggaaaaatgtgacgatggatggtttgttggtacttcaagaaggacaargcartttggtacttttccaggcaactatgtaaaacctttgtatctataagaagactgaaaaccatggagattatttttattggaggaggaagcatcattcatgaaccgatctttttagttgagtcagtaggaaaattaatacagtggataaagtaagaagcaaaagacagggacagagaagtgttgtgtttaaaacccaagcctgtctaaggttactgtgtattagacagggccgaactagtgtgctgagcaaaaagaattgaagcaaattgtatttacttagccgcttctgggagccacttcagcctttcccctcccctccacttcttgggtaatctgacctgaagcatagtccaggagcagagttagccagaaatgcctcctgctgccccagccttagagagctcccatctcaatcattgagcctgaaggcttcaagcycaagaatgcaacaagacccccagcctacatttctcagctcccctggagccagctgatcctgtaacgctgctggaggtcagtctgagctaccaagactgtccctagacaaaggtggagtcccccacactgcccaagaccaaatccctcactcaacctgctgaggtgtggatggggaaacagaggcaaaactgaggcacctgatgcattcagcctgctgtgcagcagtgccattgactgccctgatgttcagagagaaacgcacacaaggtttgcccatgagaattggggagcagatggccaagcagataggttatgtctgttttctgagtgatgaagtcaggaagccctgtggctctggaggccacttgtggttcattcttttcccatatccttggcttttagaaatggttaccttcaggacagtgcagctgcatttatcagagcactattgctaagttttcttttctggcttgtgtttttctgggacagtttagaattgggaggcctattctcatagaacaccaaaaatgatgttcagtgattcatttaacatacaccaatgtactctrgctgctggggggacaaccataagcaagacatgcccagggtttgccgtggctccagatctactccctgtaggagttcaaggatcacacaaacggtagtaaccagggttgtgaatctgagtacaccctggcaaggcttctcttcagactgaagcagcaattctgccactaccagcagcaaccaggabgtctgttctttgtgggggccagatcagaagagagaggcccctgtgacgcccgggctgcttggtcacaactctgtccaattcaaggatgtttatcggcctctcttagatcctgagtgagacaaatacagaaatgacccattccctgcccaccagaaactcagaggtgattggggagactgacacaggaaaatgaacttaatcaagagagactgtgatatgtgctaagaagggtgtgagggagggagagatgaattttccctggagggatcctagaaagcattgtcatattgccatctccattagctcacttttaaacaactagggtgctggaagaacctttgtctgagggtagttcatagctggaaatacttggaatattttccagagtctctaaactctcatcttcccccacagatacacatccaagctcacaaataggagtagcaattctaggtggtagggttgtgtacggaacccctggctgtctgcatatatctcagaattaccccaggaccattgtcccaaagtctagagtctttacaggtaggatcccatcagcttcccatcccccaccagacagccacagtaccctcactttctccctattgttctttcaaatcctgttctcaggaaagaaactgccactaattcattcacactaaggtgtaaatgattgataataggaatgagttacctcttcccacagacatttgtttttaagtatgacagagcagggccttaatcccaagggaaaaggttatggaactggagggggtgagctttctgggtagaaggagacttcctgaatttccttaaaacccagtaagagtaagacctgttgttttggaaggtctgctccaccatctaagagcactgtttttttttkkttgttgttgttgttgttttacggtctctgagggaatatagtaaaaatgcatatgcacgtgcaatttgcacggcagcatttcaccgattgtggactgtattggctaatgtgtttcctggtctttagatgcaaaccattaataacactatcttatctcatagttttttcaggggtgcttcttgattagtagggaattttgaacacctctttaaatacagctagaaaataaaaccaatttgtaaagccacatttgcatatgatgccagcctcacgcatttgtatatctccagaaattcaggtatgcctcaccaatttgcccgtctttaataaaatcttgtgttaaaatttgcatcacgtcgccttccyatgtatgacgaaacaagaaacagagatttccaattgctcttttktcttcagacatttagtaatataaagtacctatttttatgctgaaatgtttatacaggtttattaatagcaagtgcaactaactggcggcatgccttgcaacacattttgatatattagccatgcttccgggtaaaggcaagccccaaactccttatcttttgcagtctctctgggatcagtaaaagaaaaaaaaaataatgtgcttaagaagtgggactgtaaatatgtatatttaactttgtatagcccatgtacctaccttgtatagaaaaataaytttaaaaatttgaatggaagggggtaaaggargtcatgaagtttttttgcatttttatttaaatgaaggaattccaaataactcacctacagatttttagcacaaaaatagccattgtaaagtgttaaaatttacgataagtattctattggggaggaaaggtaactmtgatctcagttacagtttttttttcctttttaatttcattattttgggtttttggtttttgcagtcctatttatctgcagtygtattaagtcctattgctagaataggttactacaaaaaagrttatattctgaaagaaaaataactgacattatatataaccaattaatttaaagtattgccatttaaattacacactgagagcatgtcctatgcagacatagatttttctgttcatttatttttcttcattgcagtggattgatttgataaatagatgtgttgaattactacatttgctgtacatattatttaataaactttattcagaattgcgtggcatat

SEQ ID NO: 387 - DNA, 5613 bp, Homo sapiens
gcggggccagctgcagcgtgtagtgcgagtggggcggacgcgcgcagcccgcccgcccggcgaccagcaaggagttggcatcctttggaagagttcgtgaaagctttctgcccagagctcctggaccaatgcatcttcccaccaccttaaaccactgagcagttcagagccccagttgcagacgacttgtcctgccaccaccatgagttctgaatgtgatggtggttccaaagctgtgatgaatggcttggcacctggcagcaatgggcaagacaaagcaactgccgaccctttacgcgcacgctctatttctgctgttaaaatcattcctgtgaagacagtgaaaaacgcctcaggcctagttctccctacagacatggatcytacaaaaatctgcactgggaagggagcggtgactctccgggcctcgtcttcctacagggaaaccccaagcagtagccctgcgagccctcaggaaacccggcaacacgaaagcaaaccaggtctggagccagagccttcttcagcagatgagtggaggctttcttccagtgctgatgccaatggaaatgcccagccctcttcactcgctgccaagggctacagaagtgtgcatcccaaccttccttctgacaagtcccaggattccagtcctctactaaatgaagtttcttcttcccttattggaactgattcccaagcctttccatcagttagcaagccttcatccgcctatccctccacaacgattgtcaatcctactattgtgctcttgcaacacaatcgagaacagcaaaaacgactcagtagcctttcagatcctgtctcagaaagaagagtgggagagcaggactcagcaccaacccaggaaaaacccacctcacctggcaaggctattgaaaaaagagcaaaggatgacagtaggcgggtggtgaagagcactcaggacttaagcgatgtttccatggatgaagtgggcatcccactccggaacactgagagatcaaaagactggtacaagactatgtttaaacagatccacaaactgaacagagatgatgattcagatctgtactctcccagatactcattttctgaagacacaaaatctcccctttctgtgcctcgstcaaaaagtgagatgagctrcattgatggtgagaaggtagtcaagaggtcggccacactacccctcccagcccgctcttcctcactgaagtcaagctcagaaagaaatgactgggaacccccagataagaaagtagayacaagaaaatatcgtgcagagcccaagagcatttaygaatatcagcctggcaagtcttccgttctgaccaacgaaaagatgagctcagccatcagccctactccggaaatttcttcagagactcctggatatatatattcttccaacttccatgcagtgaagagggaatcagacggggctcctggggatctcacyagcttggagaatgagagacaaatttataaaagtgtcttggaaggtggtgacatccctcttcagggcctgagtgggctcaagcgaccatccagctctgcttccactaaagattcagaatcgccaagacattttataccagctgattacttggaatccacggaagaatttattcgaagacgtcatgatgataaagagatgagacctgccagagccaaatttgactttaaagctcagacactraaggagcttcctctgcagaagggagatattgtttacatttataagcaaattgatcagaactggtatgaaggagaacaccacggccgggtgggaatcttcccacgcacctacatcgagcttcttcctcctgctgagaaggcacagcccaaaaagttgacaccagtgcaggttttggaatatggagaagctattgctaagtttaactttaatggtgatacacaagtagaaatgtccttcagaaagggtgagaggatcacactgctccggcaggtagatgagaactggtacgaagggaggatcccggggacatcccgacaaggcatcttccccatcacctacgtggatgtgatcaagcgaccactggtgaaaaaccctgtggattacatggacctgcctttctcctcctccccaagtcgcagtgccactgcaagcccacagcaacctcaagcccagcagcgaagagtcacccccgacaggagtcaaacctcacaagatttatttagctatcaagcattatatagctatataccacagaatgatgatgagttggaactccgcgatggagatatcgttgatgtcatggaaaaatgtgacgatggatggtttgttggtacttcaagaaggacaargcartttggtacttttccaggcaactatgtaaaacctttgtatctataagaagactgaaaaccatggagattatttttattggaggaggaagcatcattcatgaaccgatctttttagttgagtcagtaggaaaattaatacagtggataaagtaagaagcaaaagacagggacagagaagtgttgtgtttaaaacccaagcctgtctaaggttactgtgtattagacagggccgaactagtgtgctgagcaaaaagaattgaagcaaattgtatttacttagccgcttctgggagccacttcagcctttcccctcccctccacttcttgggtaatctgacctgaagcatagtccaggagcagagttagccagaaatgcctcctgctgccccagccttagagagctcccatctcaatcattgagcctgaaggcttcaagcycaagaatgcaacaagacccccagcctacatttctcagctcccctggagccagctgatcctgtaacgctgctggaggtcagtctgagctaccaagactgtccctagacaaaggtggagtcccccacactgcccaagaccaaatccctcactcaacctgctgaggtgtggatggggaaacagaggcaaaactgaggcacctgatgcattcagcctgctgtgcagcagtgccattgactgccctgatgttcagagagaaacgcacacaaggtttgcccatgagaattggggagcagatggccaagcagataggttatgtctgttttctgagtgatgaagtcaggaagccctgtggctctggaggccacttgtggttcattcttttcccatatccttggcttttagaaatggttaccttcaggacagtgcagctgcatttatcagagcactattgctaagttttcttttctggcttgtgtttttctgggacagtttagaattgggaggcctattctcatagaacaccaaaaatgatgttcagtgattcatttaacatacaccaatgtactctrgctgctggggggacaaccataagcaagacatgcccagggtttgccgtggctccagatctactccctgtaggagttcaaggatcacacaaacggtagtaaccagggttgtgaatctgagtacaccctggcaaggcttctcttcagactgaagcagcaattctgccactaccagcagcaaccaggabgtctgttctttgtgggggccagatcagaagagagaggcccctgtgacgcccgggctgcttggtcacaactctgtccaattcaaggatgtttatcggcctctcttagatcctgagtgagacaaatacagaaatgacccattccctgcccaccagaaactcagaggtgattggggagactgacacaggaaaatgaacttaatcaagagagactgtgatatgtgctaagaagggtgtgagggagggagagatgaattttccctggagggatcctagaaagcattgtcatattgccatctccattagctcacttttaaacaactagggtgctggaagaacctttgtctgagggtagttcatagctggaaatacttggaatattttccagagtctctaaactctcatcttcccccacagatacacatccaagctcacaaataggagtagcaattctaggtggtagggttgtgtacggaacccctggctgtctgcatatatctcagaattaccccaggaccattgtcccaaagtctagagtctttacaggtaggatcccatcagcttcccatcccccaccagacagccacagtaccctcactttctccctattgttctttcaaatcctgttctcaggaaagaaactgccactaattcattcacactaaggtgtaaatgattgataataggaatgagttacctcttcccacagacatttgtttttaagtatgacagagcagggccttaatcccaagggaaaaggttatggaactggagggggtgagctttctgggtagaaggagacttcctgaatttccttaaaacccagtaagagtaagacctgttgttttggaaggtctgctccaccatctaagagcactgtttttttttkkttgttgttgttgttgttttacggtctctgagggaatatagtaaaaatgcatatgcacgtgcaatttgcacggcagcatttcaccgattgtggactgtattggctaatgtgtttcctggtctttagatgcaaaccattaataacactatcttatctcatagttttttcaggggtgcttcttgattagtagggaattttgaacacctctttaaatacagctagaaaataaaaccaatttgtaaagccacatttgcatatgatgccagcctcacgcatttgtatatctccagaaattcaggtatgcctcaccaatttgcccgtctttaataaaatcttgtgttaaaatttgcatcacgtcgccttccyatgtatgacgaaacaagaaacagagatttccaattgctcttttktcttcagacatttagtaatataaagtacctatttttatgctgaaatgtttatacaggtttattaatagcaagtgcaactaactggcggcatgccttgcaacacattttgatatattagccatgcttccgggtaaaggcaagccccaaactccttatcttttgcagtctctctgggatcagtaaaagaaaaaaaaaataatgtgcttaagaagtgggactgtaaatatgtatatttaactttgtatagcccatgtacctaccttgtatagaaaaataaytttaaaaatttgaatggaagggggtaaaggargtcatgaagtttttttgcatttttatttaaatgaaggaattccaaataactcacctacagatttttagcacaaaaatagccattgtaaagtgttaaaatttacgataagtattctattggggaggaaaggtaactmtgatctcagttacagtttttttttcctttttaatttcattattttgggtttttggtttttgcagtcctatttatctgcagtygtattaagtcctattgctagaataggttactacaaaaaagrttatattctgaaagaaaaataactgacattatatataaccaattaatttaaagtattgccatttaaattacacactgagagcatgtcctatgcagacatagatttttctgttcatttatttttcttcattgcagtggattgatttgataaatagatgtgttgaattactacatttgctgtacatattatttaataaactttattcagaattgcgtggcatat

SEQ ID NO: 388 - DNA, 2499 bp, Homo sapiens
gattattttgcttccggacctcgactggaaattttttaaaagcccttatgacaaatgagcatgttacctctcctttttctttttagcagctttcagctttaacctaatgggtctatttattttattctgcatgcttaccagtggatcgtaaaggtgggaatgctcacatgatttcttcatcttcagtccatagccgaacgtttaacactagcaatgcgttaggccctgtgtgtaagcacaagaagcccctgtcagctgcgaaggcctgcatttcggaaatccttccatccaaattcaaacccaggctctctgctcccagygctcttttgcaggaacagaagagtatcctcttgccctcagagaaggctcaaagctgtgagaacctttgtgtttctggttctttaaatgattccaaaagaggcctccccctccaagtgggagggagcattgagaacctgctcatgcgctcccgacgggattatgacagcaagtcgagcagtaccatgagcctccaggagtacagcaccagcggcaggaggccctgtcctctctcaagaaaggctgggatgcagttcaccatgctttatcgggacatgcaccagatcaaccgatctggcctcttcctgggctccatctcctcctcctcgagtgtgcgggatcttgcctcccactttgaaaagagtagcctggcattgtccaggggtgagctgggccccagccaggagggctcggaacacatccccaagcacaccgtctcttcccgcatcaccgcttttgagcagctrattcagcggtcccgttccatgccatccctggacctgtccggaaggctgagcaagtctcccacacctgtgctgtcccgkggcagcctgacctcagcccgctcggccgagtccctacttgagtcaaccaagctccrtcccaaggagatggatgggatgaactccagtggggtctatgcttccccaacatgtagcaatatggcacaccatgccttgagcttcaggggccttgtgccttctgagcctctctccacctgctctgatgacgtggaccgctgttcaaatatctccactgacagcagagaaggcagtggcggcagtgttcatggagatttccccaaacatcgcctcaacaagtgcaagggcacctgcccggcctcatacacccgcttcaccaccatccggaagcatgagcagcagcagacctctagacagyctgagtggcgcctggatgccagaggggacaagagcaccctcctcaggaacatctacctaatgagcccccttcctttccggctgaaaaagcccctccaccaccaccccagacaaccttcccctggtgactcctcaggcctcctggtgggccagaagccagacctccccagtcagccccatcaggaccagcccccttctggggggaagcccgtggttcccacacgcctgtcttcccgacacaccatggccaggcttagccgcagctcagagccctctcaggagagacccacggccctggaggactacccaagggccattaataatggaaactccgtgccatactcagaccacagcctggacaggaacaacaacccacaaagtgaactggcaccatcccgtggaggtggcattttgtgtgtttgcctagtctcacctgcccgtccctccactttgcttgcattatcccgtcctcctctgtgcccttggtgctcattttctggtctgtcctttgttttctgtttgttttgcttggcaattaatcatggctcgtagtggctgcacttctttaaaaacaaagcccccatgtcatttagactaaycaccaaactgtgtttygaaagaaaaattggccgtttagctcaactgagaaatgtgttcatttgaactcttgaaccccttgctgtttgcaccaatccccaacataccccatggttttttgagaggcagcctctctcaatggccctatatgtgtgtgagtgtgtgccttgtccctataaggtcctgcacgcctctttgtagggacactttacaaagaaagttctctcattttgctcaccttttgccttytgagtagttttctttgcattaaactagttcacaaataaatccaaaaaatggggtggggggtggaatttttttttccttcagaattcgaccattgatcattaatcaagaatgacttcaaaattttgmtatttataatagatgaaaggtgaactcttttcgcaagctggtttccagcgaaatctttgcctgttttaactctactttgttgttttaaagattcagaatcgccaagacattttataccagctgattacttggaatccacggaagaatttattcgaagacgtcatgatgataaagaggtaaatcccatcttttaaatccattagtttttgcttggaaaaatgtatgaagcaagtacagattcttgacatctatcaragaggtgacatgatctagcaattagaggcaaaaattgaggctttcacaagtgatt

SEQ ID NO: 389 - DNA, 1185 bp, Homo sapiens
aatgtgatggtggttccaaagctgtgatgaatggcttggcacctggcagcaatgggcaagacaaagacatggatcytacaaaaatctgcactgggaagggagcggtgactctccgggcctcgtcttcctacagggaaaccccaagcagtagccctgcgagccctcaggaaacccggcaacacgaaagcaaaccagatgagtggaggctttcttccagtgctgatgccaatggaaatgcccagccctcttcactcgctgccaagggctacagaagtgtgcatcccaaccttccttctgacaagtcccaggattccagtcctctactaaatgaagtttcttcttcccttattggaactgattcccaagcctttccatcagttagcaagccttcatccgcctatccctccacaacgattgtcaatcctactattgtgctcttgcaacacaatcgagaacagcaaaaacgactcagtagcctttcagatcctgtctcagaaagaagagtgggagagcaggactcagcaccaacccaggaaaaacccacctcacctggcaaggctattgaaaaaagagcaaaggatgacagtaggcgggtggtgaagagcactcaggacttaagcgatgtttccatggatgaagtgggcatcccactccggaacactgagagatcaaaagactggtacaagactatgtttaaacagatccacaaactgaacagagatgatgattcagatctgtactctcccagatactcattttctgaagacacaaaatctcccctttctgtgcctcgstcaaaaagtgagatgagctrcattgatggtgagaaggtagtcaagaggtcggccacactacccctcccagcccgctcttcctcactgaagtcaagctcagaaagaaatgactgggaacccccagataagaaagtagayacaagaaaatatcgtgcagagcccaagagcatttaygaatatcagcctggcaagtcttccgttctgaccaacgaaaagatgtatatattcttccaacttccatgcagtgaagagggaatcagacggggctcctggggatctcacyagcttggagaatgagagacaaatttataaaagtgtcttggaaggtggtgacatccctcttcagggcctgagtgggctcaagcgaccatccagctctgcttccactaaa

SEQ ID NO: 390 - DNA, 5886 bp, Homo sapiens
gcggggccagctgcagcgtgtagtgcgagtggggcggacgcgcgcagcccgcccgcccggcgaccagcaaggagttggcatcctttggaagagttcgtgaaagctttctgcccagagctcctggaccaatgcatcttcccaccaccttaaaccactgagcagttcagagccccagttgcagacgacttgtcctgccaccaccatgagttctgaatgtgatggtggttccaaagctgtgatgaatggcttggcacctggcagcaatgggcaagacaaagacatggatcytacaaaaatctgcactgggaagggagcggtgactctccgggcctcgtcttcctacagggaaaccccaagcagtagccctgcgagccctcaggaaacccggcaacacgaaagcaaaccaggtctggagccagagccttcttcagcagatgagtggaggctttcttccagtgctgatgccaatggaaatgcccagccctcttcactcgctgccaagggctacagaagtgtgcatcccaaccttccttctgacaagtcccaggatgccacttcctccagtgcagcccagccggaggtaatagttgtccctctctacctggttaatactgacagagggcaagaaggcactgccagacctccaacacctctggggcctcttggctgcgtccccacaatcccagcgactgcctctgccgcctcacctctgaccttcccgactctagatgatttcattccccctcatctgcagaggtggccccaccacagccagccagcccgcgcctctggctcctttgcccccattagccagrcgccaccatccttctcaccaccacctccgctggtccctcctgcccyggaggacctccgcagagtctcrgagcctgacctcacrggagctgtttcgagtaccgattccagtcctctactaaatgaagtttcttcttcccttattggaactgattcccaagcctttccatcagttagcaagccttcatccgcctatccctccacaacgattgtcaatcctactattgtgctcttgcaacacaatcgagaacagcaaaaacgactcagtagcctttcagatcctgtctcagaaagaagagtgggagagcaggactcagcaccaacccaggaaaaacccacctcacctggcaaggctattgaaaaaagagcaaaggatgacagtaggcgggtggtgaagagcactcaggacttaagcgatgtttccatggatgaagtgggcatcccactccggaacactgagagatcaaaagactggtacaagactatgtttaaacagatccacaaactgaacagagatgatgattcagatctgtactctcccagatactcattttctgaagacacaaaatctcccctttctgtgcctcgstcaaaaagtgagatgagctrcattgatggtgagaaggtagtcaagaggtcggccacactacccctcccagcccgctcttcctcactgaagtcaagctcagaaagaaatgactgggaacccccagataagaaagtagayacaagaaaatatcgtgcagagcccaagagcatttaygaatatcagcctggcaagtcttccgttctgaccaacgaaaagatgagctcagccatcagccctactccggaaatttcttcagagactcctggatatatatattcttccaacttccatgcagtgaagagggaatcagacggggctcctggggatctcacyagcttggagaatgagagacaaatttataaaagtgtcttggaaggtggtgacatccctcttcagggcctgagtgggctcaagcgaccatccagctctgcttccactaaagattcagaatcgccaagacattttataccagctgattacttggaatccacggaagaatttattcgaagacgtcatgatgataaagagatgagacctgccagagccaaatttgactttaaagctcagacactraaggagcttcctctgcagaagggagatattgtttacatttataagcaaattgatcagaactggtatgaaggagaacaccacggccgggtgggaatcttcccacgcacctacatcgagcttcttcctcctgctgagaaggcacagcccaaaaagttgacaccagtgcaggttttggaatatggagaagctattgctaagtttaactttaatggtgatacacaagtagaaatgtccttcagaaagggtgagaggatcacactgctccggcaggtagatgagaactggtacgaagggaggatcccggggacatcccgacaaggcatcttccccatcacctacgtggatgtgatcaagcgaccactggtgaaaaaccctgtggattacatggacctgcctttctcctcctccccaagtcgcagtgccactgcaagcccacagcaacctcaagcccagcagcgaagagtcacccccgacaggagtcaaacctcacaagatttatttagctatcaagcattatatagctatataccacagaatgatgatgagttggaactccgcgatggagatatcgttgatgtcatggaaaaatgtgacgatggatggtttgttggtacttcaagaaggacaargcartttggtacttttccaggcaactatgtaaaacctttgtatctataagaagactgaaaaccatggagattatttttattggaggaggaagcatcattcatgaaccgatctttttagttgagtcagtaggaaaattaatacagtggataaagtaagaagcaaaagacagggacagagaagtgttgtgtttaaaacccaagcctgtctaaggttactgtgtattagacagggccgaactagtgtgctgagcaaaaagaattgaagcaaattgtatttacttagccgcttctgggagccacttcagcctttcccctcccctccacttcttgggtaatctgacctgaagcatagtccaggagcagagttagccagaaatgcctcctgctgccccagccttagagagctcccatctcaatcattgagcctgaaggcttcaagcycaagaatgcaacaagacccccagcctacatttctcagctcccctggagccagctgatcctgtaacgctgctggaggtcagtctgagctaccaagactgtccctagacaaaggtggagtcccccacactgcccaagaccaaatccctcactcaacctgctgaggtgtggatggggaaacagaggcaaaactgaggcacctgatgcattcagcctgctgtgcagcagtgccattgactgccctgatgttcagagagaaacgcacacaaggtttgcccatgagaattggggagcagatggccaagcagataggttatgtctgttttctgagtgatgaagtcaggaagccctgtggctctggaggccacttgtggttcattcttttcccatatccttggcttttagaaatggttaccttcaggacagtgcagctgcatttatcagagcactattgctaagttttcttttctggcttgtgtttttctgggacagtttagaattgggaggcctattctcatagaacaccaaaaatgatgttcagtgattcatttaacatacaccaatgtactctrgctgctggggggacaaccataagcaagacatgcccagggtttgccgtggctccagatctactccctgtaggagttcaaggatcacacaaacggtagtaaccagggttgtgaatctgagtacaccctggcaaggcttctcttcagactgaagcagcaattctgccactaccagcagcaaccaggabgtctgttctttgtgggggccagatcagaagagagaggcccctgtgacgcccgggctgcttggtcacaactctgtccaattcaaggatgtttatcggcctctcttagatcctgagtgagacaaatacagaaatgacccattccctgcccaccagaaactcagaggtgattggggagactgacacaggaaaatgaacttaatcaagagagactgtgatatgtgctaagaagggtgtgagggagggagagatgaattttccctggagggatcctagaaagcattgtcatattgccatctccattagctcacttttaaacaactagggtgctggaagaacctttgtctgagggtagttcatagctggaaatacttggaatattttccagagtctctaaactctcatcttcccccacagatacacatccaagctcacaaataggagtagcaattctaggtggtagggttgtgtacggaacccctggctgtctgcatatatctcagaattaccccaggaccattgtcccaaagtctagagtctttacaggtaggatcccatcagcttcccatcccccaccagacagccacagtaccctcactttctccctattgttctttcaaatcctgttctcaggaaagaaactgccactaattcattcacactaaggtgtaaatgattgataataggaatgagttacctcttcccacagacatttgtttttaagtatgacagagcagggccttaatcccaagggaaaaggttatggaactggagggggtgagctttctgggtagaaggagacttcctgaatttccttaaaacccagtaagagtaagacctgttgttttggaaggtctgctccaccatctaagagcactgtttttttttkkttgttgttgttgttgttttacggtctctgagggaatatagtaaaaatgcatatgcacgtgcaatttgcacggcagcatttcaccgattgtggactgtattggctaatgtgtttcctggtctttagatgcaaaccattaataacactatcttatctcatagttttttcaggggtgcttcttgattagtagggaattttgaacacctctttaaatacagctagaaaataaaaccaatttgtaaagccacatttgcatatgatgccagcctcacgcatttgtatatctccagaaattcaggtatgcctcaccaatttgcccgtctttaataaaatcttgtgttaaaatttgcatcacgtcgccttccyatgtatgacgaaacaagaaacagagatttccaattgctcttttktcttcagacatttagtaatataaagtacctatttttatgctgaaatgtttatacaggtttattaatagcaagtgcaactaactggcggcatgccttgcaacacattttgatatattagccatgcttccgggtaaaggcaagccccaaactccttatcttttgcagtctctctgggatcagtaaaagaaaaaaaaaataatgtgcttaagaagtgggactgtaaatatgtatatttaactttgtatagcccatgtacctaccttgtatagaaaaataaytttaaaaatttgaatggaagggggtaaaggargtcatgaagtttttttgcatttttatttaaatgaaggaattccaaataactcacctacagatttttagcacaaaaatagccattgtaaagtgttaaaatttacgataagtattctattggggaggaaaggtaactmtgatctcagttacagtttttttttcctttttaatttcattattttgggtttttggtttttgcagtcctatttatctgcagtygtattaagtcctattgctagaataggttactacaaaaaagrttatattctgaaagaaaaataactgacattatatataaccaattaatttaaagtattgccatttaaattacacactgagagcatgtcctatgcagacatagatttttctgttcatttatttttcttcattgcagtggattgatttgataaatagatgtgttgaattactacatttgctgtacatattatttaataaactttattcagaattgcgtggcatat

SEQ ID NO: 391 - DNA, 1371 bp, Homo sapiens
gcggggccagctgcagcgtgtagtgcgagtggggcggacgcgcgcagcccgcccgcccggcgaccagcaaggagttggcatcctttggaagagttcgtgaaagctttctgcccagagctcctggaccaatgcatcttcccaccaccttaaaccactgagcagttcagagccccagttgcagacgacttgtcctgccaccaccatgagttctgaatgtgatggtggttccaaagctgtgatgaatggcttggcacctggcagcaatgggcaagacaaagacatggatcytacaaaaatctgcactgggaagggagcggtgactctccgggcctcgtcttcctacagggaaaccccaagcagtagccctgcgagccctcaggaaacccggcaacacgaaagcaaaccaggtctggagccagagccttcttcagcagatgagtggaggctttcttccagtgctgatgccaatggaaatgcccagccctcttcactcgctgccaagggctacagaagtgtgcatcccaaccttccttctgacaagtcccaggatgccacttcctccagtgcagcccagccggaggtaatagttgtccctctctacctggttaatactgacagagggcaagaaggcactgccagacctccaacacctctggggcctcttggctgcgtccccacaatcccagcgactgcctctgccgcctcacctctgaccttcccgactctagatgatttcattccccctcatctgcagaggtggccccaccacagccagccagcccgcgcctctggctcctttgcccccattagccagrcgccaccatccttctcaccaccacctccgctggtccctcctgcccyggaggacctccgcagagtctcrgagcctgacctcacrggagctgtttcgagtaccgtaagcttgctggactcccctcctcrcggcttttctgaatgtctcctcccagcagtcacattccctttctcactgaagcactgagcyctgaggacagcactggctgccgctgtgcctgtgtgatgactggagccgtgtcccctgtcactagcgtgcatgcttcccgtgtgtcttccctgggtctctcggggctgttccccatctctgcagtgcctcatctgctctgtcctgttgggaatgcacatctttctccctcagaagacaacatctgtggcctttatgttgactggccatgcttttcacaggccaggtcgggggtcgtgtggtgagctgaggaaagctaagaattatgggggaaagcaacggcaggcgtggtgggtgctacttaccagggagcggggagatctcggggaggaagcgattctctgattctcttgttgacctagtgagtaaat

SEQ ID NO: 392 - DNA, 2465 bp, Homo sapiens
gattattttgcttccggacctcgactggaaattttttaaaagcccttatgacaaatgagcatgttacctctcctttttctttttagcagctttcagctttaacctaatgggtctatttattttattctgcatgcttaccagtggatcgtaaaggtgggaatgctcacatgatttcttcatcttcagtccatagccgaacgtttaacactagcaatgcgttaggccctgtgtgtaagcacaagaagcccctgtcagctgcgaaggcctgcatttcggaaatccttccatccaaattcaaacccaggctctctgctcccagygctcttttgcaggaacagaagagtatcctcttgccctcagagaaggctcaaagctgtgagaacctttgtgtttctggttctttaaatgattccaaaagaggcctccccctccaagtgggagggagcattgagaacctgctcatgcgctcccgacgggattatgacagcaagtcgagcagtaccatgagcctccaggagtacagcaccagcggcaggaggccctgtcctctctcaagaaaggctgggatgcagttcaccatgctttatcgggacatgcaccagatcaaccgatctggcctcttcctgggctccatctcctcctcctcgagtgtgcgggatcttgcctcccactttgaaaagagtagcctggcattgtccaggggtgagctgggccccagccaggagggctcggaacacatccccaagcacaccgtctcttcccgcatcaccgcttttgagcagctrattcagcggtcccgttccatgccatccctggacctgtccggaaggctgagcaagtctcccacacctgtgctgtcccgkggcagcctgacctcagcccgctcggccgagtccctacttgagtcaaccaagctccrtcccaaggagatggatgggatgaactccagtggggtctatgcttccccaacatgtagcaatatggcacaccatgccttgagcttcaggggccttgtgccttctgagcctctctccacctgctctgatgacgtggaccgctgttcaaatatctccactgacagcagagaaggcagtggcggcagtgttcatggagatttccccaaacatcgcctcaacaagtgcaagggcacctgcccggcctcatacacccgcttcaccaccatccggaagcatgagcagcagcagacctctagacagyctgagtggcgcctggatgccagaggggacaagagcaccctcctcaggaacatctacctaatgagcccccttcctttccggctgaaaaagcccctccaccaccaccccagacaaccttcccctggtgactcctcaggcctcctggtgggccagaagccagacctccccagtcagccccatcaggaccagcccccttctggggggaagcccgtggttcccacacgcctgtcttcccgacacaccatggccaggcttagccgcagctcagagccctctcaggagagacccacggccctggaggactacccaagggccattaataatggaaactccgtgccatactcagaccacagcctggacaggaacaacaacccacaaagtgaactggcaccatcccgtggaggtggcattttgtgtgtttgcctagtctcacctgcccgtccctccactttgcttgcattatcccgtcctcctctgtgcccttggtgctcattttctggtctgtcctttgttttctgtttgttttgcttggcaattaatcatggctcgtagtggctgcacttctttaaaaacaaagcccccatgtcatttagactaaycaccaaactgtgtttygaaagaaaaattggccgtttagctcaactgagaaatgtgttcatttgaactcttgaaccccttgctgtttgcaccaatccccaacataccccatggttttttgagaggcagcctctctcaatggccctatatgtgtgtgagtgtgtgccttgtccctataaggtcctgcacgcctctttgtagggacactttacaaagaaagttctctcattttgctcaccttttgccttytgagtagttttctttgcattaaactagttcacaaataaatccaaaaaatggggtggggggtggaatttttttttccttcagaattcgaccattgatcattaatcaagaatgacttcaaaattttgmtatttataatagatgaaaggtgaactcttttcgcaagctggtttccagcgaaatctttgcctgttttaactctactttgttgttttaaagattcagaatcgccaagacattttaaaaatacaaaattagccgggcctggtggcgcatgtctgtaatcccagctactggggaggctgaggcaggaaaatcgcctgaacccgggaggcggaggttgcggtgagctgagatcacaccattgcactccagcctgggcaacagaagcgaaactctgtctca

SEQ ID NO: 393 - DNA, 1397 bp, Homo sapiens
gcggggccagctgcagcgtgtagtgcgagtggggcggacgcgcgcagcccgcccgcccggcgaccagcaaggagttggcatcctttggaagagttcgtgaaagctttctgcccagagctcctggaccaatgcatcttcccaccaccttaaaccactgagcagttcagagccccagttgcagacgacttgtcctgccaccaccatgagttctgaatgtgatggtggttccaaagctgtgatgaatggcttggcacctggcagcaatgggcaagacaaagacatggatcytacaaaaatctgcactgggaagggagcggtgactctccgggcctcgtcttcctacagggaaaccccaagcagtagccctgcgagccctcaggaaacccggcaacacgaaagcaaaccagatgagtggaggctttcttccagtgctgatgccaatggaaatgcccagccctcttcactcgctgccaagggctacagaagtgtgcatcccaaccttccttctgacaagtcccaggattccagtcctctactaaatgaagtttcttcttcccttattggaactgattcccaagcctttccatcagttagcaagccttcatccgcctatccctccacaacgattgtcaatcctactattgtgctcttgcaacacaatcgagaacagcaaaaacgactcagtagcctttcagatcctgtctcagaaagaagagtgggagagcaggactcagcaccaacccaggaaaaacccacctcacctggcaaggctattgaaaaaagagcaaaggatgacagtaggcgggtggtgaagagcactcaggacttaagcgatgtttccatggatgaagtgggcatcccactccggaacactgagagatcaaaagactggtacaagactatgtttaaacagatccacaaactgaacagagatgatgattcagatctgtactctcccagatactcattttctgaagacacaaaatctcccctttctgtgcctcgstcaaaaagtgagatgagctrcattgatggtgagaaggtagtcaagaggtcggccacactacccctcccagcccgctcttcctcactgaagtcaagctcagaaagaaatgactgggaacccccagataagaaagtagayacaagaaaatatcgtgcagagcccaagagcatttaygaatatcagcctggcaagtcttccgttctgaccaacgaaaagatgtatatattcttccaacttccatgcagtgaagagggaatcagacggggctcctggggatctcacyagcttggagaatgagagacaaatttataaaagtgtcttggaaggtggtgacatccctcttcagggcctgagtgggctcaagcgaccatccagctctgcttccactaaa

SEQ ID NO: 394 - DNA, 5546 bp, Homo sapiens
gcggggccagctgcagcgtgtagtgcgagtggggcggacgcgcgcagcccgcccgcccggcgaccagcaaggagttggcatcctttggaagagttcgtgaaagctttctgcccagagctcctggaccaatgcatcttcccaccaccttaaaccactgagcagttcagagccccagttgcagacgacttgtcctgccaccaccatgagttctgaatgtgatggtggttccaaagctgtgatgaatggcttggcacctggcagcaatgggcaagacaaagacatggatcytacaaaaatctgcactgggaagggagcggtgactctccgggcctcgtcttcctacagggaaaccccaagcagtagccctgcgagccctcaggaaacccggcaacacgaaagcaaaccagatgagtggaggctttcttccagtgctgatgccaatggaaatgcccagccctcttcactcgctgccaagggctacagaagtgtgcatcccaaccttccttctgacaagtcccaggattccagtcctctactaaatgaagtttcttcttcccttattggaactgattcccaagcctttccatcagttagcaagccttcatccgcctatccctccacaacgattgtcaatcctactattgtgctcttgcaacacaatcgagaacagcaaaaacgactcagtagcctttcagatcctgtctcagaaagaagagtgggagagcaggactcagcaccaacccaggaaaaacccacctcacctggcaaggctattgaaaaaagagcaaaggatgacagtaggcgggtggtgaagagcactcaggacttaagcgatgtttccatggatgaagtgggcatcccactccggaacactgagagatcaaaagactggtacaagactatgtttaaacagatccacaaactgaacagagatgatgattcagatctgtactctcccagatactcattttctgaagacacaaaatctcccctttctgtgcctcgstcaaaaagtgagatgagctrcattgatggtgagaaggtagtcaagaggtcggccacactacccctcccagcccgctcttcctcactgaagtcaagctcagaaagaaatgactgggaacccccagataagaaagtagayacaagaaaatatcgtgcagagcccaagagcatttaygaatatcagcctggcaagtcttccgttctgaccaacgaaaagatgagctcagccatcagccctactccggaaatttcttcagagactcctggatatatatattcttccaacttccatgcagtgaagagggaatcagacggggctcctggggatctcacyagcttggagaatgagagacaaatttataaaagtgtcttggaaggtggtgacatccctcttcagggcctgagtgggctcaagcgaccatccagctctgcttccactaaagattcagaatcgccaagacattttataccagctgattacttggaatccacggaagaatttattcgaagacgtcatgatgataaagagatgagacctgccagagccaaatttgactttaaagctcagacactraaggagcttcctctgcagaagggagatattgtttacatttataagcaaattgatcagaactggtatgaaggagaacaccacggccgggtgggaatcttcccacgcacctacatcgagcttcttcctcctgctgagaaggcacagcccaaaaagttgacaccagtgcaggttttggaatatggagaagctattgctaagtttaactttaatggtgatacacaagtagaaatgtccttcagaaagggtgagaggatcacactgctccggcaggtagatgagaactggtacgaagggaggatcccggggacatcccgacaaggcatcttccccatcacctacgtggatgtgatcaagcgaccactggtgaaaaaccctgtggattacatggacctgcctttctcctcctccccaagtcgcagtgccactgcaagcccacagcaacctcaagcccagcagcgaagagtcacccccgacaggagtcaaacctcacaagatttatttagctatcaagcattatatagctatataccacagaatgatgatgagttggaactccgcgatggagatatcgttgatgtcatggaaaaatgtgacgatggatggtttgttggtacttcaagaaggacaargcartttggtacttttccaggcaactatgtaaaacctttgtatctataagaagactgaaaaccatggagattatttttattggaggaggaagcatcattcatgaaccgatctttttagttgagtcagtaggaaaattaatacagtggataaagtaagaagcaaaagacagggacagagaagtgttgtgtttaaaacccaagcctgtctaaggttactgtgtattagacagggccgaactagtgtgctgagcaaaaagaattgaagcaaattgtatttacttagccgcttctgggagccacttcagcctttcccctcccctccacttcttgggtaatctgacctgaagcatagtccaggagcagagttagccagaaatgcctcctgctgccccagccttagagagctcccatctcaatcattgagcctgaaggcttcaagcycaagaatgcaacaagacccccagcctacatttctcagctcccctggagccagctgatcctgtaacgctgctggaggtcagtctgagctaccaagactgtccctagacaaaggtggagtcccccacactgcccaagaccaaatccctcactcaacctgctgaggtgtggatggggaaacagaggcaaaactgaggcacctgatgcattcagcctgctgtgcagcagtgccattgactgccctgatgttcagagagaaacgcacacaaggtttgcccatgagaattggggagcagatggccaagcagataggttatgtctgttttctgagtgatgaagtcaggaagccctgtggctctggaggccacttgtggttcattcttttcccatatccttggcttttagaaatggttaccttcaggacagtgcagctgcatttatcagagcactattgctaagttttcttttctggcttgtgtttttctgggacagtttagaattgggaggcctattctcatagaacaccaaaaatgatgttcagtgattcatttaacatacaccaatgtactctrgctgctggggggacaaccataagcaagacatgcccagggtttgccgtggctccagatctactccctgtaggagttcaaggatcacacaaacggtagtaaccagggttgtgaatctgagtacaccctggcaaggcttctcttcagactgaagcagcaattctgccactaccagcagcaaccaggabgtctgttctttgtgggggccagatcagaagagagaggcccctgtgacgcccgggctgcttggtcacaactctgtccaattcaaggatgtttatcggcctctcttagatcctgagtgagacaaatacagaaatgacccattccctgcccaccagaaactcagaggtgattggggagactgacacaggaaaatgaacttaatcaagagagactgtgatatgtgctaagaagggtgtgagggagggagagatgaattttccctggagggatcctagaaagcattgtcatattgccatctccattagctcacttttaaacaactagggtgctggaagaacctttgtctgagggtagttcatagctggaaatacttggaatattttccagagtctctaaactctcatcttcccccacagatacacatccaagctcacaaataggagtagcaattctaggtggtagggttgtgtacggaacccctggctgtctgcatatatctcagaattaccccaggaccattgtcccaaagtctagagtctttacaggtaggcaaaattygttttcaatgcctgtgcctcagctgctgtcacaaatacccatcttaggatcccatcagcttcccatcccccaccagacagccacagtaccctcactttctccctattgttctttcaaatcctgttctcaggaaagaaactgccactaattcattcacactaaggtgtaaatgattgataataggaatgagttacctcttcccacagacatttgtttttaagtatgacagagcagggccttaatcccaagggaaaaggttatggaactggagggggtgagctttctgggtagaaggagacttcctgaatttccttaaaacccagtaagagtaagacctgttgttttggaaggtctgctccaccatctaagagcactgtttttttttkkttgttgttgttgttgttttacggtctctgagggaatatagtaaaaatgcatatgcacgtgcaatttgcacggcagcatttcaccgattgtggactgtattggctaatgtgtttcctggtctttagatgcaaaccattaataacactatcttatctcatagttttttcaggggtgcttcttgattagtagggaattttgaacacctctttaaatacagctagaaaataaaaccaatttgtaaagccacatttgcatatgatgccagcctcacgcatttgtatatctccagaaattcaggtatgcctcaccaatttgcccgtctttaataaaatcttgtgttaaaatttgcatcacgtcgccttccyatgtatgacgaaacaagaaacagagatttccaattgctcttttktcttcagacatttagtaatataaagtacctatttttatgctgaaatgtttatacaggtttattaatagcaagtgcaactaactggcggcatgccttgcaacacattttgatatattagccatgcttccgggtaaaggcaagccccaaactccttatcttttgcagtctctctgggatcagtaaaagaaaaaaaaaataatgtgcttaagaagtgggactgtaaatatgtatatttaactttgtatagcccatgtacctaccttgtatagaaaaataaytttaaaaatttgaatggaagggggtaaaggargtcatgaagtttttttgcatttttatttaaatgaaggaattccaaataactcacctacagatttttagcacaaaaatagccattgtaaagtgttaaaatttacgataagtattctattggggaggaaaggtaactmtgatctcagttacagtttttttttcctttttaatttcattattttgggtttttggtttttgcagtcctatttatctgcagtygtattaagtcctattgctagaataggttactacaaaaaagrttatattctgaaagaaaaataactgacattatatataaccaattaatttaaagtattgccatttaaattacacactgagagcatgtcctatgcagacatagatttttctgttcatttatttttcttcattgcagtggattgatttgataaatagatgtgttgaattactacatttgctgtacatattatttaataaactttattcagaattgcgtggcatat

SEQ ID NO: 395 - DNA, 5703 bp, Homo sapiens
gcggggccagctgcagcgtgtagtgcgagtggggcggacgcgcgcagcccgcccgcccggcgaccagcaaggagttggcatcctttggaagagttcgtgaaagctttctgcccagagctcctggaccaatgcatcttcccaccaccttaaaccactgagcagttcagagccccagttgcagacgacttgtcctgccaccaccatgagttctgaatgtgatggtggttccaaagctgtgatgaatggcttggcacctggcagcaatgggcaagacaaagacatggatcytacaaaaatctgcactgggaagggagcggtgactctccgggcctcgtcttcctacagggaaaccccaagcagtagccctgcgagccctcaggaaacccggcaacacgaaagcaaaccaggtctggagccagagccttcttcagcagatgagtggaggctttcttccagtgctgatgccaatggaaatgcccagccctcttcactcgctgccaagggctacagaagtgtgcatcccaaccttccttctgacaagtcccaggattccagtcctctactaaatgaagtttcttcttcccttattggaactgattcccaagcctttccatcagttagcaagccttcatccgcctatccctccacaacgattgtcaatcctactattgtgctcttgcaacacaatcgagaacagcaaaaacgactcagtagcctttcagatcctgtctcagaaagaagagtgggagagcaggactcagcaccaacccaggaaaaacccacctcacctggcaaggctattgaaaaaagagcaaaggatgacagtaggcgggtggtgaagagcactcaggacttaagcgatgtttccatggatgaagtgggcatcccactccggaacactgagagatcaaaagactggtacaagactatgtttaaacagatccacaaactgaacagagatgatgattcagatctgtactctcccagatactcattttctgaagacacaaaatctcccctttctgtgcctcgstcaaaaagtgagatgagctrcattgatggtgagaaggtagtcaagaggtcggccacactacccctcccagcccgctcttcctcactgaagtcaagctcagaaagaaatgactgggaacccccagataagaaagtagayacaagaaaatatcgtgcagagcccaagagcatttaygaatatcagcctggcaagtcttccgttctgaccaacgaaaagatgagtcgggatataagcccagaagagatagatttaaagaatgaaccttggtataaattcttttcggaattggagtttgggaaaccgactaatctagacaaagatctcagcctctgccagacagagttagaggcagatttagaaaaaatggagacgcttaataaagcacccagtgcaaacgtgccacagagctcagccatcagccctactccggaaatttcttcagagactcctggatatatatattcttccaacttccatgcagtgaagagggaatcagacggggctcctggggatctcacyagcttggagaatgagagacaaatttataaaagtgtcttggaaggtggtgacatccctcttcagggcctgagtgggctcaagcgaccatccagctctgcttccactaaagattcagaatcgccaagacattttataccagctgattacttggaatccacggaagaatttattcgaagacgtcatgatgataaagagatgagacctgccagagccaaatttgactttaaagctcagacactraaggagcttcctctgcagaagggagatattgtttacatttataagcaaattgatcagaactggtatgaaggagaacaccacggccgggtgggaatcttcccacgcacctacatcgagcttcttcctcctgctgagaaggcacagcccaaaaagttgacaccagtgcaggttttggaatatggagaagctattgctaagtttaactttaatggtgatacacaagtagaaatgtccttcagaaagggtgagaggatcacactgctccggcaggtagatgagaactggtacgaagggaggatcccggggacatcccgacaaggcatcttccccatcacctacgtggatgtgatcaagcgaccactggtgaaaaaccctgtggattacatggacctgcctttctcctcctccccaagtcgcagtgccactgcaagcccacagcaacctcaagcccagcagcgaagagtcacccccgacaggagtcaaacctcacaagatttatttagctatcaagcattatatagctatataccacagaatgatgatgagttggaactccgcgatggagatatcgttgatgtcatggaaaaatgtgacgatggatggtttgttggtacttcaagaaggacaargcartttggtacttttccaggcaactatgtaaaacctttgtatctataagaagactgaaaaccatggagattatttttattggaggaggaagcatcattcatgaaccgatctttttagttgagtcagtaggaaaattaatacagtggataaagtaagaagcaaaagacagggacagagaagtgttgtgtttaaaacccaagcctgtctaaggttactgtgtattagacagggccgaactagtgtgctgagcaaaaagaattgaagcaaattgtatttacttagccgcttctgggagccacttcagcctttcccctcccctccacttcttgggtaatctgacctgaagcatagtccaggagcagagttagccagaaatgcctcctgctgccccagccttagagagctcccatctcaatcattgagcctgaaggcttcaagcycaagaatgcaacaagacccccagcctacatttctcagctcccctggagccagctgatcctgtaacgctgctggaggtcagtctgagctaccaagactgtccctagacaaaggtggagtcccccacactgcccaagaccaaatccctcactcaacctgctgaggtgtggatggggaaacagaggcaaaactgaggcacctgatgcattcagcctgctgtgcagcagtgccattgactgccctgatgttcagagagaaacgcacacaaggtttgcccatgagaattggggagcagatggccaagcagataggttatgtctgttttctgagtgatgaagtcaggaagccctgtggctctggaggccacttgtggttcattcttttcccatatccttggcttttagaaatggttaccttcaggacagtgcagctgcatttatcagagcactattgctaagttttcttttctggcttgtgtttttctgggacagtttagaattgggaggcctattctcatagaacaccaaaaatgatgttcagtgattcatttaacatacaccaatgtactctrgctgctggggggacaaccataagcaagacatgcccagggtttgccgtggctccagatctactccctgtaggagttcaaggatcacacaaacggtagtaaccagggttgtgaatctgagtacaccctggcaaggcttctcttcagactgaagcagcaattctgccactaccagcagcaaccaggabgtctgttctttgtgggggccagatcagaagagagaggcccctgtgacgcccgggctgcttggtcacaactctgtccaattcaaggatgtttatcggcctctcttagatcctgagtgagacaaatacagaaatgacccattccctgcccaccagaaactcagaggtgattggggagactgacacaggaaaatgaacttaatcaagagagactgtgatatgtgctaagaagggtgtgagggagggagagatgaattttccctggagggatcctagaaagcattgtcatattgccatctccattagctcacttttaaacaactagggtgctggaagaacctttgtctgagggtagttcatagctggaaatacttggaatattttccagagtctctaaactctcatcttcccccacagatacacatccaagctcacaaataggagtagcaattctaggtggtagggttgtgtacggaacccctggctgtctgcatatatctcagaattaccccaggaccattgtcccaaagtctagagtctttacaggtaggatcccatcagcttcccatcccccaccagacagccacagtaccctcactttctccctattgttctttcaaatcctgttctcaggaaagaaactgccactaattcattcacactaaggtgtaaatgattgataataggaatgagttacctcttcccacagacatttgtttttaagtatgacagagcagggccttaatcccaagggaaaaggttatggaactggagggggtgagctttctgggtagaaggagacttcctgaatttccttaaaacccagtaagagtaagacctgttgttttggaaggtctgctccaccatctaagagcactgtttttttttkkttgttgttgttgttgttttacggtctctgagggaatatagtaaaaatgcatatgcacgtgcaatttgcacggcagcatttcaccgattgtggactgtattggctaatgtgtttcctggtctttagatgcaaaccattaataacactatcttatctcatagttttttcaggggtgcttcttgattagtagggaattttgaacacctctttaaatacagctagaaaataaaaccaatttgtaaagccacatttgcatatgatgccagcctcacgcatttgtatatctccagaaattcaggtatgcctcaccaatttgcccgtctttaataaaatcttgtgttaaaatttgcatcacgtcgccttccyatgtatgacgaaacaagaaacagagatttccaattgctcttttktcttcagacatttagtaatataaagtacctatttttatgctgaaatgtttatacaggtttattaatagcaagtgcaactaactggcggcatgccttgcaacacattttgatatattagccatgcttccgggtaaaggcaagccccaaactccttatcttttgcagtctctctgggatcagtaaaagaaaaaaaaaataatgtgcttaagaagtgggactgtaaatatgtatatttaactttgtatagcccatgtacctaccttgtatagaaaaataaytttaaaaatttgaatggaagggggtaaaggargtcatgaagtttttttgcatttttatttaaatgaaggaattccaaataactcacctacagatttttagcacaaaaatagccattgtaaagtgttaaaatttacgataagtattctattggggaggaaaggtaactmtgatctcagttacagtttttttttcctttttaatttcattattttgggtttttggtttttgcagtcctatttatctgcagtygtattaagtcctattgctagaataggttactacaaaaaagrttatattctgaaagaaaaataactgacattatatataaccaattaatttaaagtattgccatttaaattacacactgagagcatgtcctatgcagacatagatttttctgttcatttatttttcttcattgcagtggattgatttgataaatagatgtgttgaattactacatttgctgtacatattatttaataaactttattcagaattgcgtggcatat

SEQ ID NO: 396 - DNA, 5942 bp, Homo sapiens
gcggggccagctgcagcgtgtagtgcgagtggggcggacgcgcgcagcccgcccgcccggcgaccagcaaggagttggcatcctttggaagagttcgtgaaagctttctgcccagagctcctggaccaatgcatcttcccaccaccttaaaccactgagcagttcagagccccagttgcagacgacttgtcctgccaccaccatgagttctgaatgtgatggtggttccaaagctgtgatgaatggcttggcacctggcagcaatgggcaagacaaagacatggatcytacaaaaatctgcactgggaagggagcggtgactctccgggcctcgtcttcctacagggaaaccccaagcagtagccctgcgagccctcaggaaacccggcaacacgaaagcaaaccaggtctggagccagagccttcttcagcagatgagtggaggctttcttccagtgctgatgccaatggaaatgcccagccctcttcactcgctgccaagggctacagaagtgtgcatcccaaccttccttctgacaagtcccaggatgccacttcctccagtgcagcccagccggaggtaatagttgtccctctctacctggttaatactgacagagggcaagaaggcactgccagacctccaacacctctggggcctcttggctgcgtccccacaatcccagcgactgcctctgccgcctcacctctgaccttcccgactctagatgatttcattccccctcatctgcagaggtggccccaccacagccagccagcccgcgcctctggctcctttgcccccattagccagrcgccaccatccttctcaccaccacctccgctggtccctcctgcccyggaggacctccgcagagtctcrgagcctgacctcacrggagctgtttcgagtaccgattccagtcctctactaaatgaagtttcttcttcccttattggaactgattcccaagcctttccatcagttagcaagccttcatccgcctatccctccacaacgattgtcaatcctactattgtgctcttgcaacacaatcgagaacagcaaaaacgactcagtagcctttcagatcctgtctcagaaagaagagtgggagagcaggactcagcaccaacccaggaaaaacccacctcacctggcaaggctattgaaaaaagagcaaaggatgacagtaggcgggtggtgaagagcactcaggacttaagcgatgtttccatggatgaagtgggcatcccactccggaacactgagagatcaaaagactggtacaagactatgtttaaacagatccacaaactgaacagagatgatgattcagatctgtactctcccagatactcattttctgaagacacaaaatctcccctttctgtgcctcgstcaaaaagtgagatgagctrcattgatggtgagaaggtagtcaagaggtcggccacactacccctcccagcccgctcttcctcactgaagtcaagctcagaaagaaatgactgggaacccccagataagaaagtagayacaagaaaatatcgtgcagagcccaagagcatttaygaatatcagcctggcaagtcttccgttctgaccaacgaaaagatgagctcagccatcagccctactccggaaatttcttcagagactcctggatatatatattcttccaacttccatgcagtgaagagggaatcagacggggctcctggggatctcacyagcttggagaatgagagacaaatttataaaagtgtcttggaaggtggtgacatccctcttcagggcctgagtgggctcaagcgaccatccagctctgcttccactaaagattcagaatcgccaagacattttataccagctgattacttggaatccacggaagaatttattcgaagacgtcatgatgataaagagatgagacctgccagagccaaatttgactttaaagctcagacactraaggagcttcctctgcagaagggagatattgtttacatttataagcaaattgatcagaactggtatgaaggagaacaccacggccgggtgggaatcttcccacgcacctacatcgagcttcttcctcctgctgagaaggcacagcccaaaaagttgacaccagtgcaggttttggaatatggagaagctattgctaagtttaactttaatggtgatacacaagtagaaatgtccttcagaaagggtgagaggatcacactgctccggcaggtagatgagaactggtacgaagggaggatcccggggacatcccgacaaggcatcttccccatcacctacgtggatgtgatcaagcgaccactggtgaaaaaccctgtggattacatggacctgcctttctcctcctccccaagtcgcagtgccactgcaagcccacagcaacctcaagcccagcagcgaagagtcacccccgacaggagtcaaacctcacaagatttatttagctatcaagcattatatagctatataccacagaatgatgatgagttggaactccgcgatggagatatcgttgatgtcatggaaaaatgtgacgatggatggtttgttggtacttcaagaaggacaargcartttggtacttttccaggcaactatgtaaaacctttgtatctataagaagactgaaaaccatggagattatttttattggaggaggaagcatcattcatgaaccgatctttttagttgagtcagtaggaaaattaatacagtggataaagtaagaagcaaaagacagggacagagaagtgttgtgtttaaaacccaagcctgtctaaggttactgtgtattagacagggccgaactagtgtgctgagcaaaaagaattgaagcaaattgtatttacttagccgcttctgggagccacttcagcctttcccctcccctccacttcttgggtaatctgacctgaagcatagtccaggagcagagttagccagaaatgcctcctgctgccccagccttagagagctcccatctcaatcattgagcctgaaggcttcaagcycaagaatgcaacaagacccccagcctacatttctcagctcccctggagccagctgatcctgtaacgctgctggaggtcagtctgagctaccaagactgtccctagacaaaggtggagtcccccacactgcccaagaccaaatccctcactcaacctgctgaggtgtggatggggaaacagaggcaaaactgaggcacctgatgcattcagcctgctgtgcagcagtgccattgactgccctgatgttcagagagaaacgcacacaaggtttgcccatgagaattggggagcagatggccaagcagataggttatgtctgttttctgagtgatgaagtcaggaagccctgtggctctggaggccacttgtggttcattcttttcccatatccttggcttttagaaatggttaccttcaggacagtgcagctgcatttatcagagcactattgctaagttttcttttctggcttgtgtttttctgggacagtttagaattgggaggcctattctcatagaacaccaaaaatgatgttcagtgattcatttaacatacaccaatgtactctrgctgctggggggacaaccataagcaagacatgcccagggtttgccgtggctccagatctactccctgtaggagttcaaggatcacacaaacggtagtaaccagggttgtgaatctgagtacaccctggcaaggcttctcttcagactgaagcagcaattctgccactaccagcagcaaccaggabgtctgttctttgtgggggccagatcagaagagagaggcccctgtgacgcccgggctgcttggtcacaactctgtccaattcaaggatgtttatcggcctctcttagatcctgagtgagacaaatacagaaatgacccattccctgcccaccagaaactcagaggtgattggggagactgacacaggaaaatgaacttaatcaagagagactgtgatatgtgctaagaagggtgtgagggagggagagatgaattttccctggagggatcctagaaagcattgtcatattgccatctccattagctcacttttaaacaactagggtgctggaagaacctttgtctgagggtagttcatagctggaaatacttggaatattttccagagtctctaaactctcatcttcccccacagatacacatccaagctcacaaataggagtagcaattctaggtggtagggttgtgtacggaacccctggctgtctgcatatatctcagaattaccccaggaccattgtcccaaagtctagagtctttacaggtaggcaaaattygttttcaatgcctgtgcctcagctgctgtcacaaatacccatcttaggatcccatcagcttcccatcccccaccagacagccacagtaccctcactttctccctattgttctttcaaatcctgttctcaggaaagaaactgccactaattcattcacactaaggtgtaaatgattgataataggaatgagttacctcttcccacagacatttgtttttaagtatgacagagcagggccttaatcccaagggaaaaggttatggaactggagggggtgagctttctgggtagaaggagacttcctgaatttccttaaaacccagtaagagtaagacctgttgttttggaaggtctgctccaccatctaagagcactgtttttttttkkttgttgttgttgttgttttacggtctctgagggaatatagtaaaaatgcatatgcacgtgcaatttgcacggcagcatttcaccgattgtggactgtattggctaatgtgtttcctggtctttagatgcaaaccattaataacactatcttatctcatagttttttcaggggtgcttcttgattagtagggaattttgaacacctctttaaatacagctagaaaataaaaccaatttgtaaagccacatttgcatatgatgccagcctcacgcatttgtatatctccagaaattcaggtatgcctcaccaatttgcccgtctttaataaaatcttgtgttaaaatttgcatcacgtcgccttccyatgtatgacgaaacaagaaacagagatttccaattgctcttttktcttcagacatttagtaatataaagtacctatttttatgctgaaatgtttatacaggtttattaatagcaagtgcaactaactggcggcatgccttgcaacacattttgatatattagccatgcttccgggtaaaggcaagccccaaactccttatcttttgcagtctctctgggatcagtaaaagaaaaaaaaaataatgtgcttaagaagtgggactgtaaatatgtatatttaactttgtatagcccatgtacctaccttgtatagaaaaataaytttaaaaatttgaatggaagggggtaaaggargtcatgaagtttttttgcatttttatttaaatgaaggaattccaaataactcacctacagatttttagcacaaaaatagccattgtaaagtgttaaaatttacgataagtattctattggggaggaaaggtaactmtgatctcagttacagtttttttttcctttttaatttcattattttgggtttttggtttttgcagtcctatttatctgcagtygtattaagtcctattgctagaataggttactacaaaaaagrttatattctgaaagaaaaataactgacattatatataaccaattaatttaaagtattgccatttaaattacacactgagagcatgtcctatgcagacatagatttttctgttcatttatttttcttcattgcagtggattgatttgataaatagatgtgttgaattactacatttgctgtacatattatttaataaactttattcagaattgcgtggcatat

SEQ ID NO: 397 - DNA, 6818 bp, Homo sapiens
  misc_feature (1)...(6818): n = A,T,C or G, or insertion/deletion polymorphism (see Tables 1-2)
atcctcccttcactgggagagaacttctctcccagggcggtgcgacccggagctccagcgccckagtctccacttcktttgctgaaacttgctttctaccagctaagaaccatgctgcgagtgattgtggaatctgccagcaatatccctaaaacgaaatttggcaagccggatcctattgtttctgtcatttttaaggatgagaaaaagaaaacaaagaaagttgataatgaattgaaccctgtctggaatgagattttggagtttgacttgaggggtataccactggacttttcatcttcccttgggattattgtgaaagattttgagacaattggacaaaataaattaattggcacggcgactgtagccctgaaggacctgactggtgaccagagcagatccctgccgtacaagctgatctccctgctaaatgaaaaagggcaagatactggggccaccattgacttggtgatcggctatgatccgccttctgctccacatccaaatgacctgagcgggcccagcgtgccaggcatgggaggagatggggaagaagatgaaggtgatgaagacaggttggacaatgcagtcaggggccctgggcccaaggggccagttgggacggtgtcggaagctcagcttgctcggaggctcaccaaagtaaagaacagccggcggatgctgtcaaataagccacaggacttccagatccgcgtccgagtgattgagggccgacagttaagtggyaacaacataaggcctgtggtcaaagttcacgtctgtggccagacacaccgaacaagaatcaagagaggaaacaaccctttttttgatgagttgtttttctacaatgtcaacatgaccccttctgaattgatggatgagatcatcagcatccgggtttataattctcactctctgmgggcagattgtctgatgggggaatttaagattgatgttggatttgtttatgatgaacctggccatgctgtcatgagaaagtggcttcttctcaatgacccggaagatascagttcaggttctaaaggttatatgaaagtcagcatgtttgtcctgggaaccggagatgagcctcctcctgagagacgagatcgtgataatgacagtgatgatgtggagagtaatttgttactccctgctggcattgccctccggtgggtgaccttcttgctgaaaatctaccgagctgaggacatcccccagatggatgatgccttctcacagacagtaaaggaaatatttggaggcaatgcagataagaaaaatctcgtggatccttttgtagaagtttcctttgctggaaaaaaggtttgtacaaacataattgagaaaaatgcaaacccagagtggaatcaggtcgtcaatcttcagatcaagtttccttcagtgtgtgaaaaaataaaactaacaatatatgactgggaccgtcttactaaaaatgatgtagttggaacaacatatctacacctctctaaaattgctgcctctggtggggaagtggaagatttctcatcttcgggaactggggctgcatcatatacagtaaacacaggagaaacagaggtaggctttgttccaacgtttggaccttgttacctgaatctttatggaagccccagrgagtacacgggattcccagacccctatgatgagctgaatactggaaagggggaaggagttgcctacagaggcaggatcttggttgaattagccacttttcttgagaagacaccaccagataaaaagcttgagcccatttcaaatgatgacctgctggttgttgagaaataccagcgaaggcggaagtacagcctgtctgccgtgtttcattcagccaccatgttgcaagatgttggtgaggccattcagtttgaagtcagcattgggaactatggcaacaagtttgacaccacctgtaagcctttggcatcaacaactcagtacagcygtgctgtatttgatggcaactactattattacttgccttgggcccacaccaagccagttgttaccctgacttcatactgggaggatattagtcatcgcctggatgcggtgaacactctcctagctatggcagaacggctgcaaacaaatatagaagctctaaaatcagggatacaaggtaaaattcctgcaaaccagctggctgaattgtggctgaagctgatagatgaagttatagaagacacgagatacacgttgcctctcacagaaggaaaagccaacgtcacagttctcgatactcagatccgaaagctgcggtccaggtctctctcccaaatacatgaggcggctgtgaggatgaggtcggaagccacagatgtgaagtccacactggcagaaattgaggactggcttgataaattaatgcagctgactgaagagccacagaacagcatgcctgacatcatcatctggatgatccggggagagaagagactggcctatgcacgaattcccgcacatcaggtcttgtactccaccagtggtgagaatgcatctggaaaatactgtgggaaaacccaaaccatctttctgaagtatccacaggagaaaaacaacgggccaaaggtgcctgtggagttgcgagtgaacatctggctaggcttaagtgctgtggagaagaagtttaacagcttcgcagaaggaactttcaccgtctttgctgaaatgtatgaaaatcaagctctcatgtttggaaaatggggtacttctggattagtaggacgtcataagttttctgatgtcacaggaaaaataaaactcaagagggaattttttctgcctccaaaaggctgggaatgggaaggagagtggatagttgatcctgaaagaagcttgctgactgaggcagatgcaggtcacacggagttcactgatgaagtctatcagaacgagagccgctaccccgggggcgactggaagccggccgaggacacctacacggatgcgaacggcgataaagcagcatcacccagcgagttgacttgtcctccaggttgggaatgggaagatgatgcatggtcttatgacataaatcgagcggtggatgagaaaggctgggaatatggaatcaccattcctcctgatcataagcccaaatcctgggttgcagcagagaaaatgtaccacactcatagacggcgaaggctggtccgaaaacgcaagaaagatttaacacagactgcttcaagcaccgcaagggccatggaggaattgcaagaccaagagggctgggaatatgcttctctaattggctggaaatttcactggaaacaacgtagttcagataccttccgccgcagacgctggaggagaaaaatggctccttcagaaacacatggtgcagctgccatctttaaacttgaaggtgcccttggggcagacactaccgaagatggggatgagaagagcctggagaaacagaagcacagtgccaccactgtgttcggagcaaacacccccattgtttcctgcaattttgacagartctacatctaccatctgcgctgctaygtctatcaagccagaaacctcttggctttagataaggatagcttttcagatccatatgctcatatctgtttcctccatcggagcaaaaccactgagatcatccattcaaccctgaatcccacgtgggaccaaacaattatattcgatgaagttgaaatctwtggggaaccccaaacagttctacagaatccacccaaagttatcatggaactttttgacaatgaccaagtgggcaaagatgaatttttaggacgaagcattttcwctcctgtggtgaaactgaactcagaaatggacatcacacccaaacttytctgrcacccagtaatgaatggagacaaagcctgcggggatgttcttgtaactgcagagctgattctgaggggcaaggatggctccaaccttcccattcttccccctcaaagggcgccaaatctrtacatggtcccccaggggatcaggcctgtggtccagctcactgccattgagattctagcttggggcttaagaaatatgaaaaacttccagatggcttctatcacatcccccagtcttgttgtggagtgtggaggagaaagggtggaatcggtggtgatcaaaaaccttaagaagacacccaactttccaagttctgttctcttcatgaaagtgttcttgcccaaggaggaattgtacatgcccccactggtgatcaaggtcatcgaccacaggcagtttgggcggaagcctgtcgtcggccagtgcaccatcgagcgcctggacygctttcgctgtgacccttatgcagggaaagaggacatcgtcccacagctcaaagcctcccttctgtctgccccaccatgccgggacatcgttatcgaaatggaagacaccaaaccattactggcttctaaggaggaagaaatcgtggactggtggagtaaattttatgcytcctcaggggaacatgaaaaatgcggacagtatattcagaaaggctattccaagctcaagatatataattgtgaactagaaaatgtagcagaatttgagggcctgacagacttctcagatacgttcaagttgtaccgaggcaagtcggatgaaaatgaagatccttctgtggttggagagtttaagggctcctttcggatctaccctctgccggatgaccccagcrtgccagcccctcccagacagtttcgggaattacctgacagcgtcccacaggaatgcacggttaggatttacattgttcgaggcttagagctccagccccaggacaacaatggcctgtgtgacccttacataaaaataacactgggcaaaaaagtcattgaagaccgagatcactacattcccaacactctcaacccagtctttggcaggatgtacgaactgagctgctacttacctcaagaaaaagacctgaaaatttctgtctatgattatgacacctttacccgggatgaaaaagtaggagaaacaattattgatctggaaaaccgattcctttcccgctttgggtcccactgcggcataccagaggagtactgtgtttctggagtcaatacstggcgagatcaactgagaccaacacagctgcttcaaaatgtcgccagattcaaaggcttcccacaacccatcctttccgaagatgggagtagaatcagatatgsaggacgagactacagcttggatgaatttgaagccaacaaaatcctgcaccagcacctcggggcccctgaagagcggcttgctcttcacatcctcaggactcaggggctggtccctgagcacgtggaaacaaggactttgcacagcaccttccagcccracatttcccagggaaaacttcagatgtgggtggatgttttccccaagagtttggggccaccaggccctcctttcaacatcacaccccngaaagccaagaaatactacctgcgtgtgatcatctggaacaccaaggaygttatcttggaygagaaaagcatcacaggagaggaaatgagtgacatctacgtcaaaggctggattcctggcaatgaagaaaacaaacagaaaacagatgtccattacagatctttggatggtgaagggaattttaactggcgatttgttttcccgtttgactaccttccagccgaacaactctgtatcgttgcgaaaaaagagcatttctggagtattgaccaaacggaatttcgaatcccacccaggctgatcattcagatatgggacaatgacaagttttctctggatgactacttgggtttcctagaacttgacttgcgtcacacgatcattcctgcaaaatcaccagagaaatgcagrttggacatgattccggacctcaaagccatgaacccccttaaagccaagacagcctccctctttgagcagaagtccatgaaaggatggtggccatgctacgcagagaaagatggcgcccgcgtaatggctgggaaagtggagatgacattggaaatcctcaacgagaaggaggccgacgagaggccagccgggaaggggcgggacgaacccaacatgaaccccaagctggacttaccaaatcgaccagaaacctccttcctctggttcaccaacccatgcaagaccatgaagttcatcgtgtggcgccgctttaagtgggtcatcatcggcttgctgttcctgcttatcctgctgctcttcgtggccgtgctcctctactctttgccgaactatttgtcaatgaagattgtaaagccaaatgtgtaacaaaggcaaaggcttcatttcaagagtcatccagcaatgagagaatcctgcctctgtagaccaacatccagtgtgattttgtgtctgagaccacaccccagtagcaggttacgccatgtcaccgagccccattgattcccagagggtcttagtcctggaaagtcaggccaacaagcaacgtttgcatcatgttatctcttaagtattaaaagttttattttctaaagtttaaatcatgtttttcaaaatatttttcaaggtggctggttccatttaaaaatcatctttttatatgtgtcttcggttctagacttcagcttttggaaattgctaaatagaattcaaaaatctctgcatcctgaggtgatatacttcatatttgtaatcaactgaaagagctgtgcattataaaatcagttagaatagttagaacaattcttatttatgcccacaaccattgctatattttgtatggatgtcataaaagtctatttaacctctgtaatgaaactaaataaaaatgtttcaccttt

SEQ ID NO: 398 - DNA, 6936 bp, Homo sapiens
actgggagagaacttctctcccagggcggtgcgacccggagctccagcgccckagtctccacttcktttgctgaaacttgctttctaccagctaagaaccatgctgcgagtgattgtggaatctgccagcaatatccctaaaacgaaatttggcaagccggatcctattgtttctgtcatttttaagggttccatgagccagatccgaattgaggctggagtgagtgcctgtgagccaggggtggccattctgccctaagttccatgcrgacagccaggctgtgaagctgaatctagctgagattagactacacagacctctgagaccaatttcaactctgagacttgatgattcttccaaacagtcctccaaacagaacagatgagaaaaagaaaacaaagaaagttgataatgaattgaaccctgtctggaatgagattttggagtttgacttgaggggtataccactggacttttcatcttcccttgggattattgtgaaagattttgagacaattggacaaaataaattaattggcacggcgactgtagccctgaaggacctgactggtgaccagagcagatccctgccgtacaagctgatctccctgctaaatgaaaaagggcaagatactggggccaccattgacttggtgatcggctatgatccgccttctgctccacatccaaatgacctgagcgggcccagcgtgccaggcatgggaggagatggggaagaagatgaaggtgatgaagacaggttggacaatgcagtcaggggccctgggcccaaggggccagttgggacggtgtcggaagctcagcttgctcggaggctcaccaaagtaaagaacagccggcggatgctgtcaaataagccacaggacttccagatccgcgtccgagtgattgagggccgacagttaagtggyaacaacataaggcctgtggtcaaagttcacgtctgtggccagacacaccgaacaagaatcaagagaggaaacaaccctttttttgatgagttgtttttctacaatgtcaacatgaccccttctgaattgatggatgagatcatcagcatccgggtttataattctcactctctgmgggcagattgtctgatgggggaatttaagattgatgttggatttgtttatgatgaacctggccatgctgtcatgagaaagtggcttcttctcaatgacccggaagatascagttcaggttctaaaggttatatgaaagtcagcatgtttgtcctgggaaccggagatgagcctcctcctgagagacgagatcgtgataatgacagtgatgatgtggagagtaatttgttactccctgctggcattgccctccggtgggtgaccttcttgctgaaaatctaccgagctgaggacatcccccagatggatgatgccttctcacagacagtaaaggaaatatttggaggcaatgcagataagaaaaatctcgtggatccttttgtagaagtttcctttgctggaaaaaaggtttgtacaaacataattgagaaaaatgcaaacccagagtggaatcaggtcgtcaatcttcagatcaagtttccttcagtgtgtgaaaaaataaaactaacaatatatgactgggaccgtcttactaaaaatgatgtagttggaacaacatatctacacctctctaaaattgctgcctctggtggggaagtggaagtaaacacaggagaaacagaggtaggctttgttccaacgtttggaccttgttacctgaatctttatggaagccccagrgagtacacgggattcccagacccctatgatgagctgaatactggaaagggggaaggagttgcctacagaggcaggatcttggttgaattagccacttttcttgagaagacaccaccagataaaaagcttgagcccatttcaaatgatgacctgctggttgttgagaaataccagcgaaggcggaagtacagcctgtctgccgtgtttcattcagccaccatgttgcaagatgttggtgaggccattcagtttgaagtcagcattgggaactatggcaacaagtttgacaccacctgtaagcctttggcatcaacaactcagtacagcygtgctgtatttgatggcaactactattattacttgccttgggcccacaccaagccagttgttaccctgacttcatactgggaggatattagtcatcgcctggatgcggtgaacactctcctagctatggcagaacggctgcaaacaaatatagaagctctaaaatcagggatacaaggtaaaattcctgcaaaccagctggctgaattgtggctgaagctgatagatgaagttatagaagacacgagatacacgttgcctctcacagaaggaaaagccaacgtcacagttctcgatactcagatccgaaagctgcggtccaggtctctctcccaaatacatgaggcggctgtgaggatgaggtcggaagccacagatgtgaagtccacactggcagaaattgaggactggcttgataaattaatgcagctgactgaagagccacagaacagcatgcctgacatcatcatctggatgatccggggagagaagagactggcctatgcacgaattcccgcacatcaggtcttgtactccaccagtggtgagaatgcatctggaaaatactgtgggaaaacccaaaccatctttctgaagtatccacaggagaaaaacaacgggccaaaggtgcctgtggagttgcgagtgaacatctggctaggcttaagtgctgtggagaagaagtttaacagcttcgcagaaggaactttcaccgtctttgctgaaatgtatgaaaatcaagctctcatgtttggaaaatggggtacttctggattagtaggacgtcataagttttctgatgtcacaggaaaaataaaactcaagagggaattttttctgcctccaaaaggctgggaatgggaaggagagtggatagttgatcctgaaagaagcttgctgactgaggcagatgcaggtcacacggagttcactgatgaagtctatcagaacgagagccgctaccccgggggcgactggaagccggccgaggacacctacacggatgcgaacggcgataaagcagcatcacccagcgagttgacttgtcctccaggttgggaatgggaagatgatgcatggtcttatgacataaatcgagcggtggatgagaaaggctgggaatatggaatcaccattcctcctgatcataagcccaaatcctgggttgcagcagagaaaatgtaccacactcatagacggcgaaggctggtccgaaaacgcaagaaagatttaacacagactgcttcaagcaccgcaagggccatggaggaattgcaagaccaagagggctgggaatatgcttctctaattggctggaaatttcactggaaacaacgtagttcagataccttccgccgcagacgctggaggagaaaaatggctccttcagaaacacatggtgcagctgccatctttaaacttgaaggtgcccttggggcagacactaccgaagatggggatgagaagagcctggagaaacagaagcacagtgccaccactgtgttcggagcaaacacccccattgtttcctgcaattttgacagartctacatctaccatctgcgctgctaygtctatcaagccagaaacctcttggctttagataaggatagcttttcagatccatatgctcatatctgtttcctccatcggagcaaaaccactgagatcatccattcaaccctgaatcccacgtgggaccaaacaattatattcgatgaagttgaaatctwtggggaaccccaaacagttctacagaatccacccaaagttatcatggaactttttgacaatgaccaagtgggcaaagatgaatttttaggacgaagcattttcwctcctgtggtgaaactgaactcagaaatggacatcacacccaaacttytctgrcacccagtaatgaatggagacaaagcctgcggggatgttcttgtaactgcagagctgattctgaggggcaaggatggctccaaccttcccattcttccccctcaaagggcgccaaatctrtacatggtcccccaggggatcaggcctgtggtccagctcactgccattgagattctagcttggggcttaagaaatatgaaaaacttccagatggcttctatcacatcccccagtcttgttgtggagtgtggaggagaaagggtggaatcggtggtgatcaaaaaccttaagaagacacccaactttccaagttctgttctcttcatgaaagtgttcttgcccaaggaggaattgtacatgcccccactggtgatcaaggtcatcgaccacaggcagtttgggcggaagcctgtcgtcggccagtgcaccatcgagcgcctggacygctttcgctgtgacccttatgcagggaaagaggacatcgtcccacagctcaaagcctcccttctgtctgccccaccatgccgggacatcgttatcgaaatggaagacaccaaaccattactggcttctaagtgcttaagcagtatgtcaacagcactcagcaaaatggcttctccagcgacagtgcatctgacagaaaaggaggaagaaatcgtggactggtggagtaaattttatgcytcctcaggggaacatgaaaaatgcggacagtatattcagaaaggctattccaagctcaagatatataattgtgaactagaaaatgtagcagaatttgagggcctgacagacttctcagatacgttcaagttgtaccgaggcaagtcggatgaaaatgaagatccttctgtggttggagagtttaagggctcctttcggatctaccctctgccggatgaccccagcrtgccagcccctcccagacagtttcgggaattacctgacagcgtcccacaggaatgcacggttaggatttacattgttcgaggcttagagctccagccccaggacaacaatggcctgtgtgacccttacataaaaataacactgggcaaaaaagtcattgaagaccgagatcactacattcccaacactctcaacccagtctttggcaggatgtacgaactgagctgctacttacctcaagaaaaagacctgaaaatttctgtctatgattatgacacctttacccgggatgaaaaagtaggagaaacaattattgatctggaaaaccgattcctttcccgctttgggtcccactgcggcataccagaggagtactgtgtttctggagtcaatacstggcgagatcaactgagaccaacacagctgcttcaaaatgtcgccagattcaaaggcttcccacaacccatcctttccgaagatgggagtagaatcagatatgsaggacgagactacagcttggatgaatttgaagccaacaaaatcctgcaccagcacctcggggcccctgaagagcggcttgctcttcacatcctcaggactcaggggctggtccctgagcacgtggaaacaaggactttgcacagcaccttccagcccracattatactacctgcgtgtgatcatctggaacaccaaggaygttatcttggaygagaaaagcatcacaggagaggaaatgagtgacatctacgtcaaaggctggattcctggcaatgaagaaaacaaacagaaaacagatgtccattacagatctttggatggtgaagggaattttaactggcgatttgttttcccgtttgactaccttccagccgaacaactctgtatcgttgcgaaaaaagagcatttctggagtattgaccaaacggaatttcgaatcccacccaggctgatcattcagatatgggacaatgacaagttttctctggatgactacttgggtttcctagaacttgacttgcgtcacacgatcattcctgcaaaatcaccagagaaatgcagrttggacatgattccggacctcaaagccatgaacccccttaaagccaagacagcctccctctttgagcagaagtccatgaaaggatggtggccatgctacgcagagaaagatggcgcccgcgtaatggctgggaaagtggagatgacattggaaatcctcaacgagaaggaggccgacgagaggccagccgggaaggggcgggacgaacccaacatgaaccccaagctggacttaccaaatcgaccagaaacctccttcctctggttcaccaacccatgcaagaccatgaagttcatcgtgtggcgccgctttaagtgggtcatcatcggcttgctgttcctgcttatcctgctgctcttcgtggccgtgctcctctactctttgccgaactatttgtcaatgaagattgtaaagccaaatgtgtaacaaaggcaaaggcttcatttcaagagtcatccagcaatgagagaatcctgcctctgtagaccaacatccagtgtgattttgtgtctgagaccacaccccagtagcaggttacgccatgtcaccgagccccattgattcccagagggtcttagtcctggaaagtcaggccaacaagcaacgtttgcatcatgttatctcttaagtattaaaagttttattttctaaagtttaaatcatgtttttcaaaatatttttcaaggtggctggttccatttaaaaatcatctttttatatgtgtcttcggttctagacttcagcttttggaaattgctaaatagaattcaaaaatctctgcatcctgaggtgatatacttcatatttgtaatcaactgaaagagctgtgcattataaaatcagttagaatagttagaacaattcttatttatgcccacaaccattgctatattttgtatggatgtcataaaagtctatttaacctctgtaatgaaactaaataaaaatgtttcaccttt

SEQ ID NO: 399 - DNA, 2641 bp, Homo sapiens
ggcatccacacctgatggtgtgactcggccgacgcgagcgccgcgcttcgcttcagctgctagctggcccaagggaggcgaccgcggagggtggcgaggggcggccaggacccgcagccccggggccgggccggtccggaccgccagggagggcaggtcagtgggcagatcgcgtccgcgggattcaatctctgcccgctctgataacagtccttttccctggcgctcacttcgtgcctggcacccggctgggcgcctcaagaccgttgtctcttcgatcgcttctttggacttggcgaccatttcagagatgtcttccagaagtaccaaagatttaattaaaagtaagtggggatcgaagcctagtaactccaaatccgaaactacattagaaaaattaaagggagaaattgcacacttaaagacatcagtggatgaaatcacaagtgggaaaggaaagctgactgataaagagagacasagayttttggagaaaattcgagtccttgaggctgagaaggagaagaatgcttatcaactcacagagaaggacaaagaaatacagcgactgagagaccaactgaaggccagatatagtactacygcattgcttgaacagctggaagagacaacgagagaaggagaaaggagggagcaggtgttgaaagccttatctgaagagaaagacgtattgaaacaacagttgtctgctgcaacctcacgaattgctgaacttgaaagcaaaaccaatacactccgtttatcacagactgtggctccaaactgcttcaactcatcaataaataatattcatgaaatggaartacagctgaaagatgctctggagaaaaatcagcagtggctcgtgtatgatcagcagcgggaagtctatgtaaaaggacttttagcaaagatctttgagttggaaaagaaaacggaaacagctgctcattcactcccacagcagacaaaaaagcctgaatcagaagrttatcttcaagaagagaagcagaaaygttacaacgatctcttggcaagtscaaaaaaagatcttgaggttgaacgacaaaccataactcagctgagttttgaactgagtgaatttcgaagaaaatatgaagaaacccaaaaagaagttcacaatttaaatcagctgttgtattcacaaagaagggcagatgtgcaacatctggaagatgataggcataaaacagagaagatacaaaaactcagggaagagaatgatattgctaggggaaaacttgaagaagagaagaagagatccgaagagctcttatctcaggtccagtttctttacacatctctgctaaagcagcaagaagaacaaacaagggtagctctgttggaacaacagatgcaggcatgtactttagactttgaaaatgaaaaactcgaccgtcaacatgtgcagcatcaattgcwtgtaattcttaaggagctccgaaaagcaagaaatcaaataacacagttggaatccttgaaacagcttcatgagtttgccatcacagagccattagtcactttccaaggagagactgaaaacagagaaaaagttgccgcctcaccaaaaagtcccactgctgcactcaatgaaagcctggtggaatgtcccaagtgcaatatacagtatccagccactgagcatcgcgatctgcttgtccatgtggaatactgttcaaagtagcaaaataagtatttgttttgatattaaaagattcaatactgtattttctgttagcttgtgggcattttgaattatatatttcacattttgcataaaactgcctatctacctttgacactccagcatgctagtgaatcatgtatcttttaggctgctgtgcatttctcttggcagtgatacctccctgacatggttcatcatcaggctgcaatgacagaatgtggtgagcagcgtctactgagactactaacattttgcactgtcaaaatacttggtgaggaaaagatagctcaggttattgctaatgggttaatgcaccagcaagcaaaatattttatgttttgggggtttgaaaaatcaaagataattaaccaaggatcttaactgtgttcgcattttttatccaagcacttagaaaacctacaatcctaattttgatgtccattgttaagaggtggtgatagatactattttttttttcatattgtatagcggttattagaaaagttggggattttcttgatctttattgctgcttaccattgaaacttaacccagctgtgttccccaactctgttctgcgcacgaaacagtatctgtttgaggcataatcttaagtggccacacacaatgttttctcttatgttatctggcagtaactgtaacttgaattacattagcacattctgcttagctaaaattgttaaaataaactttaataaacccatgtagccctctcatttgattgacagtattttagttatttttggcattcttaaagctgggcaatgtaatgatcagatctttgtttgtctgaacaggtatttttatacatgctttttgtaaaccaaaaacttttaaatttcttcaggttttctaacatgcttaccactgggctactgtaaatgagaaaagaataaaattatttaatgtttt

SEQ ID NO: 400 - DNA, 3307 bp, Homo sapiens
ctttggaagtcctatgagggaccatttacggtttcctcagtaatttccaccaggatgaatttccttctcatcactctgcctcaggtagtgctctgaaggtcgtcctttctgaacaaacgcagcaaagcaagccacaccatgggtgagatcaaccaagttgccgtggagaaatacctggaggagaaccctcagtttgccaaggagtactttgacaggaagttgcgggtggaggtgctgggagaaatcttcaagaacagccaggtgccagtccagtccagcatgtccttctctgagctgacccaggtggaggagtcagccctgtgcttggagctgctgtggaycgtgcaggaggaggggggcaccccagagcagggggttcacagggccctrcagaggctggcccacctgctccaggctgaycgctgcagcatgttcctgtgccggtcccggaacggcatacctgaggtggcctctaggttgctggatgtcacccccacctccaagtttgaggacaacctggtgggccctgacaaagaagttgtgtttccattggacattgggatagtgggttgggctgctcacacgaagaaaactcataatgtcccagatgtgaaaaagaacagccatttttctgacttcatggacaagcaaactgggtatgtcactaagaacctgctggcaaccccgatcgtggtgggcaaggaggttcttgctgtgatcatggcagttaacaaagtaaatgcatctgaattttccaaacaggatgaagaggtcttttccaaatacctcaactttgtgtctatcatcctaaggcttcatcacaccagctacatgtacaatattgaatcccgaagaagccagatccttatgtggtcagccaataaagtatttgaagaactcacagatgttgagcgacagtttcacaaagcgctctacacggttagawcatatctgaactgtgaacgatactccattggactgctggacatgaccaaggagaaggaattctacgatgaatggccaatcaagcttggagaagtagagccttataaaggtccaaagacacctgatggcagggaagtcaacttttataaaatcattgattacattttacatggaaaagaagagatcaaagtgattccgacgcctcctgcagaccactggacactcattagtgggttgccaacatatgttgctgaaaatggatttatctgtaacatgatgaatgcccctgcrgatgaatacttcacatttcagaaaggacctgtagacgaaactggttgggtcattaagaatgttttgtccctgcctattgtcaacaagaaagaagatattgtgggagtggctacattttacaacaggaaggatggaaaacctttcgatgagcatgatgaatacattaccgagactctcacacaatttcttggatggtctcttttaaatactgacacctacgataagatgaataagctagaaaacagaaaggacattgctcaggaaatgctcatgaaccaaacsaaagccactcctgaagaaattaagtccattttgaaatttcaagagaagttaaatgttgatgtaattgacgactgtgaagaaaaacaacttgttgcaattttgaaagaggacttgccagacccacgctcagcagaactgtacgaattccgcttcagtgacttcccccttacagagcacggattgattaaatgtggaatacgactgttttttgaaataaatgtggtggagaaattcaaagtacctgtagaggttcttaccagatggatgtacactgtgaggaaagggtaccgagctgtcacttaccacaattggcrgcatgggttcaacgtggggcagaccatgtttactttgctgatgacaggaagattaaagaagtactacacagatctcgaagcctttgccatgcttgctgctgctttctgccatgatattgaccacagaggcaccaataatttgtaccagatgaaatccacgtctccattagcaagacttcatggttcttctattttggagaggcaccacctggagtacagtaagactctgttgcaggatgagagtttaaacatcttccagaacctaaataagcggcagtttgaaacagttattcatttgttcgaggtcgcaataatagcaactgacctggctttatatttcaagaagaggaccatgtttcaaaaaattgttgatgcctgtgaacaaatgcaaacggaagaagaagccatcaaatatgtaactgttgatccaaccaagaaagagattatcatggcaatgatgatgacggcatgtgacttgtctgctattaccaagccctgggaggtgcaaagtcaggtagcacttatggttgcaaatgaattttgggaacaaggagatctggagagaacagtgttgcagcaacaacccattcctatgatggacagaaacaaaagagatgaattacctaaacttcaagttggatttattgattttgtttgtacttttgtatataaggagttctcacggtttcacaaagaaatcacacctatgctgagtggtcttcagaataacagagtagaatggaaatcactagctgatgagtatgatgcaaagatgaaggtcattgaagaggaggcaaaaaagcaagaaggaggagccgaaaaagctgctgaagattcaggaggtggtgatgacaaaaagtccaaaacatgtttaatgttgtaatattatctaactggtctaaacttcaratatcattttacctttgaagaaaaccagaaaacattcaaaagaacttcaacaaatcatcacgtaacaggatcttcagaaaaactaccctgtgactatgaagaaaatatatattgctagcccaaaaatcccaggggcaaaataaagttcaacaaaagtgcaaaatatgacaaaaataggtacatttttggtgccaatttattttaaattaaaaaatatgcaatcctgaaactagtcacaaattcttttttaaaacattaattgtatttatttgctaaggctgctataacaaagtaccacagactgggtgcttaaccaatagaaatgtattttctcaaagtcctgggggctggaagttcaagatcaaggagttggcagggttggtttcttgggaggcctctcaacttggtttgcagatggccatcttctccctgtgtcttcacatggtcttccctctgtgtgtctgtgtcctaatctccttttcttataaggactccagtaggactggattagggcctacccatgtgacctcattttagtcttaattacctcgttaatggccttatct

SEQ ID NO: 401 - DNA, 3311 bp, Homo sapiens
ctttggaagtcctatgagggaccatttacggtttcctcagtaatttccaccaggatgaatttccttctcatcactctgcctcaggtagtgctctgaaggtcgtcctttctgaacaaacgcagcaaagcaagccacaccatgggtgagatcaaccaagttgccgtggagaaatacctggaggagaaccctcagtttgccaaggagtactttgacaggaagttgcgggtggaggtgctgggagaaatcttcaagaacagccaggtgccagtccagtccagcatgtccttctctgagctgacccaggtggaggagtcagccctgtgcttggagctgctgtggaycgtgcaggaggaggggggcaccccagagcagggggttcacagggccctrcagaggctggcccacctgctccaggctgaycgctgcagcatgttcctgtgccggtcccggaacggcatacctgaggtggcctctaggttgctggatgtcacccccacctccaagtttgaggacaacctggtgggccctgacaaagaagttgtgtttccattggacattgggatagtgggttgggctgctcacacgaagaaaactcataatgtcccagatgtgaaaaagaacagccatttttctgacttcatggacaagcaaactgggtatgtcactaagaacctgctggcaaccccgatcgtggtgggcaaggaggttcttgctgtgatcatggcagttaacaaagtaaatgcatctgaattttccaaacaggatgaagaggtcttttccaaatacctcaactttgtgtctatcatcctaaggcttcatcacaccagctacatgtacaatattgaatcccgaagaagccagatccttatgtggtcagccaataaagtatttgaagaactcacagatgttgagcgacagtttcacaaagcgctctacacggttagawcatatctgaactgtgaacgatactccattggactgctggacatgaccaaggagaaggaattctacgatgaatggccaatcaagcttggagaagtagagccttataaaggtccaaagacacctgatggcagggaagtcaacttttataaaatcattgattacattttacatggaaaagaagagatcaaagtgattccgacgcctcctgcagaccactggacactcattagtgggttgccaacatatgttgctgaaaatggatttatctgtaacatgatgaatgcccctgcrgatgaatacttcacatttcagaaaggacctgtagacgaaactggttgggtcattaagaatgttttgtccctgcctattgtcaacaagaaagaagatattgtgggagtggctacattttacaacaggaaggatggaaaacctttcgatgagcatgatgaatacattaccgaggcaaactctcacacaatttcttggatggtctcttttaaatactgacacctacgataagatgaataagctagaaaacagaaaggacattgctcaggaaatgctcatgaaccaaacsaaagccactcctgaagaaattaagtccattttgaaatttcaagagaagttaaatgttgatgtaattgacgactgtgaagaaaaacaacttgttgcaattttgaaagaggacttgccagacccacgctcagcagaactgtacgaattccgcttcagtgacttcccccttacagagcacggattgattaaatgtggaatacgactgttttttgaaataaatgtggtggagaaattcaaagtacctgtagaggttcttaccagatggatgtacactgtgaggaaagggtaccgagctgtcacttaccacaattggcrgcatgggttcaacgtggggcagaccatgtttactttgctgatggtaggaagattaaagaagtactacacagatctcgaagcctttgccatgcttgctgctgctttctgccatgatattgaccacagaggcaccaataatttgtaccagatgaaatccacgtctccattagcaagacttcatggttcttctattttggagaggcaccacctggagtacagtaagactctgttgcaggatgagagtttaaacatcttccagaacctaaataagcggcagtttgaaacagttattcatttgttcgaggtcgcaataatagcaactgacctggctttatatttcaagaagaggaccatgtttcaaaaaattgttgatgcctgtgaacaaatgcaaacggaagaagaagccatcaaatatgtaactgttgatccaaccaagaaagagattatcatggcaatgatgatgacggcatgtgacttgtctgctattaccaagccctgggaggtgcaaagtcaggtagcacttatggttgcaaatgaattttgggaacaaggagatctggagagaacagtgttgcagcaacaacccattcctatgatggacagaaacaaaagagatgaattacctaaacttcaagttggatttattgattttgtttgtacttttgtatataaggagttctcacggtttcacaaagaaatcacacctatgctgagtggtcttcagaataacagagtagaatggaaatcactagctgatgagtatgatgcaaagatgaaggtcattgaagaggaggcaaaaaagcaagaaggaggagccgaaaaagctgctgaagattcaggaggtggtgatgacaaaaagtccaaaacatgtttaatgttgtaatattatctaactggtctaaacttcaratatcattttacctttgaagaaaaccagaaaacattcaaaagaacttcaacaaatcatcacgtaacaggatcttcagaaaaactaccctgtgactatgaagaaaatatatattgctagcccaaaaatcccaggggcaaaataaagttcaacaaaagtgcaaaatatgacaaaaataggtacatttttggtgccaatttattttaaattaaaaaatatgcaatcctgaaactagtcacaaattcttttttaaaacattaattgtatttatttgctaaggctgctataacaaagtaccacagactgggtgcttaaccaatagaaatgtattttctcaaagtcctgggggctggaagttcaagatcaaggagttggcagggttggtttcttgggaggcctctcaacttggtttgcagatggccatcttctccctgtgtcttcacatggtcttccctctgtgtgtctgtgtcctaatctccttttcttataaggactccagtaggactggattagggcctacccatgtgacctcattttagtcttaattacctcgttaatggccttatct

SEQ ID NO: 402 - DNA, 11598 bp, Homo sapiens
gggcgggaggactcgactcggtgggagccgctagagccgggcgcccggggacgtagcctgtagggccaccgggtccccgtcagaggcggcggcgggagcagcggggactgcaggccggggtgcagcgaacgckaccccgcgggctgcggcccggtgtgtgcggagcgtggcgggcgcagcttaccgggcggaggtgagcgcggcgccggctcctcctgcggcggactttgggtgcgacttgacgagcggtggttcgacaagtggccttgcgggccggatcgtcccagtggaagagttgtaaatttgcttctggccttcccctacggattatacctggccttcccctacggattatactcaacttactgtttagaaaatgtggcccacgagacgcctggttactatcaaaaggagcggggtcgacggtccccactttcccctgagcctcagcacctgcttgtttggaaggggtattgaatgtgacatccgtatccagcttcctgttgtgtcaaaacaacattgcaaaattgaaatccatgagcaggaggcaatattacataatttcagttccacaaatccaacacaagtaaatgggtctgttattgatgagccwgtacggctaaaacatggagatgtaataactattattgatcgttccttcaggtatgaaaatgaaagtcttcagartggaaggaagtcaactgaatttccaagaaaaatacgtgaacaggagccagcacgtcgtgtctcaagatctagcttctcttctgaccctgatgagagtgasggaatacctttgaaaagaaggcgtgtgtcctttggtgggcacctaagacctgaactatttgatgaaaacttgcctcctaatacgcctctcaaaaggggagaagccccaaccaaaagaaagtctctggtaatgcacactccacctgtcctgaagaaaatcatcaaggaacagcctcaaccatcaggaaaacaagagtcaggttcagaaatccatgtggaagtgaaggcacmaagcttggttataagccctccagctcctagtcctaggaaaactccagttgccagtgatcaacgccgtaggtcctgcaaaacagcccctgcttccagcagcaaatctcagacagaggttcctaagagaggagggagaaagagtggcaacctgccttcaaagagagtgtctmtcagccgaagtcaacatgatattttacagatgatatgttccaaaagaagaagtggtgcttcggaagcaaatctgattgttgcaaaatcatgggcagatgtagtaaaacttggtgcaaaacaaacacaaactaaagtcataaaacatggtcctcaaaggtcaatgaacaaaaggcaaagaagacctgctactccaaagaagcctgtgggcgaagttcacagtcaatttagtacaggccacgcaaactctccttgtaccataataatagggaaagctcatactgaaaaagtacatgtgcctgctcgaccctacagagtgctcaacaacttcatttccaaccaaaaaatggactttaaggaagatctttcaggaatagctgaaatgttcaagaccccagtgaaggagcaaccgcagttgacaagcacatgtcacatcgctatttcaaattcagagaatttgcttggaaaacagtttcaaggaactgattcaggagaagaacctctgctccccacctcagagagttttggaggaaatgtgttcttcagtgcacagaatgcagcaaaacagccatctgataaatgctctgcaagccctcccttaagayggcagtgtattagagaaaatggaaacgtagcaaaaacgcccaggaacacctacaaaatgacttctstggagacaaaaacttcagatactgagacagagccttcaaaaacagtatccactgyaaacaggtcaggaaggtctacagagttcaggaatatacagaagctacctgtggaaagtaagagtgaagaaacaaatacagaaattgttgagtgcatcctaaaaagaggtcagaaggcaacactactacaacaaaggagagaaggagagatgaaggaaatagaaagaccttttgagacatataaggaaaatattgaattaaaagaaaacgatgaaaagatgaaagcaatgaagagatcaagaacttgggggcagaaatgtgcaccaatgtctgacctgacagacctcaagagcttgcctgatacagaactcatgaaagacacrgcacgtggccagaatctcctccaaacccaagatcatgccaaggcaccaaagagtgagaaaggcaaaatcactaaaatgccctgccagtcattacaaccagaaccaataaacaccccaacacacacaaaacaacagttgaaggcatccctggggaaagtaggtgtgaaagaagagctcctagcagtcrgcaagttcacacggacgtcaggggagaccacgcacacgcacagagagccagyaggagatggcaagagcatcagaacrtttaaggagtctccaaagcagatcctggacccagcagcccgtgtaactggaatgaagaagtggccaagaacgcctaaggaagaggcccagtcactagaagacctggctggcttcaaagagctcttccagacaccaggtccctctgaggaatcaatgactgatgagaaaactaccaaaatagcctgcaaatctccaccaccagaatcagtggacactccaacaagcacaragcaatggcctaagagaagtctcaggaaagcagatgtagaggaagaattcttagcactcaggaaactaacaccatcagcagggaaagccatgcttacgcccaaaccagcaggaggtgatgagaaagacattaaagcatttatgggaactccagtgcagaaactggacctggcaggaactttacctggcagcaaaagacagctacaractcctaaggaaaaggcccaggctctagaagacctggctgkctttaaagagctcttccagactcctggtcacaccgaggaattagtggctgctggtaaaaccaytaaaataccctgcgahtctccacagtcagacccagtggacaccccaacaagcacaaagcaacgacccaagagaagtatcaggaaagcagatgtagagggagaactcttagcgtgcaggaatctaatgccatcagcaggcaaagccatgcacacgcctaaaccrtcagtaggtgaagagaaagacatcatcatatttgtgggaactccagtgcagaaactggacctgacagagaacttaaccggcagcaagagacggccacaaactcctaaggaagaggcccaggctctggaagacctgactggctttaaagagctcttccagacccctggtcatactgaagaagcagtggctgctggcaaaactactaaaatgccctgcgaatcttctccaccagaatcagcagacaccccaacaagcacaagaaggcagcccaagacacctttggagaaaagggacgtacagaaggwgctctcagccctgaagaagctcacacagacatcaggggaaaccacacacacagataaagtaccaggaggtgaggataaaagcatcaacgcgtttagggaaactgcaaaacagaaactggacccagcagcaagtgtaactggtagcaagaggcacccaaaaactaaggaaaaggcccaacccctagaagacctggctggctkgaaagagctcttccagacaccagtatgcactgacaagcccacgactcacgagaaaactaccaaaatagmctgcagatcacaaccagacccagtggacacaccaacaagctccaagccacagtccaagagaagtctcaggaaagtggacgtagaagaagaattcttcgcactyaggawacgaacaccatcagcaggcaaagccatgcacacacccaaaccagcagtaagtggtgagaaaaacatctaygcatttatgggaactccartgcagaaactggacctgacagagaacttaactggcagcaagagacggctacaaactcctaaggaaaaggcccaggctctagaagacctggctggctttaaagagctcttccagacacgaggtcacactgaggaatcaatgactaacgataaaactgccaaagtagcctgcaaatcttcacaaccagaccyagacaaaaacccagcaagctccaagcgacggctcaagacatccctggggaaagtgggcgtgaaagaagagctcctagcagttggcaagctcacacagacatcaggagagactacacacacacacacagagccaacaggagatggtaagagcatgaaagcatttatggagtctccaaagcagatcttagactcagcagcaagtctaactggcagcaagaggcagctgagaactcctaagggaaagtctgaagtccctgaagacctggccggcttcatcgagctcttccagacaccaagtcacactaaggaatcaatgactaaygaaaaaactaccaaagtatcctacagagcttcacagccagacctagtggacaccccaacaagctccaagccacagcccaagagaagtctcaggaaagcagacactgaagaagaatttttagcatttaggaaacaaacgccatcagcaggcaaagccatgcacacacccaaaccagcagtaggtgaagagaaagacatcaacacgtttttgggaactccagtgcagaaastggaccagccaggaaatttacctggcagcaatagacggctacaaactcgtaaggaaaaggcccaggctctagaagaactgactggcttcagagagcttttccagacaccatgcactgataaccccacrrctgatgagaaaactaccaaaaaaatactctgcaaatctccgcwatcagacccagcggacaccccaacaaacacaaagcaacrgcycaagagaagcctcaagaaagcagacgtagaggaagaatttttagcattcaggaaactaacaccatcagcaggcaaagccatgcacacgcctaaagcagcagtaggtgaagagaaagacatcaacacatttgtggggactccagtggagaaactggacctgctaggaaatttacctggcagcaagagacggccacaaactcctaaagaaaaggccaaggctmtagaagatctggctggcttcaaagarctcttccagacaccaggtcacactgasgaatcaatgaccgatgacaaaatcacagaagtatcctgcaaatctccacaaccagacccagtcaaaaccccaacaagctccaagcaacgactcaagatatccttggggaaagtaggtgtgaaagaagaggtcctaccagtcggcaagctcacacagacgtcagggaagaccacacagacacacagagagacagcaggagatggaaagagcatcaaagcgtttaaggaatctgcaaagcagatgctggacccagcaaactatggaactgggatggagaggtggccragaacacctaaggaagaggcccartcactagaagacctggccggcttcaaagagctcttccagacaccagaccacactgaggaatcaacaactgatgacaaaactaccaaaayagcctgcaaatctccaccaccagaatcaatggacactccaacaagcacaaggaggcggcccaaaacacctttggggaaaagggatatagtggaagagctctcagccctgaagcagctcacacagaccacacacacagacaaagtaccaggagatgaggataaaggcatcaacgtgttcagggaaactgcaaaacagaaactggacccagcagcaagtgtaactggtagcaagaggcagccaagaactcctaagggaaaagcccaacccctagaagacttggctggcttgaaagagctcttccagacascartatgcactgacaagcccacgactcaygagaaaactaccaaaatagcctgcagatctccacaaccagacccagtgggtaccccaacaatcttcaagccacagtccaagagaagtctcaggaaagcagacgtagaggaagaatccttagcactcaggaaacgaacaccatcagtagggaaagctatggacacacccaaaccagcaggaggtgatgagaaagacatgaaagcatttatgggaactccagtgcagaaattggacctgccaggaaatttacctggcagcaaaagatggccacaaactcctaaggaaaaggcccaggctctagaagacctggctggcttcaaagagctcttccagacaccaggcactgacaagcccacgactgatgagaaaamtaccaaaatagcctgcaaatctccacaaccagacccagtggacaccccagcaagcacaaagcaacggcccaagagaarcctcaggaaagcagacgtagaggaagaatttttagcactcaggaaacgaacaccatcagcaggcaaagccatggacasmccaaaaccagcagtaagtgatgagaaaaatatcaacacatttgtggaaactccagtgcagaaactggacctgctaggaaatttacctggcagcaagagacagccacagactcctaaggaaaaggctgaggctctagaggacctggttggcttcaaagaactcttccagacaccaggtcacactgaggaatcaatgactgatgacaaaatcacagaagtatcctgtaaatctccacagccagagtcattcaaaacctcaagaagctccaagcaaaggctcaagatacccctggtgaaagtggacatgaaagaagagcccctagcagtcagcaagctcacacggacatcaggggagactacgcaaacacacacagagccaacaggagatagtaagagcatcaaagcrtttaaggagtctccaaagcagatcctggacccagcagcaagtgtaactggtagcaggaggcagctgagaactcgtaaggaaaaggcccgtgctctagaagacctggttgacttcaaagagctcttctcagcaccaggtcacactgaagagtcaatgactattgacaaaaacacaaaaattccctgcaaatctcccccaccagaactaacagacactgccacgagcacaaagagatgccccaagacacrtcycaggaaagaagtaaaagaggagctctcagcagttgagaggctcacgcaaacatcagggcaaagcacacacacacacaaagaaccagcaagcggtgatgagggcatcaaagtattgaagcaacrtgcaaagaagaaaccaaacccagtagaagaggaacccagcaggagaaggccaagagcayctaaggaaaaggcycaacccctggaagacctggccggcttcacagagctctctgaaacatcaggtcacactcaggaatcactgactgctggcaaagccactaaaataccctgcgaatctcccccactagaagtggtagacaccacagcaagcmcaaagaggcatctcaggacacgtgtgcagaaggtacaagtaaaagaagagccttcagcagtcaagttcacacaaacatcaggggaaaccacggatgcagacaaagaaccagcaggtgaagrtaaaggcatcaaagcattgaaggaatctgcaaaacagacaccggctccagcagcaagtgtaactggcagcaggagacrgccaagagcacccagggaaartgcycaagycatagaagacctagctggcttcaaagacccagcagcaggtcacactgaagaatcaatgactgatgacaaaaccactaaaataccctgcaaatcatcaccagaactagaagacacygcaacaagctcaaagagacggcccaggacacrtgcccagaaagtagaagtgaaggaggagctgttagcagttggcaagctcacacaaacctcaggggagascacgcacaccgacaaagagccggtaggtgagggcaaaggcacgaaagcatttaagcaacctgcaaagcggaasstggacgcagaagatgtaattggcagcaggagacrgccaagagcacctaaggaaaaggcccaacccctggaagayctggccagcttccaagagctctctmaaacaccaggccacactgaggaactggcaaatggtgctgctgatagctttacaagcgctccaaagcaaacacctgacagtggaaaacctctaaaaatatccagaagagttcttcgggcccctaaagtagaacccgtgggagacgtggtaagcaccagagaccctgtaaaatcacaaagcaaaagcaacacttccctgcccccactgcccttcaagaggggaggtggcaaagatggaagcgtcacgggaaccaagaggctgcgctgcatgccagcaccagaggaaattgtggaggagctgccagccagcaagaagcagagggttgctcccagggcaagaggcaaatcatccgaacccgtggtcatcatgaagagaagtttgaggacttctgcaaaaagaattgaacctgcggaagagctgaacagcaacgacatgaaaaccaacaaagaggaacacaaattacaagactcrgtccctgaaaataagggaatatccctgcgctccagacgccaarataagactgaggcagracagcaaataactgaggtcwttgtattagcagaaagaatagaaataaacagaaatgaaaagaagcccatgaagacctccccagagatggacattcagaatccagatgatggagcccggaaacccatacctagagacaaagtcastgagaacaaaaggtgcttgaggtctgctagacagaatgagagctcccagcctaaggtggcagaggagagcggagggcagaagagtgcgaaggttctcatgcagaatcagaaagggaaaggagaagcaggaaattcagactccatgtgcytgagatcaagaaagacaaaaagccagcctgcagcaagcactttggagagcraatctgtgcagagagtaacgcggagtgtcaagagrtgtgcagaaaatccaaagarggctgaggacaatgtgtgtgtcaagaaaataasaaccagaagtcatagggacagtgaagatatttgacagaaaaatcgaactgggaaaaatataataaagttagttttgtgataagttctagtgcagtttttgtcataaattacaagtgaattctgtaagtaaggctgtcagtctgcttaagggaagaaaactttggatttgctggstctgaatcggcttcataaactccactgggagcactgctgggctcctggactgagaatagttgaacaccgggggctttgtgaaggagtctgggccaaggtttgccctcagctttgcagaatgaagccttgaggtctgtcaccacccacagccaccctacagcagccttaactgtgacacttgccacactgtgtcgtcrtttgtttgcctatgtyctccagggcacggtggcaggaacaactatcctcgtctgtcccaacactgagcaggcactcggtaaacacgaatgaatggatragcgcacggatgaatggagcttacaagatctgtctttccaatggccgggggcatttggtccccaaattaaggctattggacatctgcacaggacagtcctatttttgatgtcctttcctttctgaaaataaagttttgtgctttggagaatgactygtgagcacatctttagggaccaagagtgactttctgtaaggagtgactcgtggcttgccttggtctcttgggaatacttttctaactagggttgctctcacctgagacattctccacccgcggaatctcagggtcccaggctgtgggccatcacgacctcaaactggctcctaatctccagctttcctgtcattgaaagcttcggaagtttactggctctgctcccgcctgttttctttctgactctatctggcagcccgatgccacccagtacaggaagtgacaccagtactctgtaaagcatcatcatccttggagagactgagcactcagcaccttcagccacgatttcaggatcgcttccttgtgagccgctgcctccgaaatctcctttgaagcccagacatctttctccagcttcagacttgtagatataactcgttcatcttcatttactttccactttgccccctgtcctctctgtgttccccaaatcagagaatagcccgccatcccccagrtcacctgtctggattcctccccattcacccaccttgccaggtgcaggtgaggatggtgcaccagacagggtagctgtcccccaaaatgtgccctgtgcgggcagtgcccygtctccacgtttgtttccccagtgtctggcggggagccaggtgacatcataaatacttgctgaatgaatgcagaaatcagcggtactgacttgtactatattggctgccatgatagggttctcacagcgtcatccatgatcgtaagggagaatgacattctgcttgagggagggaatagaaaggggcagggaggggacatctgagggcttcacagggctgcaaagggtacagggattgcaccagggcagaacaggggagggtgttcaaggaagagtggctcttagcagaggcactttggaaggtgtgaggcataaatgcttccttctacgtaggccaacctcaaaactttcagtaggaatgttgctatgatcaagttgttctaacactttagacttagtagtaattatgaacctcacatagaaaaatttcatccagccatatgcctgtggagtggaatattctgtttagtagaaaaatcctttagagttcagctctaaccagaaatcttgctgaagtatgtcagcaccttttctcaccctggtaagtacagtatttcaagagcacgctaagggtggttttcattttacagggctgttgatgatgggttaaaaatgttcatttaagggctacccccgtgtttaatagatgaacaccacttctacacaaccctccttggtactgggggagggagagatctgacaaatactgcccattcccctaggctgactggatttgagaacaaatacccacccatttccaccatggtatggtaacttctstgagcttcagtttccaagtgaatttccatgtaataggacattcccattaaatacaagctgtttttactttttcgcctcccagggcctgtgsgatctggtcccccagcctctcttgggctttcttacactaactctgtacctaccatctcctgcctcccttaggcaggcacctccaaccaccacacactccctgctgttttccctgcctggaactttcccwccwgccccaccaagatcatttcatccagtcctgagctcagcttaagggaggcttcttgcctgtgggttccctcacccccatgcctgtcctccaggctggggcaggttcttagtttgcctggaattgttctgtacctctttgtagcacgtagtgttgtggaaactaagccactaattgagtttctggctcccctcctggggttgtaagttttgttcattcatgagggccgactgyatttcctggttactstatcccagtgaccagccacaggagatgtccaataaagtatgtgatgaaatggtcttaaaa

SEQ ID NO: 403 - DNA, 11602 bp, Homo sapiens
gggcgggaggactcgactcggtgggagccgctagagccgggcgcccggggacgtagcctgtagggccaccgggtccccgtcagaggcggcggcgggagcagcggggactgcaggccggggtgcagcgaacgckaccccgcgggctgcggcccggtgtgtgcggagcgtggcgggcgcagcttaccgggcggaggtgagcgcggcgccggctcctcctgcggcggactttgggtgcgacttgacgagcggtggttcgacaagtggccttgcgggccggatcgtcccagtggaagagttgtaaatttgcttctggccttcccctacggattatacctggccttcccctacggattatactcaacttactgtttagaaaatgtggcccacgagacgcctggttactatcaaaaggagcggggtcgacggtccccactttcccctgagcctcagcacctgcttgtttggaaggggtattgaatgtgacatccgtatccagcttcctgttgtgtcaaaacaacattgcaaaattgaaatccatgagcaggaggcaatattacataatttcagttccacaaatccaacacaagtaaatgggtctgttattgatgagccwgtacggctaaaacatggagatgtaataactattattgatcgttccttcaggtatgaaaatgaaagtcttcagartggaaggaagtcaactgaatttccaagaaaaatacgtgaacaggagccagcacgtcgtgtctcaagatctagcttctcttctgaccctgatgagaaagctcaagattccaaggcctattcaaaaatcactgaaggaaaagtttcaggaaatacctgaactatttgatgaaaacttgcctcctaatacgcctctcaaaaggggagaagccccaaccaaaagaaagtctctggtaatgcacactccacctgtcctgaagaaaatcatcaaggaacagcctcaaccatcaggaaaacaagagtcaggttcagaaatccatgtggaagtgaaggcacmaagcttggttataagccctccagctcctagtcctaggaaaactccagttgccagtgatcaacgccgtaggtcctgcaaaacagcccctgcttccagcagcaaatctcagacagaggttcctaagagaggagggagaaagagtggcaacctgccttcaaagagagtgtctmtcagccgaagtcaacatgatattttacagatgatatgttccaaaagaagaagtggtgcttcggaagcaaatctgattgttgcaaaatcatgggcagatgtagtaaaacttggtgcaaaacaaacacaaactaaagtcataaaacatggtcctcaaaggtcaatgaacaaaaggcaaagaagacctgctactccaaagaagcctgtgggcgaagttcacagtcaatttagtacaggccacgcaaactctccttgtaccataataatagggaaagctcatactgaaaaagtacatgtgcctgctcgaccctacagagtgctcaacaacttcatttccaaccaaaaaatggactttaaggaagatctttcaggaatagctgaaatgttcaagaccccagtgaaggagcaaccgcagttgacaagcacatgtcacatcgctatttcaaattcagagaatttgcttggaaaacagtttcaaggaactgattcaggagaagaacctctgctccccacctcagagagttttggaggaaatgtgttcttcagtgcacagaatgcagcaaaacagccatctgataaatgctctgcaagccctcccttaagayggcagtgtattagagaaaatggaaacgtagcaaaaacgcccaggaacacctacaaaatgacttctstggagacaaaaacttcagatactgagacagagccttcaaaaacagtatccactgyaaacaggtcaggaaggtctacagagttcaggaatatacagaagctacctgtggaaagtaagagtgaagaaacaaatacagaaattgttgagtgcatcctaaaaagaggtcagaaggcaacactactacaacaaaggagagaaggagagatgaaggaaatagaaagaccttttgagacatataaggaaaatattgaattaaaagaaaacgatgaaaagatgaaagcaatgaagagatcaagaacttgggggcagaaatgtgcaccaatgtctgacctgacagacctcaagagcttgcctgatacagaactcatgaaagacacrgcacgtggccagaatctcctccaaacccaagatcatgccaaggcaccaaagagtgagaaaggcaaaatcactaaaatgccctgccagtcattacaaccagaaccaataaacaccccaacacacacaaaacaacagttgaaggcatccctggggaaagtaggtgtgaaagaagagctcctagcagtcrgcaagttcacacggacgtcaggggagaccacgcacacgcacagagagccagyaggagatggcaagagcatcagaacrtttaaggagtctccaaagcagatcctggacccagcagcccgtgtaactggaatgaagaagtggccaagaacgcctaaggaagaggcccagtcactagaagacctggctggcttcaaagagctcttccagacaccaggtccctctgaggaatcaatgactgatgagaaaactaccaaaatagcctgcaaatctccaccaccagaatcagtggacactccaacaagcacaragcaatggcctaagagaagtctcaggaaagcagatgtagaggaagaattcttagcactcaggaaactaacaccatcagcagggaaagccatgcttacgcccaaaccagcaggaggtgatgagaaagacattaaagcatttatgggaactccagtgcagaaactggacctggcaggaactttacctggcagcaaaagacagctacaractcctaaggaaaaggcccaggctctagaagacctggctgkctttaaagagctcttccagactcctggtcacaccgaggaattagtggctgctggtaaaaccaytaaaataccctgcgahtctccacagtcagacccagtggacaccccaacaagcacaaagcaacgacccaagagaagtatcaggaaagcagatgtagagggagaactcttagcgtgcaggaatctaatgccatcagcaggcaaagccatgcacacgcctaaaccrtcagtaggtgaagagaaagacatcatcatatttgtgggaactccagtgcagaaactggacctgacagagaacttaaccggcagcaagagacggccacaaactcctaaggaagaggcccaggctctggaagacctgactggctttaaagagctcttccagacccctggtcatactgaagaagcagtggctgctggcaaaactactaaaatgccctgcgaatcttctccaccagaatcagcagacaccccaacaagcacaagaaggcagcccaagacacctttggagaaaagggacgtacagaaggwgctctcagccctgaagaagctcacacagacatcaggggaaaccacacacacagataaagtaccaggaggtgaggataaaagcatcaacgcgtttagggaaactgcaaaacagaaactggacccagcagcaagtgtaactggtagcaagaggcacccaaaaactaaggaaaaggcccaacccctagaagacctggctggctkgaaagagctcttccagacaccagtatgcactgacaagcccacgactcacgagaaaactaccaaaatagmctgcagatcacaaccagacccagtggacacaccaacaagctccaagccacagtccaagagaagtctcaggaaagtggacgtagaagaagaattcttcgcactyaggawacgaacaccatcagcaggcaaagccatgcacacacccaaaccagcagtaagtggtgagaaaaacatctaygcatttatgggaactccartgcagaaactggacctgacagagaacttaactggcagcaagagacggctacaaactcctaaggaaaaggcccaggctctagaagacctggctggctttaaagagctcttccagacacgaggtcacactgaggaatcaatgactaacgataaaactgccaaagtagcctgcaaatcttcacaaccagaccyagacaaaaacccagcaagctccaagcgacggctcaagacatccctggggaaagtgggcgtgaaagaagagctcctagcagttggcaagctcacacagacatcaggagagactacacacacacacacagagccaacaggagatggtaagagcatgaaagcatttatggagtctccaaagcagatcttagactcagcagcaagtctaactggcagcaagaggcagctgagaactcctaagggaaagtctgaagtccctgaagacctggccggcttcatcgagctcttccagacaccaagtcacactaaggaatcaatgactaaygaaaaaactaccaaagtatcctacagagcttcacagccagacctagtggacaccccaacaagctccaagccacagcccaagagaagtctcaggaaagcagacactgaagaagaatttttagcatttaggaaacaaacgccatcagcaggcaaagccatgcacacacccaaaccagcagtaggtgaagagaaagacatcaacacgtttttgggaactccagtgcagaaastggaccagccaggaaatttacctggcagcaatagacggctacaaactcgtaaggaaaaggcccaggctctagaagaactgactggcttcagagagcttttccagacaccatgcactgataaccccacrrctgatgagaaaactaccaaaaaaatactctgcaaatctccgcwatcagacccagcggacaccccaacaaacacaaagcaacrgcycaagagaagcctcaagaaagcagacgtagaggaagaatttttagcattcaggaaactaacaccatcagcaggcaaagccatgcacacgcctaaagcagcagtaggtgaagagaaagacatcaacacatttgtggggactccagtggagaaactggacctgctaggaaatttacctggcagcaagagacggccacaaactcctaaagaaaaggccaaggctmtagaagatctggctggcttcaaagarctcttccagacaccaggtcacactgasgaatcaatgaccgatgacaaaatcacagaagtatcctgcaaatctccacaaccagacccagtcaaaaccccaacaagctccaagcaacgactcaagatatccttggggaaagtaggtgtgaaagaagaggtcctaccagtcggcaagctcacacagacgtcagggaagaccacacagacacacagagagacagcaggagatggaaagagcatcaaagcgtttaaggaatctgcaaagcagatgctggacccagcaaactatggaactgggatggagaggtggccragaacacctaaggaagaggcccartcactagaagacctggccggcttcaaagagctcttccagacaccagaccacactgaggaatcaacaactgatgacaaaactaccaaaayagcctgcaaatctccaccaccagaatcaatggacactccaacaagcacaaggaggcggcccaaaacacctttggggaaaagggatatagtggaagagctctcagccctgaagcagctcacacagaccacacacacagacaaagtaccaggagatgaggataaaggcatcaacgtgttcagggaaactgcaaaacagaaactggacccagcagcaagtgtaactggtagcaagaggcagccaagaactcctaagggaaaagcccaacccctagaagacttggctggcttgaaagagctcttccagacascartatgcactgacaagcccacgactcaygagaaaactaccaaaatagcctgcagatctccacaaccagacccagtgggtaccccaacaatcttcaagccacagtccaagagaagtctcaggaaagcagacgtagaggaagaatccttagcactcaggaaacgaacaccatcagtagggaaagctatggacacacccaaaccagcaggaggtgatgagaaagacatgaaagcatttatgggaactccagtgcagaaattggacctgccaggaaatttacctggcagcaaaagatggccacaaactcctaaggaaaaggcccaggctctagaagacctggctggcttcaaagagctcttccagacaccaggcactgacaagcccacgactgatgagaaaamtaccaaaatagcctgcaaatctccacaaccagacccagtggacaccccagcaagcacaaagcaacggcccaagagaarcctcaggaaagcagacgtagaggaagaatttttagcactcaggaaacgaacaccatcagcaggcaaagccatggacasmccaaaaccagcagtaagtgatgagaaaaatatcaacacatttgtggaaactccagtgcagaaactggacctgctaggaaatttacctggcagcaagagacagccacagactcctaaggaaaaggctgaggctctagaggacctggttggcttcaaagaactcttccagacaccaggtcacactgaggaatcaatgactgatgacaaaatcacagaagtatcctgtaaatctccacagccagagtcattcaaaacctcaagaagctccaagcaaaggctcaagatacccctggtgaaagtggacatgaaagaagagcccctagcagtcagcaagctcacacggacatcaggggagactacgcaaacacacacagagccaacaggagatagtaagagcatcaaagcrtttaaggagtctccaaagcagatcctggacccagcagcaagtgtaactggtagcaggaggcagctgagaactcgtaaggaaaaggcccgtgctctagaagacctggttgacttcaaagagctcttctcagcaccaggtcacactgaagagtcaatgactattgacaaaaacacaaaaattccctgcaaatctcccccaccagaactaacagacactgccacgagcacaaagagatgccccaagacacrtcycaggaaagaagtaaaagaggagctctcagcagttgagaggctcacgcaaacatcagggcaaagcacacacacacacaaagaaccagcaagcggtgatgagggcatcaaagtattgaagcaacrtgcaaagaagaaaccaaacccagtagaagaggaacccagcaggagaaggccaagagcayctaaggaaaaggcycaacccctggaagacctggccggcttcacagagctctctgaaacatcaggtcacactcaggaatcactgactgctggcaaagccactaaaataccctgcgaatctcccccactagaagtggtagacaccacagcaagcmcaaagaggcatctcaggacacgtgtgcagaaggtacaagtaaaagaagagccttcagcagtcaagttcacacaaacatcaggggaaaccacggatgcagacaaagaaccagcaggtgaagrtaaaggcatcaaagcattgaaggaatctgcaaaacagacaccggctccagcagcaagtgtaactggcagcaggagacrgccaagagcacccagggaaartgcycaagycatagaagacctagctggcttcaaagacccagcagcaggtcacactgaagaatcaatgactgatgacaaaaccactaaaataccctgcaaatcatcaccagaactagaagacacygcaacaagctcaaagagacggcccaggacacrtgcccagaaagtagaagtgaaggaggagctgttagcagttggcaagctcacacaaacctcaggggagascacgcacaccgacaaagagccggtaggtgagggcaaaggcacgaaagcatttaagcaacctgcaaagcggaasstggacgcagaagatgtaattggcagcaggagacrgccaagagcacctaaggaaaaggcccaacccctggaagayctggccagcttccaagagctctctmaaacaccaggccacactgaggaactggcaaatggtgctgctgatagctttacaagcgctccaaagcaaacacctgacagtggaaaacctctaaaaatatccagaagagttcttcgggcccctaaagtagaacccgtgggagacgtggtaagcaccagagaccctgtaaaatcacaaagcaaaagcaacacttccctgcccccactgcccttcaagaggggaggtggcaaagatggaagcgtcacgggaaccaagaggctgcgctgcatgccagcaccagaggaaattgtggaggagctgccagccagcaagaagcagagggttgctcccagggcaagaggcaaatcatccgaacccgtggtcatcatgaagagaagtttgaggacttctgcaaaaagaattgaacctgcggaagagctgaacagcaacgacatgaaaaccaacaaagaggaacacaaattacaagactcrgtccctgaaaataagggaatatccctgcgctccagacgccaarataagactgaggcagracagcaaataactgaggtcwttgtattagcagaaagaatagaaataaacagaaatgaaaagaagcccatgaagacctccccagagatggacattcagaatccagatgatggagcccggaaacccatacctagagacaaagtcastgagaacaaaaggtgcttgaggtctgctagacagaatgagagctcccagcctaaggtggcagaggagagcggagggcagaagagtgcgaaggttctcatgcagaatcagaaagggaaaggagaagcaggaaattcagactccatgtgcytgagatcaagaaagacaaaaagccagcctgcagcaagcactttggagagcraatctgtgcagagagtaacgcggagtgtcaagagrtgtgcagaaaatccaaagarggctgaggacaatgtgtgtgtcaagaaaataasaaccagaagtcatagggacagtgaagatatttgacagaaaaatcgaactgggaaaaatataataaagttagttttgtgataagttctagtgcagtttttgtcataaattacaagtgaattctgtaagtaaggctgtcagtctgcttaagggaagaaaactttggatttgctggstctgaatcggcttcataaactccactgggagcactgctgggctcctggactgagaatagttgaacaccgggggctttgtgaaggagtctgggccaaggtttgccctcagctttgcagaatgaagccttgaggtctgtcaccacccacagccaccctacagcagccttaactgtgacacttgccacactgtgtcgtcrtttgtttgcctatgtyctccagggcacggtggcaggaacaactatcctcgtctgtcccaacactgagcaggcactcggtaaacacgaatgaatggatragcgcacggatgaatggagcttacaagatctgtctttccaatggccgggggcatttggtccccaaattaaggctattggacatctgcacaggacagtcctatttttgatgtcctttcctttctgaaaataaagttttgtgctttggagaatgactygtgagcacatctttagggaccaagagtgactttctgtaaggagtgactcgtggcttgccttggtctcttgggaatacttttctaactagggttgctctcacctgagacattctccacccgcggaatctcagggtcccaggctgtgggccatcacgacctcaaactggctcctaatctccagctttcctgtcattgaaagcttcggaagtttactggctctgctcccgcctgttttctttctgactctatctggcagcccgatgccacccagtacaggaagtgacaccagtactctgtaaagcatcatcatccttggagagactgagcactcagcaccttcagccacgatttcaggatcgcttccttgtgagccgctgcctccgaaatctcctttgaagcccagacatctttctccagcttcagacttgtagatataactcgttcatcttcatttactttccactttgccccctgtcctctctgtgttccccaaatcagagaatagcccgccatcccccagrtcacctgtctggattcctccccattcacccaccttgccaggtgcaggtgaggatggtgcaccagacagggtagctgtcccccaaaatgtgccctgtgcgggcagtgcccygtctccacgtttgtttccccagtgtctggcggggagccaggtgacatcataaatacttgctgaatgaatgcagaaatcagcggtactgacttgtactatattggctgccatgatagggttctcacagcgtcatccatgatcgtaagggagaatgacattctgcttgagggagggaatagaaaggggcagggaggggacatctgagggcttcacagggctgcaaagggtacagggattgcaccagggcagaacaggggagggtgttcaaggaagagtggctcttagcagaggcactttggaaggtgtgaggcataaatgcttccttctacgtaggccaacctcaaaactttcagtaggaatgttgctatgatcaagttgttctaacactttagacttagtagtaattatgaacctcacatagaaaaatttcatccagccatatgcctgtggagtggaatattctgtttagtagaaaaatcctttagagttcagctctaaccagaaatcttgctgaagtatgtcagcaccttttctcaccctggtaagtacagtatttcaagagcacgctaagggtggttttcattttacagggctgttgatgatgggttaaaaatgttcatttaagggctacccccgtgtttaatagatgaacaccacttctacacaaccctccttggtactgggggagggagagatctgacaaatactgcccattcccctaggctgactggatttgagaacaaatacccacccatttccaccatggtatggtaacttctstgagcttcagtttccaagtgaatttccatgtaataggacattcccattaaatacaagctgtttttactttttcgcctcccagggcctgtgsgatctggtcccccagcctctcttgggctttcttacactaactctgtacctaccatctcctgcctcccttaggcaggcacctccaaccaccacacactccctgctgttttccctgcctggaactttcccwccwgccccaccaagatcatttcatccagtcctgagctcagcttaagggaggcttcttgcctgtgggttccctcacccccatgcctgtcctccaggctggggcaggttcttagtttgcctggaattgttctgtacctctttgtagcacgtagtgttgtggaaactaagccactaattgagtttctggctcccctcctggggttgtaagttttgttcattcatgagggccgactgyatttcctggttactstatcccagtgaccagccacaggagatgtccaataaagtatgtgatgaaatggtcttaaaa

SEQ ID NO: 404 - DNA, 12678 bp, Homo sapiens
gggcgggaggactcgactcggtgggagccgctagagccgggcgcccggggacgtagcctgtagggccaccgggtccccgtcagaggcggcggcgggagcagcggggactgcaggccggggtgcagcgaacgckaccccgcgggctgcggcccggtgtgtgcggagcgtggcgggcgcagcttaccgggcggaggtgagcgcggcgccggctcctcctgcggcggactttgggtgcgacttgacgagcggtggttcgacaagtggccttgcgggccggatcgtcccagtggaagagttgtaaatttgcttctggccttcccctacggattatacctggccttcccctacggattatactcaacttactgtttagaaaatgtggcccacgagacgcctggttactatcaaaaggagcggggtcgacggtccccactttcccctgagcctcagcacctgcttgtttggaaggggtattgaatgtgacatccgtatccagcttcctgttgtgtcaaaacaacattgcaaaattgaaatccatgagcaggaggcaatattacataatttcagttccacaaatccaacacaagtaaatgggtctgttattgatgagccwgtacggctaaaacatggagatgtaataactattattgatcgttccttcaggtatgaaaatgaaagtcttcagartggaaggaagtcaactgaatttccaagaaaaatacgtgaacaggagccagcacgtcgtgtctcaagatctagcttctcttctgaccctgatgagaaagctcaagattccaaggcctattcaaaaatcactgaaggaaaagtttcaggaaatcctcaggtacatatcaagaatgtcaaagaagacagtaccgcagatgactcaaaagacagtgttgctcagggaacaactaatgttcattcctcagaacatgctggacgtaatggcagaaatgcagctgatcccatttctggggattttaaagaaatttccagcgttaaattagtgagccgttatggwgaattgaagtctgttcccactacacaatgtcttgacaatagcaaaaaaaatgaatctccctttwggaagctttatgagtcagtgaagaaagagttggatgtaaaatcacaaaaagaaaatgtcctacagtattgtagaaaatctggattacaaactgattacgcaacagagaaagaaagtgctgatggtttacagggggagacccaactgttggtctcgcgtaagtcaagaccaaaatctggtgggagcggccacgctgtggcagagcctgcttcacctgaacaagagcttgaccagaacaaggggaagggaagagacgtggagtctgttcagactcccagcaaggctgtgggcgccagctttcctctctatgagccggctaaaatgaagacccctgtacaatattcacagcaacaaaattctccacaaaaacataagaacaaagacctgtatactactggtagaagagaatctgtgaatctgggtaaaagtgaaggcttcaaggctggtgataaaactcttactcccaggaagctttcaactagaaatcgaacaccagctaaagttgaagatgcagctgactctgccactaagccagaaaatctctcttccaaaaccagaggaagtattcctacagatgtggaagttctgcctacggaaactgaaattcacaatgagccatttttaactctgtggctcactcaagttgagaggaagatccaaaaggattccctcagcaagcctgagaaattgggcactacagctggacagatgtgctctgggttacctggtcttagttcagttgatatcaacaactttggtgattccattaatgagagtgasggaatacctttgaaaagaaggcgtgtgtcctttggtgggcacctaagacctgaactatttgatgaaaacttgcctcctaatacgcctctcaaaaggggagaagccccaaccaaaagaaagtctctggtaatgcacactccacctgtcctgaagaaaatcatcaaggaacagcctcaaccatcaggaaaacaagagtcaggttcagaaatccatgtggaagtgaaggcacmaagcttggttataagccctccagctcctagtcctaggaaaactccagttgccagtgatcaacgccgtaggtcctgcaaaacagcccctgcttccagcagcaaatctcagacagaggttcctaagagaggagggagaaagagtggcaacctgccttcaaagagagtgtctmtcagccgaagtcaacatgatattttacagatgatatgttccaaaagaagaagtggtgcttcggaagcaaatctgattgttgcaaaatcatgggcagatgtagtaaaacttggtgcaaaacaaacacaaactaaagtcataaaacatggtcctcaaaggtcaatgaacaaaaggcaaagaagacctgctactccaaagaagcctgtgggcgaagttcacagtcaatttagtacaggccacgcaaactctccttgtaccataataatagggaaagctcatactgaaaaagtacatgtgcctgctcgaccctacagagtgctcaacaacttcatttccaaccaaaaaatggactttaaggaagatctttcaggaatagctgaaatgttcaagaccccagtgaaggagcaaccgcagttgacaagcacatgtcacatcgctatttcaaattcagagaatttgcttggaaaacagtttcaaggaactgattcaggagaagaacctctgctccccacctcagagagttttggaggaaatgtgttcttcagtgcacagaatgcagcaaaacagccatctgataaatgctctgcaagccctcccttaagayggcagtgtattagagaaaatggaaacgtagcaaaaacgcccaggaacacctacaaaatgacttctstggagacaaaaacttcagatactgagacagagccttcaaaaacagtatccactgyaaacaggtcaggaaggtctacagagttcaggaatatacagaagctacctgtggaaagtaagagtgaagaaacaaatacagaaattgttgagtgcatcctaaaaagaggtcagaaggcaacactactacaacaaaggagagaaggagagatgaaggaaatagaaagaccttttgagacatataaggaaaatattgaattaaaagaaaacgatgaaaagatgaaagcaatgaagagatcaagaacttgggggcagaaatgtgcaccaatgtctgacctgacagacctcaagagcttgcctgatacagaactcatgaaagacacrgcacgtggccagaatctcctccaaacccaagatcatgccaaggcaccaaagagtgagaaaggcaaaatcactaaaatgccctgccagtcattacaaccagaaccaataaacaccccaacacacacaaaacaacagttgaaggcatccctggggaaagtaggtgtgaaagaagagctcctagcagtcrgcaagttcacacggacgtcaggggagaccacgcacacgcacagagagccagyaggagatggcaagagcatcagaacrtttaaggagtctccaaagcagatcctggacccagcagcccgtgtaactggaatgaagaagtggccaagaacgcctaaggaagaggcccagtcactagaagacctggctggcttcaaagagctcttccagacaccaggtccctctgaggaatcaatgactgatgagaaaactaccaaaatagcctgcaaatctccaccaccagaatcagtggacactccaacaagcacaragcaatggcctaagagaagtctcaggaaagcagatgtagaggaagaattcttagcactcaggaaactaacaccatcagcagggaaagccatgcttacgcccaaaccagcaggaggtgatgagaaagacattaaagcatttatgggaactccagtgcagaaactggacctggcaggaactttacctggcagcaaaagacagctacaractcctaaggaaaaggcccaggctctagaagacctggctgkctttaaagagctcttccagactcctggtcacaccgaggaattagtggctgctggtaaaaccaytaaaataccctgcgahtctccacagtcagacccagtggacaccccaacaagcacaaagcaacgacccaagagaagtatcaggaaagcagatgtagagggagaactcttagcgtgcaggaatctaatgccatcagcaggcaaagccatgcacacgcctaaaccrtcagtaggtgaagagaaagacatcatcatatttgtgggaactccagtgcagaaactggacctgacagagaacttaaccggcagcaagagacggccacaaactcctaaggaagaggcccaggctctggaagacctgactggctttaaagagctcttccagacccctggtcatactgaagaagcagtggctgctggcaaaactactaaaatgccctgcgaatcttctccaccagaatcagcagacaccccaacaagcacaagaaggcagcccaagacacctttggagaaaagggacgtacagaaggwgctctcagccctgaagaagctcacacagacatcaggggaaaccacacacacagataaagtaccaggaggtgaggataaaagcatcaacgcgtttagggaaactgcaaaacagaaactggacccagcagcaagtgtaactggtagcaagaggcacccaaaaactaaggaaaaggcccaacccctagaagacctggctggctkgaaagagctcttccagacaccagtatgcactgacaagcccacgactcacgagaaaactaccaaaatagmctgcagatcacaaccagacccagtggacacaccaacaagctccaagccacagtccaagagaagtctcaggaaagtggacgtagaagaagaattcttcgcactyaggawacgaacaccatcagcaggcaaagccatgcacacacccaaaccagcagtaagtggtgagaaaaacatctaygcatttatgggaactccartgcagaaactggacctgacagagaacttaactggcagcaagagacggctacaaactcctaaggaaaaggcccaggctctagaagacctggctggctttaaagagctcttccagacacgaggtcacactgaggaatcaatgactaacgataaaactgccaaagtagcctgcaaatcttcacaaccagaccyagacaaaaacccagcaagctccaagcgacggctcaagacatccctggggaaagtgggcgtgaaagaagagctcctagcagttggcaagctcacacagacatcaggagagactacacacacacacacagagccaacaggagatggtaagagcatgaaagcatttatggagtctccaaagcagatcttagactcagcagcaagtctaactggcagcaagaggcagctgagaactcctaagggaaagtctgaagtccctgaagacctggccggcttcatcgagctcttccagacaccaagtcacactaaggaatcaatgactaaygaaaaaactaccaaagtatcctacagagcttcacagccagacctagtggacaccccaacaagctccaagccacagcccaagagaagtctcaggaaagcagacactgaagaagaatttttagcatttaggaaacaaacgccatcagcaggcaaagccatgcacacacccaaaccagcagtaggtgaagagaaagacatcaacacgtttttgggaactccagtgcagaaastggaccagccaggaaatttacctggcagcaatagacggctacaaactcgtaaggaaaaggcccaggctctagaagaactgactggcttcagagagcttttccagacaccatgcactgataaccccacrrctgatgagaaaactaccaaaaaaatactctgcaaatctccgcwatcagacccagcggacaccccaacaaacacaaagcaacrgcycaagagaagcctcaagaaagcagacgtagaggaagaatttttagcattcaggaaactaacaccatcagcaggcaaagccatgcacacgcctaaagcagcagtaggtgaagagaaagacatcaacacatttgtggggactccagtggagaaactggacctgctaggaaatttacctggcagcaagagacggccacaaactcctaaagaaaaggccaaggctmtagaagatctggctggcttcaaagarctcttccagacaccaggtcacactgasgaatcaatgaccgatgacaaaatcacagaagtatcctgcaaatctccacaaccagacccagtcaaaaccccaacaagctccaagcaacgactcaagatatccttggggaaagtaggtgtgaaagaagaggtcctaccagtcggcaagctcacacagacgtcagggaagaccacacagacacacagagagacagcaggagatggaaagagcatcaaagcgtttaaggaatctgcaaagcagatgctggacccagcaaactatggaactgggatggagaggtggccragaacacctaaggaagaggcccartcactagaagacctggccggcttcaaagagctcttccagacaccagaccacactgaggaatcaacaactgatgacaaaactaccaaaayagcctgcaaatctccaccaccagaatcaatggacactccaacaagcacaaggaggcggcccaaaacacctttggggaaaagggatatagtggaagagctctcagccctgaagcagctcacacagaccacacacacagacaaagtaccaggagatgaggataaaggcatcaacgtgttcagggaaactgcaaaacagaaactggacccagcagcaagtgtaactggtagcaagaggcagccaagaactcctaagggaaaagcccaacccctagaagacttggctggcttgaaagagctcttccagacascartatgcactgacaagcccacgactcaygagaaaactaccaaaatagcctgcagatctccacaaccagacccagtgggtaccccaacaatcttcaagccacagtccaagagaagtctcaggaaagcagacgtagaggaagaatccttagcactcaggaaacgaacaccatcagtagggaaagctatggacacacccaaaccagcaggaggtgatgagaaagacatgaaagcatttatgggaactccagtgcagaaattggacctgccaggaaatttacctggcagcaaaagatggccacaaactcctaaggaaaaggcccaggctctagaagacctggctggcttcaaagagctcttccagacaccaggcactgacaagcccacgactgatgagaaaamtaccaaaatagcctgcaaatctccacaaccagacccagtggacaccccagcaagcacaaagcaacggcccaagagaarcctcaggaaagcagacgtagaggaagaatttttagcactcaggaaacgaacaccatcagcaggcaaagccatggacasmccaaaaccagcagtaagtgatgagaaaaatatcaacacatttgtggaaactccagtgcagaaactggacctgctaggaaatttacctggcagcaagagacagccacagactcctaaggaaaaggctgaggctctagaggacctggttggcttcaaagaactcttccagacaccaggtcacactgaggaatcaatgactgatgacaaaatcacagaagtatcctgtaaatctccacagccagagtcattcaaaacctcaagaagctccaagcaaaggctcaagatacccctggtgaaagtggacatgaaagaagagcccctagcagtcagcaagctcacacggacatcaggggagactacgcaaacacacacagagccaacaggagatagtaagagcatcaaagcrtttaaggagtctccaaagcagatcctggacccagcagcaagtgtaactggtagcaggaggcagctgagaactcgtaaggaaaaggcccgtgctctagaagacctggttgacttcaaagagctcttctcagcaccaggtcacactgaagagtcaatgactattgacaaaaacacaaaaattccctgcaaatctcccccaccagaactaacagacactgccacgagcacaaagagatgccccaagacacrtcycaggaaagaagtaaaagaggagctctcagcagttgagaggctcacgcaaacatcagggcaaagcacacacacacacaaagaaccagcaagcggtgatgagggcatcaaagtattgaagcaacrtgcaaagaagaaaccaaacccagtagaagaggaacccagcaggagaaggccaagagcayctaaggaaaaggcycaacccctggaagacctggccggcttcacagagctctctgaaacatcaggtcacactcaggaatcactgactgctggcaaagccactaaaataccctgcgaatctcccccactagaagtggtagacaccacagcaagcmcaaagaggcatctcaggacacgtgtgcagaaggtacaagtaaaagaagagccttcagcagtcaagttcacacaaacatcaggggaaaccacggatgcagacaaagaaccagcaggtgaagrtaaaggcatcaaagcattgaaggaatctgcaaaacagacaccggctccagcagcaagtgtaactggcagcaggagacrgccaagagcacccagggaaartgcycaagycatagaagacctagctggcttcaaagacccagcagcaggtcacactgaagaatcaatgactgatgacaaaaccactaaaataccctgcaaatcatcaccagaactagaagacacygcaacaagctcaaagagacggcccaggacacrtgcccagaaagtagaagtgaaggaggagctgttagcagttggcaagctcacacaaacctcaggggagascacgcacaccgacaaagagccggtaggtgagggcaaaggcacgaaagcatttaagcaacctgcaaagcggaasstggacgcagaagatgtaattggcagcaggagacrgccaagagcacctaaggaaaaggcccaacccctggaagayctggccagcttccaagagctctctmaaacaccaggccacactgaggaactggcaaatggtgctgctgatagctttacaagcgctccaaagcaaacacctgacagtggaaaacctctaaaaatatccagaagagttcttcgggcccctaaagtagaacccgtgggagacgtggtaagcaccagagaccctgtaaaatcacaaagcaaaagcaacacttccctgcccccactgcccttcaagaggggaggtggcaaagatggaagcgtcacgggaaccaagaggctgcgctgcatgccagcaccagaggaaattgtggaggagctgccagccagcaagaagcagagggttgctcccagggcaagaggcaaatcatccgaacccgtggtcatcatgaagagaagtttgaggacttctgcaaaaagaattgaacctgcggaagagctgaacagcaacgacatgaaaaccaacaaagaggaacacaaattacaagactcrgtccctgaaaataagggaatatccctgcgctccagacgccaarataagactgaggcagracagcaaataactgaggtcwttgtattagcagaaagaatagaaataaacagaaatgaaaagaagcccatgaagacctccccagagatggacattcagaatccagatgatggagcccggaaacccatacctagagacaaagtcastgagaacaaaaggtgcttgaggtctgctagacagaatgagagctcccagcctaaggtggcagaggagagcggagggcagaagagtgcgaaggttctcatgcagaatcagaaagggaaaggagaagcaggaaattcagactccatgtgcytgagatcaagaaagacaaaaagccagcctgcagcaagcactttggagagcraatctgtgcagagagtaacgcggagtgtcaagagrtgtgcagaaaatccaaagarggctgaggacaatgtgtgtgtcaagaaaataasaaccagaagtcatagggacagtgaagatatttgacagaaaaatcgaactgggaaaaatataataaagttagttttgtgataagttctagtgcagtttttgtcataaattacaagtgaattctgtaagtaaggctgtcagtctgcttaagggaagaaaactttggatttgctggstctgaatcggcttcataaactccactgggagcactgctgggctcctggactgagaatagttgaacaccgggggctttgtgaaggagtctgggccaaggtttgccctcagctttgcagaatgaagccttgaggtctgtcaccacccacagccaccctacagcagccttaactgtgacacttgccacactgtgtcgtcrtttgtttgcctatgtyctccagggcacggtggcaggaacaactatcctcgtctgtcccaacactgagcaggcactcggtaaacacgaatgaatggatragcgcacggatgaatggagcttacaagatctgtctttccaatggccgggggcatttggtccccaaattaaggctattggacatctgcacaggacagtcctatttttgatgtcctttcctttctgaaaataaagttttgtgctttggagaatgactygtgagcacatctttagggaccaagagtgactttctgtaaggagtgactcgtggcttgccttggtctcttgggaatacttttctaactagggttgctctcacctgagacattctccacccgcggaatctcagggtcccaggctgtgggccatcacgacctcaaactggctcctaatctccagctttcctgtcattgaaagcttcggaagtttactggctctgctcccgcctgttttctttctgactctatctggcagcccgatgccacccagtacaggaagtgacaccagtactctgtaaagcatcatcatccttggagagactgagcactcagcaccttcagccacgatttcaggatcgcttccttgtgagccgctgcctccgaaatctcctttgaagcccagacatctttctccagcttcagacttgtagatataactcgttcatcttcatttactttccactttgccccctgtcctctctgtgttccccaaatcagagaatagcccgccatcccccagrtcacctgtctggattcctccccattcacccaccttgccaggtgcaggtgaggatggtgcaccagacagggtagctgtcccccaaaatgtgccctgtgcgggcagtgcccygtctccacgtttgtttccccagtgtctggcggggagccaggtgacatcataaatacttgctgaatgaatgcagaaatcagcggtactgacttgtactatattggctgccatgatagggttctcacagcgtcatccatgatcgtaagggagaatgacattctgcttgagggagggaatagaaaggggcagggaggggacatctgagggcttcacagggctgcaaagggtacagggattgcaccagggcagaacaggggagggtgttcaaggaagagtggctcttagcagaggcactttggaaggtgtgaggcataaatgcttccttctacgtaggccaacctcaaaactttcagtaggaatgttgctatgatcaagttgttctaacactttagacttagtagtaattatgaacctcacatagaaaaatttcatccagccatatgcctgtggagtggaatattctgtttagtagaaaaatcctttagagttcagctctaaccagaaatcttgctgaagtatgtcagcaccttttctcaccctggtaagtacagtatttcaagagcacgctaagggtggttttcattttacagggctgttgatgatgggttaaaaatgttcatttaagggctacccccgtgtttaatagatgaacaccacttctacacaaccctccttggtactgggggagggagagatctgacaaatactgcccattcccctaggctgactggatttgagaacaaatacccacccatttccaccatggtatggtaacttctstgagcttcagtttccaagtgaatttccatgtaataggacattcccattaaatacaagctgtttttactttttcgcctcccagggcctgtgsgatctggtcccccagcctctcttgggctttcttacactaactctgtacctaccatctcctgcctcccttaggcaggcacctccaaccaccacacactccctgctgttttccctgcctggaactttcccwccwgccccaccaagatcatttcatccagtcctgagctcagcttaagggaggcttcttgcctgtgggttccctcacccccatgcctgtcctccaggctggggcaggttcttagtttgcctggaattgttctgtacctctttgtagcacgtagtgttgtggaaactaagccactaattgagtttctggctcccctcctggggttgtaagttttgttcattcatgagggccgactgyatttcctggttactstatcccagtgaccagccacaggagatgtccaataaagtatgtgatgaaatggtcttaaaa

SEQ ID NO: 405 - DNA, 12515 bp, Homo sapiens
ctaccgggcggaggtgagcgcggcgccggctcctcctgcggcggactttgggtgcgacttgacgagcggtggttcgacaagtggccttgcgggccggatcgtcccagtggaagagttgtaaatttgcttctggccttcccctacggattatacctggccttcccctacggattatactcaacttactgtttagaaaatgtggcccacgagacgcctggttactatcaaaaggagcggggtcgacggtccccactttcccctgagcctcagcacctgcttgtttggaaggggtattgaatgtgacatccgtatccagcttcctgttgtgtcaaaacaacattgcaaaattgaaatccatgagcaggaggcaatattacataatttcagttccacaaatccaacacaagtaaatgggtctgttattgatgagccwgtacggctaaaacatggagatgtaataactattattgatcgttccttcaggtatgaaaatgaaagtcttcagartggaaggaagtcaactgaatttccaagaaaaatacgtgaacaggagccagcacgtcgtgtctcaagatctagcttctcttctgaccctgatgagaaagctcaagattccaaggcctattcaaaaatcactgaaggaaaagtttcaggaaatcctcaggtacatatcaagaatgtcaaagaagacagtaccgcagatgactcaaaagacagtgttgctcagggaacaactaatgttcattcctcagaacatgctggacgtaatggcagaaatgcagctgatcccatttctggggattttaaagaaatttccagcgttaaattagtgagccgttatggwgaattgaagtctgttcccactacacaatgtcttgacaatagcaaaaaaaatgaatctccctttwggaagctttatgagtcagtgaagaaagagttggatgtaaaatcacaaaaagaaaatgtcctacagtattgtagaaaatctggattacaaactgattacgcaacagagaaagaaagtgctgatggtttacagggggagacccaactgttggtctcgcgtaagtcaagaccaaaatctggtgggagcggccacgctgtggcagagcctgcttcacctgaacaagagcttgaccagaacaaggggaagggaagagacgtggagtctgttcagactcccagcaaggctgtgggcgccagctttcctctctatgagccggctaaaatgaagacccctgtacaatattcacagcaacaaaattctccacaaaaacataagaacaaagacctgtatactactggtagaagagaatctgtgaatctgggtaaaagtgaaggcttcaaggctggtgataaaactcttactcccaggaagctttcaactagaaatcgaacaccagctaaagttgaagatgcagctgactctgccactaagccagaaaatctctcttccaaaaccagaggaagtattcctacagatgtggaagttctgcctacggaaactgaaattcacaatgagccatttttaactctgtggctcactcaagttgagaggaagatccaaaaggattccctcagcaagcctgagaaattgggcactacagctggacagatgtgctctgggttacctggtcttagttcagttgatatcaacaactttggtgattccattaatgagagtgasggaatacctttgaaaagaaggcgtgtgtcctttggtgggcacctaagacctgaactatttgatgaaaacttgcctcctaatacgcctctcaaaaggggagaagccccaaccaaaagaaagtctctggtaatgcacactccacctgtcctgaagaaaatcatcaaggaacagcctcaaccatcaggaaaacaagagtcaggttcagaaatccatgtggaagtgaaggcacmaagcttggttataagccctccagctcctagtcctaggaaaactccagttgccagtgatcaacgccgtaggtcctgcaaaacagcccctgcttccagcagcaaatctcagacagaggttcctaagagaggaggagaaagagtggcaacctgccttcaaaagagagtgtctmtcagccgaagtcaacatgatattttacagatgatatgttccaaaagaagaagtggtgcttcggaagcaaatctgattgttgcaaaatcatgggcagatgtagtaaaacttggtgcaaaacaaacacaaactaaagtcataaaacatggtcctcaaaggtcaatgaacaaaaggcaaagaagacctgctactccaaagaagcctgtgggcgaagttcacagtcaatttagtacaggccacgcaaactctccttgtaccataataatagggaaagctcatactgaaaaagtacatgtgcctgctcgaccctacagagtgctcaacaacttcatttccaaccaaaaaatggactttaaggaagatctttcaggaatagctgaaatgttcaagaccccagtgaaggagcaaccgcagttgacaagcacatgtcacatcgctatttcaaattcagagaatttgcttggaaaacagtttcaaggaactgattcaggagaagaacctctgctccccacctcagagagttttggaggaaatgtgttcttcagtgcacagaatgcagcaaaacagccatctgataaatgctctgcaagccctcccttaagayggcagtgtattagagaaaatggaaacgtagcaaaaacgcccaggaacacctacaaaatgacttctstggagacaaaaacttcagatactgagacagagccttcaaaaacagtatccactgyaaacaggtcaggaaggtctacagagttcaggaatatacagaagctacctgtggaaagtaagagtgaagaaacaaatacagaaattgttgagtgcatcctaaaaagaggtcagaaggcaacactactacaacaaaggagagaaggagagatgaaggaaatagaaagaccttttgagacatataaggaaaatattgaattaaaagaaaacgatgaaaagatgaaagcaatgaagagatcaagaacttgggggcagaaatgtgcaccaatgtctgacctgacagacctcaagagcttgcctgatacagaactcatgaaagacacrgcacgtggccagaatctcctccaaacccaagatcatgccaaggcaccaaagagtgagaaaggcaaaatcactaaaatgccctgccagtcattacaaccagaaccaataaacaccccaacacacacaaaacaacagttgaaggcatccctggggaaagtaggtgtgaaagaagagctcctagcagtcrgcaagttcacacggacgtcaggggagaccacgcacacgcacagagagccagyaggagatggcaagagcatcagaacrtttaaggagtctccaaagcagatcctggacccagcagcccgtgtaactggaatgaagaagtggccaagaacgcctaaggaagaggcccagtcactagaagacctggctggcttcaaagagctcttccagacaccaggtccctctgaggaatcaatgactgatgagaaaactaccaaaatagcctgcaaatctccaccaccagaatcagtggacactccaacaagcacaragcaatggcctaagagaagtctcaggaaagcagatgtagaggaagaattcttagcactcaggaaactaacaccatcagcagggaaagccatgcttacgcccaaaccagcaggaggtgatgagaaagacattaaagcatttatgggaactccagtgcagaaactggacctggcaggaactttacctggcagcaaaagacagctacaractcctaaggaaaaggcccaggctctagaagacctggctgkctttaaagagctcttccagactcctggtcacaccgaggaattagtggctgctggtaaaaccaytaaaataccctgcgahtctccacagtcagacccagtggacaccccaacaagcacaaagcaacgacccaagagaagtatcaggaaagcagatgtagagggagaactcttagcgtgcaggaatctaatgccatcagcaggcaaagccatgcacacgcctaaaccrtcagtaggtgaagagaaagacatcatcatatttgtgggaactccagtgcagaaactggacctgacagagaacttaaccggcagcaagagacggccacaaactcctaaggaagaggcccaggctctggaagacctgactggctttaaagagctcttccagacccctggtcatactgaagaagcagtggctgctggcaaaactactaaaatgccctgcgaatcttctccaccagaatcagcagacaccccaacaagcacaagaaggcagcccaagacacctttggagaaaagggacgtacagaaggwgctctcagccctgaagaagctcacacagacatcaggggaaaccacacacacagataaagtaccaggaggtgaggataaaagcatcaacgcgtttagggaaactgcaaaacagaaactggacccagcagcaagtgtaactggtagcaagaggcacccaaaaactaaggaaaaggcccaacccctagaagacctggctggctkgaaagagctcttccagacaccagtatgcactgacaagcccacgactcacgagaaaactaccaaaatagmctgcagatcacaaccagacccagtggacacaccaacaagctccaagccacagtccaagagaagtctcaggaaagtggacgtagaagaagaattcttcgcactyaggawacgaacaccatcagcaggcaaagccatgcacacacccaaaccagcagtaagtggtgagaaaaacatctaygcatttatgggaactccartgcagaaactggacctgacagagaacttaactggcagcaagagacggctacaaactcctaaggaaaaggcccaggctctagaagacctggctggctttaaagagctcttccagacacgaggtcacactgaggaatcaatgactaacgataaaactgccaaagtagcctgcaaatcttcacaaccagaccyagacaaaaacccagcaagctccaagcgacggctcaagacatccctggggaaagtgggcgtgaaagaagagctcctagcagttggcaagctcacacagacatcaggagagactacacacacacacacagagccaacaggagatggtaagagcatgaaagcatttatggagtctccaaagcagatcttagactcagcagcaagtctaactggcagcaagaggcagctgagaactcctaagggaaagtctgaagtccctgaagacctggccggcttcatcgagctcttccagacaccaagtcacactaaggaatcaatgactaaygaaaaaactaccaaagtatcctacagagcttcacagccagacctagtggacaccccaacaagctccaagccacagcccaagagaagtctcaggaaagcagacactgaagaagaatttttagcatttaggaaacaaacgccatcagcaggcaaagccatgcacacacccaaaccagcagtaggtgaagagaaagacatcaacacgtttttgggaactccagtgcagaaastggaccagccaggaaatttacctggcagcaatagacggctacaaactcgtaaggaaaaggcccaggctctagaagaactgactggcttcagagagcttttccagacaccatgcactgataaccccacrrctgatgagaaaactaccaaaaaaatactctgcaaatctccgcwatcagacccagcggacaccccaacaaacacaaagcaacrgcycaagagaagcctcaagaaagcagacgtagaggaagaatttttagcattcaggaaactaacaccatcagcaggcaaagccatgcacacgcctaaagcagcagtaggtgaagagaaagacatcaacacatttgtggggactccagtggagaaactggacctgctaggaaatttacctggcagcaagagacggccacaaactcctaaagaaaaggccaaggctmtagaagatctggctggcttcaaagarctcttccagacaccaggtcacactgasgaatcaatgaccgatgacaaaatcacagaagtatcctgcaaatctccacaaccagacccagtcaaaaccccaacaagctccaagcaacgactcaagatatccttggggaaagtaggtgtgaaagaagaggtcctaccagtcggcaagctcacacagacgtcagggaagaccacacagacacacagagagacagcaggagatggaaagagcatcaaagcgtttaaggaatctgcaaagcagatgctggacccagcaaactatggaactgggatggagaggtggccragaacacctaaggaagaggcccartcactagaagacctggccggcttcaaagagctcttccagacaccagaccacactgaggaatcaacaactgatgacaaaactaccaaaayagcctgcaaatctccaccaccagaatcaatggacactccaacaagcacaaggaggcggcccaaaacacctttggggaaaagggatatagtggaagagctctcagccctgaagcagctcacacagaccacacacacagacaaagtaccaggagatgaggataaaggcatcaacgtgttcagggaaactgcaaaacagaaactggacccagcagcaagtgtaactggtagcaagaggcagccaagaactcctaagggaaaagcccaacccctagaagacttggctggcttgaaagagctcttccagacascartatgcactgacaagcccacgactcaygagaaaactaccaaaatagcctgcagatctccacaaccagacccagtgggtaccccaacaatcttcaagccacagtccaagagaagtctcaggaaagcagacgtagaggaagaatccttagcactcaggaaacgaacaccatcagtagggaaagctatggacacacccaaaccagcaggaggtgatgagaaagacatgaaagcatttatgggaactccagtgcagaaattggacctgccaggaaatttacctggcagcaaaagatggccacaaactcctaaggaaaaggcccaggctctagaagacctggctggcttcaaagagctcttccagacaccaggcactgacaagcccacgactgatgagaaaamtaccaaaatagcctgcaaatctccacaaccagacccagtggacaccccagcaagcacaaagcaacggcccaagagaarcctcaggaaagcagacgtagaggaagaatttttagcactcaggaaacgaacaccatcagcaggcaaagccatggacasmccaaaaccagcagtaagtgatgagaaaaatatcaacacatttgtggaaactccagtgcagaaactggacctgctaggaaatttacctggcagcaagagacagccacagactcctaaggaaaaggctgaggctctagaggacctggttggcttcaaagaactcttccagacaccaggtcacactgaggaatcaatgactgatgacaaaatcacagaagtatcctgtaaatctccacagccagagtcattcaaaacctcaagaagctccaagcaaaggctcaagatacccctggtgaaagtggacatgaaagaagagcccctagcagtcagcaagctcacacggacatcaggggagactacgcaaacacacacagagccaacaggagatagtaagagcatcaaagcrtttaaggagtctccaaagcagatcctggacccagcagcaagtgtaactggtagcaggaggcagctgagaactcgtaaggaaaaggcccgtgctctagaagacctggttgacttcaaagagctcttctcagcaccaggtcacactgaagagtcaatgactattgacaaaaacacaaaaattccctgcaaatctcccccaccagaactaacagacactgccacgagcacaaagagatgccccaagacacrtcycaggaaagaagtaaaagaggagctctcagcagttgagaggctcacgcaaacatcagggcaaagcacacacacacacaaagaaccagcaagcggtgatgagggcatcaaagtattgaagcaacrtgcaaagaagaaaccaaacccagtagaagaggaacccagcaggagaaggccaagagcayctaaggaaaaggcycaacccctggaagacctggccggcttcacagagctctctgaaacatcaggtcacactcaggaatcactgactgctggcaaagccactaaaataccctgcgaatctcccccactagaagtggtagacaccacagcaagcmcaaagaggcatctcaggacacgtgtgcagaaggtacaagtaaaagaagagccttcagcagtcaagttcacacaaacatcaggggaaaccacggatgcagacaaagaaccagcaggtgaagrtaaaggcatcaaagcattgaaggaatctgcaaaacagacaccggctccagcagcaagtgtaactggcagcaggagacrgccaagagcacccagggaaartgcycaagycatagaagacctagctggcttcaaagacccagcagcaggtcacactgaagaatcaatgactgatgacaaaaccactaaaataccctgcaaatcatcaccagaactagaagacacygcaacaagctcaaagagacggcccaggacacrtgcccagaaagtagaagtgaaggaggagctgttagcagttggcaagctcacacaaacctcaggggagascacgcacaccgacaaagagccggtaggtgagggcaaaggcacgaaagcatttaagcaacctgcaaagcggaasstggacgcagaagatgtaattggcagcaggagacrgccaagagcacctaaggaaaaggcccaacccctggaagayctggccagcttccaagagctctctcmaacaccaggccacactgaggaactggcaaatggtgctgctgatagctttacaagcgctccaaagcaaacacctgacagtggaaaacctctaaaaatatccagaagagttcttcgggcccctaaagtagaacccgtgggagacgtggtaagcaccagagaccctgtaaaatcacaaagcaaaagcaacacttccctgcccccactgcccttcaagaggggaggtggcaaagatggaagcgtcacgggaaccaagaggctgcgctgcatgccagcaccagaggaaattgtggaggagctgccagccagcaagaagcagagggttgctcccagggcaagaggcaaatcatccgaacccgtggtcatcatgaagagaagtttgaggacttctgcaaaaagaattgaacctgcggaagagctgaacagcaacgacatgaaaaccaacaaagaggaacacaaattacaagactcrgtccctgaaaataagggaatatccctgcgctccagacgccaarataagactgaggcagracagcaaataactgaggtcwttgtattagcagaaagaatagaaataaacagaaatgaaaagaagcccatgaagacctccccagagatggacattcagaatccagatgatggagcccggaaacccatacctagagacaaagtcastgagaacaaaaggtgcttgaggtctgctagacagaatgagagctcccagcctaaggtggcagaggagagcggagggcagaagagtgcgaaggttctcatgcagaatcagaaagggaaaggagaagcaggaaattcagactccatgtgcytgagatcaagaaagacaaaaagccagcctgcagcaagcactttggagagcraatctgtgcagagagtaacgcggagtgtcaagagrtgtgcagaaaatccaaagarggctgaggacaatgtgtgtgtcaagaaaataasaaccagaagtcatagggacagtgaagatatttgacagaaaaatcgaactgggaaaaatataataaagttagttttgtgataagttctagtgcagtttttgtcataaattacaagtgaattctgtaagtaaggctgtcagtctgcttaagggaagaaaactttggatttgctggstctgaatcggcttcataaactccactgggagcactgctgggctcctggactgagaatagttgaacaccgggggctttgtgaaggagtctgggccaaggtttgccctcagctttgcagaatgaagccttgaggtctgtcaccacccacagccaccctacagcagccttaactgtgacacttgccacactgtgtcgtcrtttgtttgcctatgtyctccagggcacggtggcaggaacaactatcctcgtctgtcccaacactgagcaggcactcggtaaacacgaatgaatggatragcgcacggatgaatggagcttacaagatctgtctttccaatggccgggggcatttggtccccaaattaaggctattggacatctgcacaggacagtcctatttttgatgtcctttcctttctgaaaataaagttttgtgctttggagaatgactygtgagcacatctttagggaccaagagtgactttctgtaaggagtgactcgtggcttgccttggtctcttgggaatacttttctaactagggttgctctcacctgagacattctccacccgcggaatctcagggtcccaggctgtgggccatcacgacctcaaactggctcctaatctccagctttcctgtcattgaaagcttcggaagtttactggctctgctcccgcctgttttctttctgactctatctggcagcccgatgccacccagtacaggaagtgacaccagtactctgtaaagcatcatcatccttggagagactgagcactcagcaccttcagccacgatttcaggatcgcttccttgtgagccgctgcctccgaaatctcctttgaagcccagacatctttctccagcttcagacttgtagatataactcgttcatcttcatttactttccactttgccccctgtcctctctgtgttccccaaatcagagaatagcccgccatcccccagrtcacctgtctggattcctccccattcacccaccttgccaggtgcaggtgaggatggtgcaccagacagggtagctgtcccccaaaatgtgccctgtgcgggcagtgcccygtctccacgtttgtttccccagtgtctggcggggagccaggtgacatcataaatacttgctgaatgaatgcagaaatcagcggtactgacttgtactatattggctgccatgatagggttctcacagcgtcatccatgatcgtaagggagaatgacattctgcttgagggagggaatagaaaggggcagggaggggacatctgagggcttcacagggctgcaaagggtacagggattgcaccagggcagaacaggggagggtgttcaaggaagagtggctcttagcagaggcactttggaaggtgtgaggcataaatgcttccttctacgtaggccaacctcaaaactttcagtaggaatgttgctatgatcaagttgttctaacactttagacttagtagtaattatgaacctcacatagaaaaatttcatccagccatatgcctgtggagtggaatattctgtttagtagaaaaatcctttagagttcagctctaaccagaaatcttgctgaagtatgtcagcaccttttctcaccctggtaagtacagtatttcaagagcacgctaagggtggttttcattttacagggctgttgatgatgggttaaaaatgttcatttaagggctacccccgtgtttaatagatgaacaccacttctacacaaccctccttggtactgggggagggagagatctgacaaatactgcccattcccctaggctgactggatttgagaacaaatacccacccatttccaccatggtatggtaacttctstgagcttcagtttccaagtgaatttccatgtaataggacattcccattaaatacaagctgtttttactttttcgcctcccagggcctgtgsgatctggtcccccagcctctcttgggctttcttacactaactctgtacctaccatctcctgcctcccttaggcaggcacctccaaccaccacacactccctgctgttttccctgcctggaactttcccwccwgccccaccaagatcatttcatccagtcctgagctcagcttaagggaggcttcttgcctgtgggttccctcacccccatgcctgtcctccaggctggggcaggttcttagtttgcctggaattgttctgtacctctttgtagcacgtagtgttgtgaaactaagccactaattgagtttctggctcccctcctggggttgtaagttttgttcattcatgagggccgactgtytttcctggttactgsatcccagtgaccagccacaggagatgtccaataaagtatgtgatgaaatggtcttaaaaaaaaaaaaaaaaaaaaaa

SEQ ID NO: 406 - DNA, 8299 bp, Homo sapiens
ttcactgctctgactgcgtcctccccaggctgaagtgtcctcaggtttcatgtggatttgcccagtaatggatggctccaccgaggccaggttggggaagttcagcctcgaggacactaggggacgaaaaacttcaaaaagaagactctttttattaatattttggcgttctttttggagaggaacttttgggatgtagcctttacctgtttcctgaatttgacatccaaaaagccttttggaaaacaccattctaaatttatcctgttctgaatcatcatcgcttctgatagatgcagttgcttgctgacatcgtgatctttgattttgtacaacgctatttgggctaacttttgggattttactttgtgcttagaatttgaaagtagtattcattggaaagagactccaagaaaatactcgaagacatcaaaagctggattcgagggtataacgtgttttgttttgttttttaaattagaaaaataaggaattgcagtgtgattttctttccccctttaacttagaggaacgaggattatacagaaatttgaaatttcaacaagaaaaacttaagcttccttggattcccacgtcaaaggaaagtttcaagctttcagaaggagttctcactcgaagataaagaacagctcgctaaccacgaaagaggaatcgatgctcagcttttagttgcacttcctaaagttgcagaattaagacaaatctttgaaccaaagaagaaagaattcttagaaatgaaaagaaaagaaagaattgccaggcgcctggaaggrattgaaaatgacactcagcccatcctcttgcagagctgcacaggattggtgactcaccgcctgctggaggaagacacccctcgatacatgagagccagcgaccctgccagcccccacatcggccgatcaaatgaagaggaggaaacttcygattcttctctagaaaagcaaactcgatccaaatactgcacagaaacctccggtgtccacggtgactcaccctatggttcgggtaccatggacacccacagtctggagtccaaagccgaaagaatygcaaggtacaaagcagaaagaaggcgacagctggcagagaagtatgggctgactctggatcccgaggccgactccgagtatttatcccgctataccaagtccaggaaggagcctgatgctgtcgagaagcggggaggaaaaagtgacaaacaggaagagtcaagcagagatgckagttctctgtaccccgggaccgagacgatggggctcaggacctgtgccggtgaatccaaggactatgccctccatgtgggtgacggctcttccgacccggaggtgctgctgaacatagaaaaccaaagacgaggtcaagagctgagtgccaccyggcaggcccatgacctgtccccagcagccgagagttcctcgaccttctctttctctgggcgagactcctccttcactgaagtgccacggtcccccaagcacgcccacagctcctccctgcagcaggcagcctcccggagcccctcctttggtgacccacagctatcccctgaggcccgacccagtacagggaaacccaaacatgagtggtttctccagaaagattccgaaggggacacaccttcacttatcaactggccttccagagttaaagttagagaaaaattggtgaaagaggaaagtgctcgaaacagccctgaactcgcctcagagtccgtaactcagaggagacaccagccagcgccagtccattacgtgtcatttcagtctgagcactcagcctttgatagggtccccagcaaggcagcaggctctacacgacagccaatccgtggctatgtccaacccgcagataccggtcacaccgccaagctrgtgacgccagaaaccccagaaaatgcatctgagtgtagctgggtagcatcagccacccagaatgtccccaaacctcccagcttgacggttctagaaggtgacggaagggatagcccagttctccatrtctgcgagtcaaaagcagaagaagaagaaggggaaggagaaggagaagaaaaagaagaagatgtgtgcttcactgaagctctcgagcaaagcaagaaaaccctactggctttggagggtgatgggctagtgagaagcccagaagatccctctagaaatgaggactttggtaagcctgctgtgagcacagkcaccttagagcatcagaaggaactggaaaacgtggcacaaccccctcaagctccgcaccagcccactgagaggacaggcaggagcgagatggttctctacattcaaagtgagcctgtgtcccaagacgccaaaccaactggtcacaacagggaagcctcgaaaaagcgcaaggtccgtacccgctctctgtcagatttcacaggcccccctcagctccaggccttgaagtataaggacccagcttccaggagagagctggagctgcccagctccaagaccgaagggccttatggggagatcagcatgctggacacaaargtctctgtcgcccagctccgaagtgcgttcctggcatctgccaacgcctgcaggagacctgaactcaaatcacgggtrgagaggtcggctgaaggacctggcttgcccaccggtgtggaacgggagagagggtcccggaaaccaagacgctatttttctcctggtgaaagtagaaaaacttccgagagatttagaacccaacctataacttcagcagaacgaaaggaatcggataggtgcacttcacattcagaaacgccaactgtcgatgatgaagaaaaggtggatgaacgagccaagctgagcgtcgccgccaagaggttgcttttcagggagatggaaaaatcttttgatgaacaaaatgttccaaagcgacgctcaagaaacacagctgtggagcagaggctacgccgtctgcaggacaggtccctcacccagcccatcaccactgaagaggtggtcatcgcagccactgaacctatccccgcttcgtgttctgggggcacccaccctgtaatggcgagacttcctagccccactgtagctaggagcgctgtgcagcctgccagattgcaggcctctgctcaccaaaaggccttagccaaggaccagacaaatgagggcaaagagcttgctgagcaaggagaacctgattcctccactctaagcttggccgaaaagttggccttgtttaacaaattgtcccagccagtctcaaaagcgatttctacccggaacagaatagacaygagacagaggagaatgaacgctcgctatcaaactcagccagtcacactgggagaggtggagcaggtgcagagtggaaagctcattcctttctcacctgccgtgaacacatcagtgtctaccgtagcatccacggttgctccaatgtatgccggagatcttcgcacaaagccacctcttgaccacaatgcaagtgccactgactataagttttcttcttcaatagaaaattcggactctccagttagaagcattctgaaatcgcaagcttggcagcctttgrtagagggtagcgagaacaagggaatgttgagagaatatggagagacagaaagcaagagagctttgacaggtcgagacagtgggatggagaagtatgggtcctttgaggaagcagaagcatcctaccccatcctgaacmgagccagggaaggagacagccataaggaatctaaatatgctgttcccagaagaggaagcctggaacgggcgaaccctcccatcacccacctcggggatgaaccgaaggaattttccatggctaaaatgaatgcacaaggaaacttggacttgagggacaggctgccctttgaagagaaggtggaggtggagaatgttatgaaaaggaagttttcactaagagcggcagagttcggggagcccacttccgagcagacggggacagctgctgggaaaactattgctcaaaccacagcccccgtgtcctggaagccccaggattcttcggaacagccacaggagaagctctgcaagaatccatgtgcgatgtttgctgctggagagatcaaaacgccgacaggggagggccttcttgactcacccagcaaaaccatgtctattaaagaaagattggcaytgttgaagaaaagcggggaggaagattggagaaacagactcagcaggaggcaggagggcggcaaggcgccggccagcagcctgcacacccaggaagcagggcrrtccctcatcaagaagcgggtcacagaaagtcgagagagccaaatgacgattgaggagaggaagcagctcatcactgtgagagaggaggcctggaagacgagaggcagaggagcggccaacgactcgacccagttcactgtggctggcaggatggtgaagaaaggtttggcgtcacctactgccataaccccagtagcctcasccatttgcggtaaaacaagaggcaccacacccgtttccaaacccctggaagatatcgaagccagaccagatatgcagttagaatcggacctgaagytggacaggctggaaacctttctaagaaggctgaataacaaagttggcgggatgcacgaaacggtgctcactgtcaccggcaaatctgtgaaggaggtgatgaagccagatgatgatgaaacctttgccaaattttaccgcagcgtggattataatatgccaagaagtcctgtggagatggatgaggacttcgatgtcattttcgatccttatgcacccaaattgacgtcttcygtggccgagcacaagcgggcagttaggcccaagcgccgggttcaggcctccaaaaaccccctgaaaatgctggcggcaagagaagatctccttcaggaatacactgagcagagattaaacgttgccttcatggagtcaaagcggatgaaagtagaaaagatgtcttccaactccaacttctcagaagtcaccctggcgggtttagccagtaaagaaaacttcagcaacgtcagcctgcggagcgtcaacctgacggaacagaactctaacaacagcgccgtgccctayaagaggctgatgctgttgcagattaaaggaagaagacatgtgcagaccaggctggtggaacctcgagcttcggcgctcaacagtggggactgcttcctcctgctctctccccactgctgcttcctgtgggtaggagagtttgcaaacgtcatagaaaaggcgaaggcctcagaacttgcaactttaattcagacaaagagggaacttggttgtagagctacttatatccaaaccattgaagaaggaattaatacacacactcatgcagccaaagacttctggaagcttctgggtggccaaaccagttaccaatctgctggagacccaaaagaagatgaackctatgaagcagccataatagaaactaactgcatttaccgtctcatggatgacaaacttgttcctgatgacgactactgggggaaaattccgaagtgctcccttctgcaacccaaagaggtactggtgtttgattttggtagtgaagtttacgtatggcatgggaaagaagtcacattagcacaacgaaaaatagmatttcagctggcaaagcacttatggaatggaacctttgactatgagaactgtgacatcaatcccctggatcctggagaatgcaatccgcttatccccagaaaaggacaggggcggcccgactgggcgatatttgggagacttactgaacacaatgagacgattttgttcaaagagaagtttctggattggacrgaactgaagagatcgaatgagaagaaccccggggaacttgcccagcacaaggaagaccccaggactgatgtcaaggcatacgatgtgacacggatggtgtccatgccccagacgacagcaggcaccatcctggacggagtgaacgtyggccgtggctatggcctggtggaaggacacgacaggaggcagtttgagatcaccagcrtttccgtggatgtctggcacatcctggaattcgactatagcaggctccccaaacaaagcatcgggcagttccatgagggggatgcctatgtggtcaagtggaagttcatggtgagcacggcagtgggaagtcgccagaagggagagcactcggtgagggcagccggcaaagagaagtgcgtctacttcttctggcaaggccggcactccaccgtgagtgagaagggcacgtcggcgctgatgacggtggagctggacgaggaaaggggggcccaggtccaggttctccagggaaaggagcccccctgtttcctgcagtgtttccagggggggatggtggtgcactcggggaggcgggaagaggaagaagaaaatgtgcaaagtgagtggcggctgtactgcgtgcgtggagaggtgcccgtggaagggaatttgctggaagtggcctgtcactgtagcagcctgaggtccagaacttccatggtggtgcttaacgtcaacaaggccctcatctacctgtggcacggatgcaaagcccaggcccacacgaaggaggtcggaaggaccgcygcgaacaagatcaaggaacaatgtcccctggaagcaggactgcatagtagcagcaaagtcacaatacacgagtgtgatgaaggctccgagccactcggattctgggatgccttaggaaggagagacaggaaagcctacgattgcatgcttcaagatcctggaagttttaacttcgcgccccgcctgttcrtcctcagcagctcctctggggattttgcagccacrgagtttgtgtaccctgcccgagccccctctgtggtcagttccatgcccttcctgcaggaagatctgtwcagcgcgccccagccagcacttttccttgttgacaatcaccacgaggtgtacctctggcaaggctggtggcccatcgagaacaagatcactggttccgcccgcatccgctgggcctccgaccggaagagtgcgatggagactgtgctccagtactgcaaaggaaaaaatctcaagaaaccagcccccaagtcttaccttatccacgctggtctggagcccctgacattcaccaatatgtttcccagctgggagcacagagaggacatcgctgagatcacagagatggacacggaagtttccaatcagatcaccctcgtggaagacgtcttagccaagctctgtaaaaccatttacccgctggccgacctcctggccaggccactcccrgagggggtcgatcctctgaagcttgagatctatctcaccgacgaagacttcgagtttgcactagacatgacgagggatgaatacaacgccctgccygcctggaagcaggtgaacctgaagaaagcaaaaggcctgttctgagtggggagacgccagaggagcctcacggtcacgtccaacaacaccactgcaccagggaaatggatatatatttttggactggtgtttttcacaaagtatttttcaatcagagttttcagaacctgacattgttaaagatactgcttgtcccggagttgtgtattttgtaaatgttcaagggaactgtttggaaacttctttccaccattcaggaggttatcagaattaataaaagtatctgttatgtgcacttaagccgcagctgctatagatagcactgccttcttgttccagctaggcaatgccttttttttttttttttgaagcagttctctttataaagtgttattttgatagtttgtggattctaaaatatatatatatttatataaacaccatataagtcaaatatgtatttaacaaagcaatatgtattcattcactttcaagatttgttttggtgtcaaaataacatgaaaaggtagatggagttgcttctgttgaattagctctgccaccaatatgtatcttcatayacgtttggaaatgtttcctgcagcattaggtatgacttgttctgagtactgcttccggtgctaaaatgaacaaagaatttgtacttaatggcatggactctggagaatctatgcgaatcaacctttctaccttaatatctccccaaaaatgtatagtgccttgtttttatgtacagtttatatacagaaaagtttgctctgcatttttgatgatggtttggaacattatctacaattttactctcaaatagtcaaaataaaaacatctcaatttctaataccggttgtaaacagtacacatgtcattttgtgatataggactcccaaataaaagtatcagaataaacacaacaattaactggt

SEQ ID NO: 407 - DNA, 6716 bp, Homo sapiens
tcggcrggaagcggcgatcctgccaccgggaggtgtggaagagccgggtagattctggctacattggagattggttgctttctaaaactgaaggagaagcccatgaagagatggtggattctcactgagttttgactagcggaagaaaagagagagttcaagtggatggccttgaggacttgaaaagctgagatatgatgattttgaagtcatttcacatcgaagccatgatttaaatatcggcgttaagatttcaacaagaaaaacttaagcttccttggattcccacgtcaaaggaaagtttcaagctttcagaaggagttctcactcgaagataaagaacagctcgctaaccacgaaagaggaatcgatgctcagcttttagttgcacttcctaaagttgcagaattaagacaaatctttgaaccaaagaagaaagaattcttagaaatgaaaagaaaagaaagaattgccaggcgcctggaaggrattgaaaatgacactcagcccatcctcttgcagagctgcacaggattggtgactcaccgcctgctggaggaagacacccctcgatacatgagagccagcgaccctgccagcccccacatcggccgatcaaatgaagaggaggaaacttcygattcttctctagaaaagcaaactcgatccaaatactgcacagaaacctccggtgtccacggtgactcaccctatggttcgggtaccatggacacccacagtctggagtccaaagccgaaagaatygcaaggtacaaagcagaaagaaggcgacagctggcagagaagtatgggctgactctggatcccgaggccgactccgagtatttatcccgctataccaagtccaggaaggagcctgatgctgtcgagaagcggggaggaaaaagtgacaaacaggaagagtcaagcagagatgckagttctctgtaccccgggaccgagacgatggggctcaggacctgtgccggtgaatccaaggactatgccctccatgtgggtgacggctcttccgacccggaggtgctgctgaacatagaaaaccaaagacgaggtcaagagctgagtgccaccyggcaggcccatgacctgtccccagcagccgagagttcctcgaccttctctttctctgggcgagactcctccttcactgaagtgccacggtcccccaagcacgcccacagctcctccctgcagcaggcagcctcccggagcccctcctttggtgacccacagctatcccctgaggcccgacccaggtgcacttcacattcagaaacgccaactgtcgatgatgaagaaaaggtggatgaacgagccaagctgagcgtcgccgccaagaggttgcttttcagggagatggaaaaatcttttgatgaacaaaatgttccaaagcgacgctcaagaaacacagctgtggagcagaggctacgccgtctgcaggacaggtccctcacccagcccatcaccactgaagaggtggtcatcgcagccacattgcaggcctctgctcaccaaaaggccttagccaaggaccagacaaatgagggcaaagagcttgctgagcaaggagaacctgattcctccactctaagcttggccgaaaagttggccttgtttaacaaattgtcccagccagtctcaaaagcgatttctacccggaacagaatagacaygagacagaggagaatgaacgctcgctatcaaactcagccagtcacactgggagaggtggagcaggtgcagagtggaaagctcattcctttctcacctgccgtgaacacatcagtgtctaccgtagcatccacggttgctccaatgtatgccggagatcttcgcacaaagccacctcttgaccacaatgcaagtgccactgactataagttttcttcttcaatagaaaattcggactctccagttagaagcattctgaaatcgcaagcttggcagcctttgrtagagggtagcgagaacaagggaatgttgagagaatatggagagacagaaagcaagagagctttgacaggtcgagacagtgggatggagaagtatgggtcctttgaggaagcagaagcatcctaccccatcctgaacmgagccagggaaggagacagccataaggaatctaaatatgctgttcccagaagaggaagcctggaacgggcgaaccctcccatcacccacctcggggatgaaccgaaggaattttccatggctaaaatgaatgcacaaggaaacttggacttgagggacaggctgccctttgaagagaaggtggaggtggagaatgttatgaaaaggaagttttcactaagagcggcagagttcggggagcccacttccgagcagacggggacagctgctgggaaaactattgctcaaaccacagcccccgtgtcctggaagccccaggattcttcggaacagccacaggagaagctctgcaagaatccatgtgcgatgtttgctgctggagagatcaaaacgccgacaggggagggccttcttgactcacccagcaaaaccatgtctattaaagaaagattggcaytgttgaagaaaagcggggaggaagattggagaaacagactcagcaggaggcaggagggcggcaaggcgccggccagcagcctgcacacccaggaagcagggcrrtccctcatcaagaagcgggtcacagaaagtcgagagagccaaatgacgattgaggagaggaagcagctcatcactgtgagagaggaggcctggaagacgagaggcagaggagcggccaacgactcgacccagttcactgtggctggcaggatggtgaagaaaggtttggcgtcacctactgccataaccccagtagcctcasccatttgcggtaaaacaagaggcaccacacccgtttccaaacccctggaagatatcgaagccagaccagatatgcagttagaatcggacctgaagytggacaggctggaaacctttctaagaaggctgaataacaaagttggcgggatgcacgaaacggtgctcactgtcaccggcaaatctgtgaaggaggtgatgaagccagatgatgatgaaacctttgccaaattttaccgcagcgtggattataatatgccaagaagtcctgtggagatggatgaggacttcgatgtcattttcgatccttatgcacccaaattgacgtcttcygtggccgagcacaagcgggcagttaggcccaagcgccgggttcaggcctccaaaaaccccctgaaaatgctggcggcaagagaagatctccttcaggaatacactgagcagagattaaacgttgccttcatggagtcaaagcggatgaaagtagaaaagatgtcttccaactccaacttctcagaagtcaccctggcgggtttagccagtaaagaaaacttcagcaacgtcagcctgcggagcgtcaacctgacggaacagaactctaacaacagcgccgtgccctayaagaggctgatgctgttgcagattaaaggaagaagacatgtgcagaccaggctggtggaacctcgagcttcggcgctcaacagtggggactgcttcctcctgctctctccccactgctgcttcctgtgggtaggagagtttgcaaacgtcatagaaaaggcgaaggcctcagaacttgcaactttaattcagacaaagagggaacttggttgtagagctacttatatccaaaccattgaagaaggaattaatacacacactcatgcagccaaagacttctggaagcttctgggtggccaaaccagttaccaatctgctggagacccaaaagaagatgaackctatgaagcagccataatagaaactaactgcatttaccgtctcatggatgacaaacttgttcctgatgacgactactgggggaaaattccgaagtgctcccttctgcaacccaaagaggtactggtgtttgattttggtagtgaagtttacgtatggcatgggaaagaagtcacattagcacaacgaaaaatagmatttcagctggcaaagcacttatggaatggaacctttgactatgagaactgtgacatcaatcccctggatcctggagaatgcaatccgcttatccccagaaaaggacaggggcggcccgactgggcgatatttgggagacttactgaacacaatgagacgattttgttcaaagagaagtttctggattggacrgaactgaagagatcgaatgagaagaaccccggggaacttgcccagcacaaggaagaccccaggactgatgtcaaggcatacgatgtgacacggatggtgtccatgccccagacgacagcaggcaccatcctggacggagtgaacgtyggccgtggctatggcctggtggaaggacacgacaggaggcagtttgagatcaccagcrtttccgtggatgtctggcacatcctggaattcgactatagcaggctccccaaacaaagcatcgggcagttccatgagggggatgcctatgtggtcaagtggaagttcatggtgagcacggcagtgggaagtcgccagaagggagagcactcggtgagggcagccggcaaagagaagtgcgtctacttcttctggcaaggccggcactccaccgtgagtgagaagggcacgtcggcgctgatgacggtggagctggacgaggaaaggggggcccaggtccaggttctccagggaaaggagcccccctgtttcctgcagtgtttccagggggggatggtggtgcactcggggaggcgggaagaggaagaagaaaatgtgcaaagtgagtggcggctgtactgcgtgcgtggagaggtgcccgtggaagggaatttgctggaagtggcctgtcactgtagcagcctgaggtccagaacttccatggtggtgcttaacgtcaacaaggccctcatctacctgtggcacggatgcaaagcccaggcccacacgaaggaggtcggaaggaccgcygcgaacaagatcaaggaacaatgtcccctggaagcaggactgcatagtagcagcaaagtcacaatacacgagtgtgatgaaggctccgagccactcggattctgggatgccttaggaaggagagacaggaaagcctacgattgcatgcttcaagatcctggaagttttaacttcgcgccccgcctgttcrtcctcagcagctcctctggggattttgcagccacrgagtttgtgtaccctgcccgagccccctctgtggtcagttccatgcccttcctgcaggaagatctgtwcagcgcgccccagccagcacttttccttgttgacaatcaccacgaggtgtacctctggcaaggctggtggcccatcgagaacaagatcactggttccgcccgcatccgctgggcctccgaccggaagagtgcgatggagactgtgctccagtactgcaaaggaaaaaatctcaagaaaccagcccccaagtcttaccttatccacgctggtctggagcccctgacattcaccaatatgtttcccagctgggagcacagagaggacatcgctgagatcacagagatggacacggaagtttccaatcagatcaccctcgtggaagacgtcttagccaagctctgtaaaaccatttacccgctggccgacctcctggccaggccactcccrgagggggtcgatcctctgaagcttgagatctatctcaccgacgaagacttcgagtttgcactagacatgacgagggatgaatacaacgccctgccygcctggaagcaggtgaacctgaagaaagcaaaaggcctgttctgagtggggagacgccagaggagcctcacggtcacgtccaacaacaccactgcaccagggaaatggatatatatttttggactggtgtttttcacaaagtatttttcaatcagagttttcagaacctgacattgttaaagatactgcttgtcccggagttgtgtattttgtaaatgttcaagggaactgtttggaaacttctttccaccattcaggaggttatcagaattaataaaagtatctgttatgtgcacttaagccgcagctgctatagatagcactgccttcttgttccagctaggcaatgccttttttttttttttttgaagcagttctctttataaagtgttattttgatagtttgtggattctaaaatatatatatatttatataaacaccatataagtcaaatatgtatttaacaaagcaatatgtattcattcactttcaagatttgttttggtgtcaaaataacatgaaaaggtagatggagttgcttctgttgaattagctctgccaccaatatgtatcttcatayacgtttggaaatgtttcctgcagcattaggtatgacttgttctgagtactgcttccggtgctaaaatgaacaaagaatttgtacttaatggcatggactctggagaatctatgcgaatcaacctttctaccttaatatctccccaaaaatgtatagtgccttgtttttatgtacagtttatatacagaaaagtttgctctgcatttttgatgatggtttggaacattatctacaattttactctcaaatagtcaaaataaaaacatctcaatttctaataccggttgtaaacagtacacatgtcattttgtgatataggactcccaaataaaagtatcagaataaacacaacaattaactggt

SEQ ID NO: 408 - DNA, 7994 bp, Homo sapiens
tcggcrggaagcggcgatcctgccaccgggaggtgtggaagagccgggtagattctggctacattggagattggttgctttctaaaactgaaggagaagcccatgaagagatggtggattctcactgagttttgactagcggaagaaaagagagagttcaagtggatggccttgaggacttgaaaagctgagatatgatgattttgaagtcatttcacatcgaagccatgatttaaatatcggcgttaagatttcaacaagaaaaacttaagcttccttggattcccacgtcaaaggaaagtttcaagctttcagaaggagttctcactcgaagataaagaacagctcgctaaccacgaaagaggaatcgatgctcagcttttagttgcacttcctaaagttgcagaattaagacaaatctttgaaccaaagaagaaagaattcttagaaatgaaaagaaaagaaagaattgccaggcgcctggaaggrattgaaaatgacactcagcccatcctcttgcagagctgcacaggattggtgactcaccgcctgctggaggaagacacccctcgatacatgagagccagcgaccctgccagcccccacatcggccgatcaaatgaagaggaggaaacttcygattcttctctagaaaagcaaactcgatccaaatactgcacagaaacctccggtgtccacggtgactcaccctatggttcgggtaccatggacacccacagtctggagtccaaagccgaaagaatygcaaggtacaaagcagaaagaaggcgacagctggcagagaagtatgggctgactctggatcccgaggccgactccgagtatttatcccgctataccaagtccaggaaggagcctgatgctgtcgagaagcggggaggaaaaagtgacaaacaggaagagtcaagcagagatgckagttctctgtaccccgggaccgagacgatggggctcaggacctgtgccggtgaatccaaggactatgccctccatgtgggtgacggctcttccgacccggaggtgctgctgaacatagaaaaccaaagacgaggtcaagagctgagtgccaccyggcaggcccatgacctgtccccagcagccgagagttcctcgaccttctctttctctgggcgagactcctccttcactgaagtgccacggtcccccaagcacgcccacagctcctccctgcagcaggcagcctcccggagcccctcctttggtgacccacagctatcccctgaggcccgacccagtacagggaaacccaaacatgagtggtttctccagaaagattccgaaggggacacaccttcacttatcaactggccttccagagttaaagttagagaaaaattggtgaaagaggaaagtgctcgaaacagccctgaactcgcctcagagtccgtaactcagaggagacaccagccagcgccagtccattacgtgtcatttcagtctgagcactcagcctttgatagggtccccagcaaggcagcaggctctacacgacagccaatccgtggctatgtccaacccgcagataccggtcacaccgccaagctrgtgacgccagaaaccccagaaaatgcatctgagtgtagctgggtagcatcagccacccagaatgtccccaaacctcccagcttgacggttctagaaggtgacggaagggatagcccagttctccatrtctgcgagtcaaaagcagaagaagaagaaggggaaggagaaggagaagaaaaagaagaagatgtgtgcttcactgaagctctcgagcaaagcaagaaaaccctactggctttggagggtgatgggctagtgagaagcccagaagatccctctagaaatgaggactttggtaagcctgctgtgagcacagkcaccttagagcatcagaaggaactggaaaacgtggcacaaccccctcaagctccgcaccagcccactgagaggacaggcaggagcgagatggttctctacattcaaagtgagcctgtgtcccaagacgccaaaccaactggtcacaacagggaagcctcgaaaaagcgcaaggtccgtacccgctctctgtcagatttcacaggcccccctcagctccaggccttgaagtataaggacccagcttccaggagagagctggagctgcccagctccaagaccgaagggccttatggggagatcagcatgctggacacaaargtctctgtcgcccagctccgaagtgcgttcctggcatctgccaacgcctgcaggagacctgaactcaaatcacgggtrgagaggtcggctgaaggacctggcttgcccaccggtgtggaacgggagagagggtcccggaaaccaagacgctatttttctcctggtgaaagtagaaaaacttccgagagatttagaacccaacctataacttcagcagaacgaaaggaatcggataggtgcacttcacattcagaaacgccaactgtcgatgatgaagaaaaggtggatgaacgagccaagctgagcgtcgccgccaagaggttgcttttcagggagatggaaaaatcttttgatgaacaaaatgttccaaagcgacgctcaagaaacacagctgtggagcagaggctacgccgtctgcaggacaggtccctcacccagcccatcaccactgaagaggtggtcatcgcagccactgaacctatccccgcttcgtgttctgggggcacccaccctgtaatggcgagacttcctagccccactgtagctaggagcgctgtgcagcctgccagattgcaggcctctgctcaccaaaaggccttagccaaggaccagacaaatgagggcaaagagcttgctgagcaaggagaacctgattcctccactctaagcttggccgaaaagttggccttgtttaacaaattgtcccagccagtctcaaaagcgatttctacccggaacagaatagacaygagacagaggagaatgaacgctcgctatcaaactcagccagtcacactgggagaggtggagcaggtgcagagtggaaagctcattcctttctcacctgccgtgaacacatcagtgtctaccgtagcatccacggttgctccaatgtatgccggagatcttcgcacaaagccacctcttgaccacaatgcaagtgccactgactataagttttcttcttcaatagaaaattcggactctccagttagaagcattctgaaatcgcaagcttggcagcctttgrtagagggtagcgagaacaagggaatgttgagagaatatggagagacagaaagcaagagagctttgacaggtcgagacagtgggatggagaagtatgggtcctttgaggaagcagaagcatcctaccccatcctgaacmgagccagggaaggagacagccataaggaatctaaatatgctgttcccagaagaggaagcctggaacgggcgaaccctcccatcacccacctcggggatgaaccgaaggaattttccatggctaaaatgaatgcacaaggaaacttggacttgagggacaggctgccctttgaagagaaggtggaggtggagaatgttatgaaaaggaagttttcactaagagcggcagagttcggggagcccacttccgagcagacggggacagctgctgggaaaactattgctcaaaccacagcccccgtgtcctggaagccccaggattcttcggaacagccacaggagaagctctgcaagaatccatgtgcgatgtttgctgctggagagatcaaaacgccgacaggggagggccttcttgactcacccagcaaaaccatgtctattaaagaaagattggcaytgttgaagaaaagcggggaggaagattggagaaacagactcagcaggaggcaggagggcggcaaggcgccggccagcagcctgcacacccaggaagcagggcrrtccctcatcaagaagcgggtcacagaaagtcgagagagccaaatgacgattgaggagaggaagcagctcatcactgtgagagaggaggcctggaagacgagaggcagaggagcggccaacgactcgacccagttcactgtggctggcaggatggtgaagaaaggtttggcgtcacctactgccataaccccagtagcctcasccatttgcggtaaaacaagaggcaccacacccgtttccaaacccctggaagatatcgaagccagaccagatatgcagttagaatcggacctgaagytggacaggctggaaacctttctaagaaggctgaataacaaagttggcgggatgcacgaaacggtgctcactgtcaccggcaaatctgtgaaggaggtgatgaagccagatgatgatgaaacctttgccaaattttaccgcagcgtggattataatatgccaagaagtcctgtggagatggatgaggacttcgatgtcattttcgatccttatgcacccaaattgacgtcttcygtggccgagcacaagcgggcagttaggcccaagcgccgggttcaggcctccaaaaaccccctgaaaatgctggcggcaagagaagatctccttcaggaatacactgagcagagattaaacgttgccttcatggagtcaaagcggatgaaagtagaaaagatgtcttccaactccaacttctcagaagtcaccctggcgggtttagccagtaaagaaaacttcagcaacgtcagcctgcggagcgtcaacctgacggaacagaactctaacaacagcgccgtgccctayaagaggctgatgctgttgcagattaaaggaagaagacatgtgcagaccaggctggtggaacctcgagcttcggcgctcaacagtggggactgcttcctcctgctctctccccactgctgcttcctgtgggtaggagagtttgcaaacgtcatagaaaaggcgaaggcctcagaacttgcaactttaattcagacaaagagggaacttggttgtagagctacttatatccaaaccattgaagaaggaattaatacacacactcatgcagccaaagacttctggaagcttctgggtggccaaaccagttaccaatctgctggagacccaaaagaagatgaackctatgaagcagccataatagaaactaactgcatttaccgtctcatggatgacaaacttgttcctgatgacgactactgggggaaaattccgaagtgctcccttctgcaacccaaagaggtactggtgtttgattttggtagtgaagtttacgtatggcatgggaaagaagtcacattagcacaacgaaaaatagmatttcagctggcaaagcacttatggaatggaacctttgactatgagaactgtgacatcaatcccctggatcctggagaatgcaatccgcttatccccagaaaaggacaggggcggcccgactgggcgatatttgggagacttactgaacacaatgagacgattttgttcaaagagaagtttctggattggacrgaactgaagagatcgaatgagaagaaccccggggaacttgcccagcacaaggaagaccccaggactgatgtcaaggcatacgatgtgacacggatggtgtccatgccccagacgacagcaggcaccatcctggacggagtgaacgtyggccgtggctatggcctggtggaaggacacgacaggaggcagtttgagatcaccagcrtttccgtggatgtctggcacatcctggaattcgactatagcaggctccccaaacaaagcatcgggcagttccatgagggggatgcctatgtggtcaagtggaagttcatggtgagcacggcagtgggaagtcgccagaagggagagcactcggtgagggcagccggcaaagagaagtgcgtctacttcttctggcaaggccggcactccaccgtgagtgagaagggcacgtcggcgctgatgacggtggagctggacgaggaaaggggggcccaggtccaggttctccagggaaaggagcccccctgtttcctgcagtgtttccagggggggatggtggtgcactcggggaggcgggaagaggaagaagaaaatgtgcaaagtgagtggcggctgtactgcgtgcgtggagaggtgcccgtggaagggaatttgctggaagtggcctgtcactgtagcagcctgaggtccagaacttccatggtggtgcttaacgtcaacaaggccctcatctacctgtggcacggatgcaaagcccaggcccacacgaaggaggtcggaaggaccgcygcgaacaagatcaaggaacaatgtcccctggaagcaggactgcatagtagcagcaaagtcacaatacacgagtgtgatgaaggctccgagccactcggattctgggatgccttaggaaggagagacaggaaagcctacgattgcatgcttcaagatcctggaagttttaacttcgcgccccgcctgttcrtcctcagcagctcctctggggattttgcagccacrgagtttgtgtaccctgcccgagccccctctgtggtcagttccatgcccttcctgcaggaagatctgtwcagcgcgccccagccagcacttttccttgttgacaatcaccacgaggtgtacctctggcaaggctggtggcccatcgagaacaagatcactggttccgcccgcatccgctgggcctccgaccggaagagtgcgatggagactgtgctccagtactgcaaaggaaaaaatctcaagaaaccagcccccaagtcttaccttatccacgctggtctggagcccctgacattcaccaatatgtttcccagctgggagcacagagaggacatcgctgagatcacagagatggacacggaagtttccaatcagatcaccctcgtggaagacgtcttagccaagctctgtaaaaccatttacccgctggccgacctcctggccaggccactcccrgagggggtcgatcctctgaagcttgagatctatctcaccgacgaagacttcgagtttgcactagacatgacgagggatgaatacaacgccctgccygcctggaagcaggtgaacctgaagaaagcaaaaggcctgttctgagtggggagacgccagaggagcctcacggtcacgtccaacaacaccactgcaccagggaaatggatatatatttttggactggtgtttttcacaaagtatttttcaatcagagttttcagaacctgacattgttaaagatactgcttgtcccggagttgtgtattttgtaaatgttcaagggaactgtttggaaacttctttccaccattcaggaggttatcagaattaataaaagtatctgttatgtgcacttaagccgcagctgctatagatagcactgccttcttgttccagctaggcaatgccttttttttttttttttgaagcagttctctttataaagtgttattttgatagtttgtggattctaaaatatatatatatttatataaacaccatataagtcaaatatgtatttaacaaagcaatatgtattcattcactttcaagatttgttttggtgtcaaaataacatgaaaaggtagatggagttgcttctgttgaattagctctgccaccaatatgtatcttcatayacgtttggaaatgtttcctgcagcattaggtatgacttgttctgagtactgcttccggtgctaaaatgaacaaagaatttgtacttaatggcatggactctggagaatctatgcgaatcaacctttctaccttaatatctccccaaaaatgtatagtgccttgtttttatgtacagtttatatacagaaaagtttgctctgcatttttgatgatggtttggaacattatctacaattttactctcaaatagtcaaaataaaaacatctcaatttctaataccggttgtaaacagtacacatgtcattttgtgatataggactcccaaataaaagtatcagaataaacacaacaattaactggt

SEQ ID NO: 409 - DNA, 5083 bp, Homo sapiens
aaggggccttctgaggtttgggggctgtagggccatgggcctcagggccagaggtggttgttagcctggcaagacaggtctgggcaacatgcatgcccagaggcagttcgttgtagctgcagtgagagcagaagtcagacgacatgaggtggccaagcaggctctaaaccgcctcaggaagctggcagagagggtggacgaccccgaactccaggacagcatccaggcctcattggacagcattcgagaggctgtgatcaatagccaggaatggactttgagccgctccattcctgaactgcgcctgggtgtgctgggcgatgccaggagtgggaagtcatcgctcatccaccgattcctgactggctcataccaggtgctggagaagacasagagtgagcagtacaagaaagaaatgttggtggatggacagacacatctggtgctaatccgagaggaagctggggcacctgatgccaagttctcaggctgggcagatgctgtgatcttcgtcttcagcctggaggatgagaacagtttccaggctgtgagccgtctccatgggcagctgagttcccttcgcggggagggacgaggargcctggccttggcactggtggggacacaagacaggatcagtgcttcctcccctcgggtggtgggagatgctcgtgccagagctctgtgcgcggacatgaaacgctgcagctactatgagacttgtgcaacctatgggctcaatgtggatcgggtcttccaggaggtggcccagaaggtggtgaccttgcgcaagcagcaacagcttctggctgcctgcaagtccctkcccagctccccaagccactcagctgcatccactccggtagctggccaggctagtaacgggggccacactagcgactactcttcttccctcccgtcctcaccraatgttggtcaccgggagctccgagccgaggcagctgcagtggctggattgagcaccccagggtccctgcaccgggcagccaagcgcaggaccagcctttttgcgaatcgtcggggtagtgactccgagaaacgaagcttggatagtcggggagagacaacagggagtgggcgagccatccccatcaaacagagcttcctactaaaacgaagtggcaattccttgaacaaagaatggaagaagaaatatgtaaccctgtccagtaatggctttctactctaccaccccagtattaacgattacatccacagtacccacggcaaggagatggacttgctgcgaacaacagtcaaagtcccgggcaagcggcccccgagggccatctctgcctttggcccctcagccagcattaacgggctcgtcaaggacatgagcactgtccagatgggtgaagscctggaagccactactcccatgccaagccctagccccagccccagttccctgcagccaccaccagatcagacatccaaacacctgctgaagccagaccggaatttggcccgagccctcagcacggactgtaccccatctggagacctgagccccctgagtcgggaaccccctccttctcccatggtgaagaagcagaggaggaaaaaattgacaacaccatccaagactgaaggctcggctgggcaggctgaagaggaaaactttgagttcctgatcgtgtccagcacgggtcagacgtggcactttgaggcagccagttttgaggagcgggatgcctgggtccaggccatcgagagtcagatcctagccagtctgcaatgctgtgagagcagcaaggtcaagctgcgcacagacagccaaagcgaggccgtggccatccaggcgatccggaacgccaaggggaattcaatctgcgtggactgcggggcccccaaccccacgtgggccagcttgaacctgggcgccctcatctgcatcgagtgttctggcatccaccgcaacctgggcacacacctgtcccgcgttcgctcgctggacttggacgactggccacgggagctgaccctggtgctgacggctattggcaacgacacggccaaccgcgtgtgggaaagcgacacgcgaggccgtgccaagccctcgcgggactcttcgcgggaggagcgcgagtcgtggattcgcgccaagtacgagcagctactgttcctggcgccgctgagcacctcggaggagccgctgggccgccagctgtgggccgccgtgcaggcccaggacgtggctaccgttctcctgcttttggcccatgcgcgacacgggccgctcgacaccagcgtagaggacccacagctgcgctccccactccacctggcggccgagctcgcccacgtcgtcatsacgcaactgctgctgtggtacggcgcggacgtggcggcccgtgacgcccaggkccgcacggcgctgttctacgcccgccaggctggaagccakctgtgcgccgacatccttctccagcacgsctgcccgggtgagggcggcagcgcggccaccacgcccagcgcggccaccacgcccagcatcaccgccacgcccagcccccgccgccggagcagcgccgctagcgtgggccgcgccgacgccccggttgcgctggtatagttgcccagcgggagagacacccccatccccacgcgggccgggcacgaccacaccgggcggaccgctggacagacgcacccactcacctctccgatccgcaccccgccccacgggagcacttcctacccccacgagggcacagcccccacgccttccagaagacacaaactcacctccctctccccaacgaggcatggagaccccagctcaacacgccccctctccattgtttccacactcggattgctctgggtctacccgctcggggttcgcggaaggggaggtccccagcggtacgggctcctaggcgcttggacatgcccgcttgtgccccctaggggcggaaagaagacccggtcctgcccgagctcaacaatcccagggcgggagcccatacccaggctggctcctggggcgacgccacgccagagggagggtttagtacatgggagggctagccccgggacttggggccaatacggaaaccctaccccttccatgctcatctcactgcccagtgaagggggcaagggcagcgaggggcaggacccctgctgctcatgggggtgggggttcccaaccctttccgtgaaagggaccgtgagtagtggaaaccaggacgtcccctacacctacccatgggtggaagctaaagagtccggggggaaccaagagcctgggtccctcccactactatcttgggagggagaagggatggagcaggagcgggctaagagggctgcgggggccttgtaatttattgctttgttccccaacatggggatgggggcgggcaggggcgtggggagggcgttttggggtaggggaagcccagggtgggcagggggtgggttggggtgggggtgctctcgggttgtgtctgtgaccgtgactgcgtacctgtgactgtgcagcgcccgtggtgatctggggtagggggcacccctacagtgggacccctcccccattattctttctgtccagcccctccctmccactggagcagctccagagccattcctcacccccgtgacctctcccagccagggctgagaggattcgaggtggctgggagggtttccaggccccctgccccttccccacaaactgggtgatagggcggacttacctggcccagccctgcctccctcagccaacccagcccttgggctgtctgtgtcagtggtttccggtcttttttttttttttttttttctggctaaaatagtttgcaaaggaccaggtaattggggaggggagagaggtgggggcaagggggaaatgcccccccatctccttggaggcagtggtgtgaatcttcttcaacagcaattaaagaggaagtgattttgtctagggggtgagctgctggtctgttcttggaggcaggtcagggcatggccttggtcaagatggggtactggggttggacagggacaggcagaggtgcctcccactggggctggtggcaggacagtacccatgggcrtggaggtggttccatcatgtacaacagttctgggttcatgtagtggaggacgtgggcaggttggagtcagtggggaccctgggaacagagaaggcactgactcttaagatgatgccagtcctgggagagttgggatatggtacttagaggagaggacaggcccatggagaggggtgggaagatgggacagctttgtttaagagcaggaactttggagacagatctgattttgaaacctgcccctccactgcacagctaggggaccttggtggcatctgtttatctgtattctgaacagtatctgttcagagggcacctgaaaggcgctccagctctgaggagggctgccccgagccagcctgctcaccgtgagcactaggtaccagagtagaacatagagtaggggttcctcccctggcctcgtcagggggtgttccagagggaaggggtgggagacctcctgggaaagatttcccagctagctgcagaggtccctggtgtccacaaactcagtgtcagctgatgcaggcatttatccacctccgtgccatcaaagggaccaccaaggccacagcggcctgaagccggtgctgcctccrtgagctgcagtgccactaggctcagcacatagccaatcctaccatttctcgagggcagctgaaagtgtttactcaggtagaggggctggacagggtagggttgggtcagcagccagtgcaggttgggcacagccatatgttgttatctaccttgaggagttagttggtagcaccagcatctttgggtagaattgcttctgacccttggtgcccaccagccccaagaggttcagctgcaagtgtgccactgaactgaggacacagcaccagacctgaatccagttcacatggaggctgcggctctacagggtcctaggctgtgaccacccagcacagcggcgtgacccaggaaaggtggattcaacagtgcaggtgcagtgacaagtacagaggcag

SEQ ID NO: 410 - DNA, 4792 bp, Homo sapiens
aaggggccttctgaggtttgggggctgtagggccatgggcctcagggccagaggtggttgttagcctggcaagacaggtctgggcaacatgcatgcccagaggcagttcgttgtagctgcagtgagagcagaagtcagacgacatgaggtggccaagcaggctctaaaccgcctcaggaagctggcagagagggtggacgaccccgaactccaggacagcatccaggcctcattggacagcattcgagaggctgtgatcaatagccaggaatggactttgagccgctccattcctgaactgcgcctgggtgtgctgggcgatgccaggagtgggaagtcatcgctcatccaccgattcctgactggctcataccaggtgctggagaagacasagagtgagcagtacaagaaagaaatgttggtggatggacagacacatctggtgctaatccgagaggaagctggggcacctgatgccaagttctcaggctgggcagatgctgtgatcttcgtcttcagcctggaggatgagaacagtttccaggctgtgagccgtctccatgggcagctgagttcccttcgcggggagggacgaggargcctggccttggcactggtggggacacaagacaggatcagtgcttcctcccctcgggtggtgggagatgctcgtgccagagctctgtgcgcggacatgaaacgctgcagctactatgagacttgtgcaacctatgggctcaatgtggatcgggtcttccaggaggtggcccagaaggtggtgaccttgcgcaagcagcaacagcttctggctgcctgcaagtccctkcccagctccccaagccactcagctgcatccactccggtagctggccaggctagtaacgggggccacactagcgactactcttcttccctcccgtcctcaccraatgttggtcaccgggagctccgagccgaggcagctgcagtggctggattgagcaccccagggtccctgcaccgggcagccaagcgcaggaccagcctttttgcgaatcgtcggggtagtgactccgagaaacgaagcttggatagtcggggagagacaacagggagtgggcgagccatccccatcaaacagagcttcctactaaaacgaagtggcaattccttgaacaaagaatggaagaagaaatatgtaaccctgtccagtaatggctttctactctaccaccccagtattaacgattacatccacagtacccacggcaaggagatggacttgctgcgaacaacagtcaaagtcccgggcaagcggcccccgagggccatctctgcctttggcccctcagccagcattaacgggctcgtcaaggacatgagcactgtccagatgggtgaagscctggaagccactactcccatgccaagccctagccccagccccagttccctgcagccaccaccagatcagacatccaaacacctgctgaagccagaccggaatttggcccgagccctcagcacggactgtaccccatctggagacctgagccccctgagtcgggaaccccctccttctcccatggtgaagaagcagaggaggaaaaaattgacaacaccatccaagactgaaggctcggctgggcaggctgaagaggaaaactttgagttcctgatcgtgtccagcacgggtcagacgtggcactttgaggcagccagttttgaggagcgggatgcctgggtccaggccatcgagagtcagatcctagccagtctgcaatgctgtgagagcagcaaggtcaagctgcgcacagacagccaaagcgaggccgtggccatccaggcgatccggaacgccaaggggaattcaatctgcgtggactgcggggcccccaaccccacgtgggccagcttgaacctgggcgccctcatctgcatcgagtgttctggcatccaccgcaacctgggcacacacctgtcccgcgttcgctcgctggacttggacgactggccacgggagctgaccctggtgctgacggctattggcaacgacacggccaaccgcgtgtgggaaagcgacacgcgaggccgtgccaagccctcgcgggactcttcgcgggaggagcgcgagtcgtggattcgcgccaagtacgagcagctactgttcctggcgccgctgagcacctcggaggagccgctgggccgccagctgtgggccgccgtgcaggcccaggacgtggctaccgttctcctgcttttggcccatgcgcgacacgggccgctcgacaccagcgtagaggacccacagctgcgctccccactccacctggcggccgagctcgcccacgtcgtcatsacgcaactgctgctgtggtacggcgcggacgtggcggcccgtgacgcccaggkccgcacggcgctgttctacgcccgccaggctggaagccakctgtgcgccgacatccttctccagcacgsctgcccgggtgagggcggcagcgcggccaccacgcccagcgcggccaccacgcccagcatcaccgccacgcccagcccccgccgccggagcagcgccgctagcgtgggccgcgccgacgccccggttgcgctggtatagttgcccagcgggagagacacccccatccccacgcgggccgggcacgaccacaccgggcggaccgctggacagacgcacccactcacctctccgatccgcaccccgccccacgggagcacttcctacccccacgagggcacagcccccacgccttccagaagacacaaactcacctccctctccccaacgaggcatggagaccccagctcaacacgccccctctccattgtttccacactcggattgctctgggtctacccgctcggggttcgcggaaggggaggtccccagcggtacgggctcctaggcgcttggacatgcccgcttgtgccccctaggggcggaaagaagacccggtcctgcccgagctcaacaatcccagggcgggagcccatacccaggctggctcctggggcgacgccacgccagagggagggtttagtacatgggagggctagccccgggacttggggccaatacggaaaccctaccccttccatgctcatctcactgcccagtgaagggggcaagggcagcgaggggcaggacccctgctgctcatgggggtgggggttcccaaccctttccgtgaaagggaccgtgagtagtggaaaccaggacgtcccctacacctacccatgggtggaagctaaagagtccggggggaaccaagagcctgggtccctcccactactatcttgggagggagaagggatggagcaggagcgggctaagagggctgcgggggccttgtaatttattgctttgttccccaacatggggatgggggcgggcaggggcgtggggagggcgttttggggtaggggaagcccagggtgggcagggggtgggttggggtgggggtgctctcgggttgtgtctgtgaccgtgactgcgtacctgtgactgtgcagcgcccgtggtgatctggggtagggggcacccctacagtgggacccctcccccattattctttctgtccagcccctccctmccactggagcagctccagagccattcctcacccccgtgacctctcccagccagggctgagaggattcgaggtggctgggagggtttccaggccccctgccccttccccacaaactgggtgatagggcggacttacctggcccagccctgcctccctcagccaacccagcccttgggctgtctgtgtcagtggtttccggtcttttttttttttttttttttctggctaaaatagtttgcaaaggaccaggtaattggggaggggagagaggtgggggcaagggggaaatgcccccccatctccttggaggcagtggtgtgaatcttcttcaacagcaattaaagaggaagtgattttgtctagggggtgagctgctggtctgttcttggaggcaggtcagggcatggccttggtcaagatggggtactggggttggacagggacaggcagaggtgcctcccactggggctggtggcaggacagtacccatgggcrtggaggtggttccatcatgtacaacagttctgggttcatgtagtggaggacgtgggcaggttggagtcagtggggaccctgggaacagagaaggcactgactcttaagatgatgccagtcctgggagagttgggatatggtacttagaggagaggacaggcccatggagaggggtgggaagatgggacagctttgtttaagagcaggaactttggagacagatctgattttgaaacctgcccctccactgcacagctaggtgcagtgacaagtacagaggcagctccmctccttcctcgtggccaaagtttgctcccttcttcagaagtttgggagtgtgagagaatatgggaaggaaataaggaccctggagagaatgraattgccttcaaagagcaagtgggaagttcctttcatttccagccagtgaaaaatggtcaaggtgtcagcaaacctcacaacaaatcccaacaccaagtaatccacttgcctcttgtcttaatggggagtgtctttggtcttgcgggggagatgtaaagggtggtagtggatggaatgacaaaatatcaagccctccaggttatgacaaaataggagcccagaaggggactccctgggtgggtgaaggagagctgctgcccctttgtgcccatgcccccttcacagctcrccctgggctgccttgcttggatgccctgccatgc

SEQ ID NO: 411 - DNA, 4768 bp, Homo sapiens
aaggggccttctgaggtttgggggctgtagggccatgggcctcagggccagaggtggttgttagcctggcaagacaggtctgggcaacatgcatgcccagaggcagttcgttgtagctgcagtgagagcagaagtcagacgacatgaggtggccaagcaggctctaaaccgcctcaggaagctggcagagagggtggacgaccccgaactccaggacagcatccaggcctcattggacagcattcgagaggctgtgatcaatagccaggaatggactttgagccgctccattcctgaactgcgcctgggtgtgctgggcgatgccaggagtgggaagtcatcgctcatccaccgattcctgactggctcataccaggtgctggagaagacasagagtgagcagtacaagaaagaaatgttggtggatggacagacacatctggtgctaatccgagaggaagctggggcacctgatgccaagttctcaggctgggcagatgctgtgatcttcgtcttcagcctggaggatgagaacagtttccaggctgtgagccgtctccatgggcagctgagttcccttcgcggggagggacgaggargcctggccttggcactggtggggacacaagacaggatcagtgcttcctcccctcgggtggtgggagatgctcgtgccagagctctgtgcgcggacatgaaacgctgcagctactatgagacttgtgcaacctatgggctcaatgtggatcgggtcttccaggaggtggcccagaaggtggtgaccttgcgcaagcagcaacagcttctggctgcctgcaagtccctkcccagctccccaagccactcagctgcatccactccggtagctggccaggctagtaacgggggccacactagcgactactcttcttccctcccgtcctcaccraatgttggtcaccgggagctccgagccgaggcagctgcagtggctggattgagcaccccagggtccctgcaccgggcagccaagcgcaggaccagcctttttgcgaatcgtcggggtagtgactccgagaaacgaagcttggatagtcggggagagacaacagggagtgggcgagccatccccatcaaacagagcttcctactaaaacgaagtggcaattccttgaacaaagaatggaagaagaaatatgtaaccctgtccagtaatggctttctactctaccaccccagtattaacgattacatccacagtacccacggcaaggagatggacttgctgcgaacaacagtcaaagtcccgggcaagcggcccccgagggccatctctgcctttggcccctcagccagcattaacgggctcgtcaaggacatgagcactgtccagatgggtgaagscctggaagccactactcccatgccaagccctagccccagccccagttccctgcagccaccaccagatcagacatccaaacacctgctgaagccagaccggaatttggcccgagccctcagcacggactgtaccccatctggagacctgagccccctgagtcgggaaccccctccttctcccatggtgaagaagcagaggaggaaaaaattgacaacaccatccaagactgaaggctcggctgggcaggctgaagaggaaaactttgagttcctgatcgtgtccagcacgggtcagacgtggcactttgaggcagccagttttgaggagcgggatgcctgggtccaggccatcgagagtcagatcctagccagtctgcaatgctgtgagagcagcaaggtcaagctgcgcacagacagccaaagcgaggccgtggccatccaggcgatccggaacgccaaggggaattcaatctgcgtggactgcggggcccccaaccccacgtgggccagcttgaacctgggcgccctcatctgcatcgagtgttctggcatccaccgcaacctgggcacacacctgtcccgcgttcgctcgctggacttggacgactggccacgggagctgaccctggtgctgacggctattggcaacgacacggccaaccgcgtgtgggaaagcgacacgcgaggccgtgccaagccctcgcgggactcttcgcgggaggagcgcgagtcgtggattcgcgccaagtacgagcagctactgttcctggcgccgctgagcacctcggaggagccgctgggccgccagctgtgggccgccgtgcaggcccaggacgtggctaccgttctcctgcttttggcccatgcgcgacacgggccgctcgacaccagcgtagaggacccacagctgcgctccccactccacctggcggccgagctcgcccacgtcgtcatsacgcaactgctgctgtggtacggcgcggacgtggcggcccgtgacgcccaggkccgcacggcgctgttctacgcccgccaggctggaagccakctgtgcgccgacatccttctccagcacgsctgcccgggtgagggcggcagcgcggccaccacgcccagcgcggccaccacgcccagcatcaccgccacgcccagcccccgccgccggagcagcgccgctagcgtgggccgcgccgacgccccggttgcgctggtatagttgcccagcgggagagacacccccatccccacgcgggccgggcacgaccacaccgggcggaccgctggacagacgcacccactcacctctccgatccgcaccccgccccacgggagcacttcctacccccacgagggcacagcccccacgccttccagaagacacaaactcacctccctctccccaacgaggcatggagaccccagctcaacacgccccctctccattgtttccacactcggattgctctgggtctacccgctcggggttcgcggaaggggaggtccccagcggtacgggctcctaggcgcttggacatgcccgcttgtgccccctaggggcggaaagaagacccggtcctgcccgagctcaacaatcccagggcgggagcccatacccaggctggctcctggggcgacgccacgccagagggagggtttagtacatgggagggctagccccgggacttggggccaatacggaaaccctaccccttccatgctcatctcactgcccagtgaagggggcaagggcagcgaggggcaggacccctgctgctcatgggggtgggggttcccaaccctttccgtgaaagggaccgtgagtagtggaaaccaggacgtcccctacacctacccatgggtggaagctaaagagtccggggggaaccaagagcctgggtccctcccactactatcttgggagggagaagggatggagcaggagcgggctaagagggctgcgggggccttgtaatttattgctttgttccccaacatggggatgggggcgggcaggggcgtggggagggcgttttggggtaggggaagcccagggtgggcagggggtgggttggggtgggggtgctctcgggttgtgtctgtgaccgtgactgcgtacctgtgactgtgcagcgcccgtggtgatctggggtagggggcacccctacagtgggacccctcccccattattctttctgtccagcccctccctmccactggagcagctccagagccattcctcacccccgtgacctctcccagccagggctgagaggattcgaggtggctgggagggtttccaggccccctgccccttccccacaaactgggtgatagggcggacttacctggcccagccctgcctccctcagccaacccagcccttgggctgtctgtgtcagtggtttccggtcttttttttttttttttttttctggctaaaatagtttgcaaaggaccaggtaattggggaggggagagaggtgggggcaagggggaaatgcccccccatctccttggaggcagtggtgtgaatcttcttcaacagcaattaaagaggaagtgattttgtctagggggtgagctgctggtctgttcttggaggcaggtcagggcatggccttggtcaagatggggtactggggttggacagggacaggcagaggtgcctcccactggggctggtggcaggacagtacccatgggcrtggaggtggttccatcatgtacaacagttctgggttcatgtagtggaggacgtgggcaggttggagtcagtggggaccctgggaacagagaaggcactgactcttaagatgatgccagtcctgggagagttgggatatggtacttagaggagaggacaggcccatggagaggggtgggaagatgggacagctttgtttaagagcaggaactttggagacagatctgattttgaaacctgcccctccactgcacagctagctccmctccttcctcgtggccaaagtttgctcccttcttcagaagtttgggagtgtgagagaatatgggaaggaaataaggaccctggagagaatgraattgccttcaaagagcaagtgggaagttcctttcatttccagccagtgaaaaatggtcaaggtgtcagcaaacctcacaacaaatcccaacaccaagtaatccacttgcctcttgtcttaatggggagtgtctttggtcttgcgggggagatgtaaagggtggtagtggatggaatgacaaaatatcaagccctccaggttatgacaaaataggagcccagaaggggactccctgggtgggtgaaggagagctgctgcccctttgtgcccatgcccccttcacagctcrccctgggctgccttgcttggatgccctgccatgc

SEQ ID NO: 412 - DNA, 5143 bp, Homo sapiens
aaggggccttctgaggtttgggggctgtagggccatgggcctcagggccagaggtggttgttagcctggcaagacaggtctgggcaacatgcatgcccagaggcagttcgttgtagctgcagtgagagcagaagtcagacgacatgaggtggccaagcaggctctaaaccgcctcaggaagctggcagagagggtggacgaccccgaactccaggacagcatccaggcctcattggacagcattcgagaggctgtgatcaatagccaggaatggactttgagccgctccattcctgaactgcgcctgggtgtgctgggcgatgccaggagtgggaagtcatcgctcatccaccgattcctgactggctcataccaggtgctggagaagacasagagtgagcagtacaagaaagaaatgttggtggatggacagacacatctggtgctaatccgagaggaagctggggcacctgatgccaagttctcaggctgggcagatgctgtgatcttcgtcttcagcctggaggatgagaacagtttccaggctgtgagccgtctccatgggcagctgagttcccttcgcggggagggacgaggargcctggccttggcactggtggggacacaagacaggatcagtgcttcctcccctcgggtggtgggagatgctcgtgccagagctctgtgcgcggacatgaaacgctgcagctactatgagacttgtgcaacctatgggctcaatgtggatcgggtcttccaggaggtggcccagaaggtggtgaccttgcgcaagcagcaacagcttctggctgcctgcaagtccctkcccagctccccaagccactcagctgcatccactccggtagctggccaggctagtaacgggggccacactagcgactactcttcttccctcccgtcctcaccraatgttggtcaccgggagctccgagccgaggcagctgcagtggctggattgagcaccccagggtccctgcaccgggcagccaagcgcaggaccagcctttttgcgaatcgtcggggtagtgactccgagaaacgaagcttggatagtcggggagagacaacagggagtgggcgagccatccccatcaaacagagcttcctactaaaacgaagtggcaattccttgaacaaagaatggaagaagaaatatgtaaccctgtccagtaatggctttctactctaccaccccagtattaacgattacatccacagtacccacggcaaggagatggacttgctgcgaacaacagtcaaagtcccgggcaagcggcccccgagggccatctctgcctttggcccctcagccagcattaacgggctcgtcaaggacatgagcactgtccagatgggtgaagscctggaagccactactcccatgccaagccctagccccagccccagttccctgcagccaccaccagatcagacatccaaacacctgctgaagccagaccggaatttggcccgagccctcagcacggactgtaccccatctggagacctgagccccctgagtcgggaaccccctccttctcccatggtgaagaagcagaggaggaaaaaattgacaacaccatccaagactgaaggctcggctgggcaggctgaagccaagcgcaaaatgtggaaactaaaatcctttggtagtttaagaaatatttataaagcagaggaaaactttgagttcctgatcgtgtccagcacgggtcagacgtggcactttgaggcagccagttttgaggagcgggatgcctgggtccaggccatcgagagtcagatcctagccagtctgcaatgctgtgagagcagcaaggtcaagctgcgcacagacagccaaagcgaggccgtggccatccaggcgatccggaacgccaaggggaattcaatctgcgtggactgcggggcccccaaccccacgtgggccagcttgaacctgggcgccctcatctgcatcgagtgttctggcatccaccgcaacctgggcacacacctgtcccgcgttcgctcgctggacttggacgactggccacgggagctgaccctggtgctgacggctattggcaacgacacggccaaccgcgtgtgggaaagcgacacgcgaggccgtgccaagccctcgcgggactcttcgcgggaggagcgcgagtcgtggattcgcgccaagtacgagcagctactgttcctggcgccgctgagcacctcggaggagccgctgggccgccagctgtgggccgccgtgcaggcccaggacgtggctaccgttctcctgcttttggcccatgcgcgacacgggccgctcgacaccagcgtagaggacccacagctgcgctccccactccacctggcggccgagctcgcccacgtcgtcatsacgcaactgctgctgtggtacggcgcggacgtggcggcccgtgacgcccaggkccgcacggcgctgttctacgcccgccaggctggaagccakctgtgcgccgacatccttctccagcacgsctgcccgggtgagggcggcagcgcggccaccacgcccagcgcggccaccacgcccagcatcaccgccacgcccagcccccgccgccggagcagcgccgctagcgtgggccgcgccgacgccccggttgcgctggtatagttgcccagcgggagagacacccccatccccacgcgggccgggcacgaccacaccgggcggaccgctggacagacgcacccactcacctctccgatccgcaccccgccccacgggagcacttcctacccccacgagggcacagcccccacgccttccagaagacacaaactcacctccctctccccaacgaggcatggagaccccagctcaacacgccccctctccattgtttccacactcggattgctctgggtctacccgctcggggttcgcggaaggggaggtccccagcggtacgggctcctaggcgcttggacatgcccgcttgtgccccctaggggcggaaagaagacccggtcctgcccgagctcaacaatcccagggcgggagcccatacccaggctggctcctggggcgacgccacgccagagggagggtttagtacatgggagggctagccccgggacttggggccaatacggaaaccctaccccttccatgctcatctcactgcccagtgaagggggcaagggcagcgaggggcaggacccctgctgctcatgggggtgggggttcccaaccctttccgtgaaagggaccgtgagtagtggaaaccaggacgtcccctacacctacccatgggtggaagctaaagagtccggggggaaccaagagcctgggtccctcccactactatcttgggagggagaagggatggagcaggagcgggctaagagggctgcgggggccttgtaatttattgctttgttccccaacatggggatgggggcgggcaggggcgtggggagggcgttttggggtaggggaagcccagggtgggcagggggtgggttggggtgggggtgctctcgggttgtgtctgtgaccgtgactgcgtacctgtgactgtgcagcgcccgtggtgatctggggtagggggcacccctacagtgggacccctcccccattattctttctgtccagcccctccctmccactggagcagctccagagccattcctcacccccgtgacctctcccagccagggctgagaggattcgaggtggctgggagggtttccaggccccctgccccttccccacaaactgggtgatagggcggacttacctggcccagccctgcctccctcagccaacccagcccttgggctgtctgtgtcagtggtttccggtcttttttttttttttttttttctggctaaaatagtttgcaaaggaccaggtaattggggaggggagagaggtgggggcaagggggaaatgcccccccatctccttggaggcagtggtgtgaatcttcttcaacagcaattaaagaggaagtgattttgtctagggggtgagctgctggtctgttcttggaggcaggtcagggcatggccttggtcaagatggggtactggggttggacagggacaggcagaggtgcctcccactggggctggtggcaggacagtacccatgggcrtggaggtggttccatcatgtacaacagttctgggttcatgtagtggaggacgtgggcaggttggagtcagtggggaccctgggaacagagaaggcactgactcttaagatgatgccagtcctgggagagttgggatatggtacttagaggagaggacaggcccatggagaggggtgggaagatgggacagctttgtttaagagcaggaactttggagacagatctgattttgaaacctgcccctccactgcacagctaggggaccttggtggcatctgtttatctgtattctgaacagtatctgttcagagggcacctgaaaggcgctccagctctgaggagggctgccccgagccagcctgctcaccgtgagcactaggtaccagagtagaacatagagtaggggttcctcccctggcctcgtcagggggtgttccagagggaaggggtgggagacctcctgggaaagatttcccagctagctgcagaggtccctggtgtccacaaactcagtgtcagctgatgcaggcatttatccacctccgtgccatcaaagggaccaccaaggccacagcggcctgaagccggtgctgcctccrtgagctgcagtgccactaggctcagcacatagccaatcctaccatttctcgagggcagctgaaagtgtttactcaggtagaggggctggacagggtagggttgggtcagcagccagtgcaggttgggcacagccatatgttgttatctaccttgaggagttagttggtagcaccagcatctttgggtagaattgcttctgacccttggtgcccaccagccccaagaggttcagctgcaagtgtgccactgaactgaggacacagcaccagacctgaatccagttcacatggaggctgcggctctacagggtcctaggctgtgaccacccagcacagcggcgtgacccaggaaaggtggattcaacagtgcaggtgcagtgacaagtacagaggcag

SEQ ID NO: 413 - DNA, 1110 bp, Homo sapiens
gacactacggtgaaggtgaagatcaaagtcaatggatttggttgtattgggtgcctagtcaccagggcggtttttaactctggtaaagtggatattgttgccatcaatgaccccttcattgacctcaactacatggtctgtgtgttccagtatgattttgtctgtgrcaaattccatggcactgccaaggctgagaatgggaagcttgtcatcaaygaaaatcctatcaccatcttccaggagcgagatccctccaaaatcagatggggcaatgctggtgctgagtatatcatggaatccaccggtgtcttcaccaccatggagaaggctgggactcacttgcagcrgggagccaaaagggtcatcatctctgccccttctgctgacacccccatgtctgtgatgggcatgaagcatgagaagtaatgacaacagcctcaagatcatcagcatgcctcctgtatcaccaactgcttagtgcctctggccaaggttatccatgacaactccggtatcgtggaaggactcatgaatgaccacagtccatgccatcactgccacccagaagactgtggatggcccctctgggaaactgtggtgtgacagccacggcgctctccagaacatcatccctgcctctactggtgctgctaaggttgtgggcaaggtcatccctgagctaaatgggaagttcactggcatggccttctgtgtccctactgccaatgtgtcagttgtgggcctgaactgctgtctggaaaaactgccaaatatgatgacatcaagaaggtggtgaagcaggcgtccgagaccccctcaagggcatcctgggctacactgagcaccaggttgtctcctctgattttaacagcgacatccactcttcaacctttgatgctggggatggcattgacctcaacgaccactttgtcaagctcatttcctggtatgacaatgaatttggctacagcaacagggtggtggacctcatggcccacatgacttccaaggagtaagacccctggactaccaaccccagcgagagcgagagaggaagagagaggccctcactgctgggaagtccctgccatactcagtcccccacaacac

SEQ ID NO: 414 - DNA, 1833 bp, Homo sapiens
actgcgcctgggagcttgtgtccgattccgggaggtggccgtgtccgagtgcgtggttgtacatttccgaaggtctcagtttctctcactttcagcccgcgagttcctccgcttctcctttagcagggttatcaatgccgggaagagcacacacaatgaagaccaagccagctgtgaggtgctcactgtgaagaagaaggcaggggccgtgacctcaaccccaaacaggaactcatccaagagacggtcctcccttcccaatggggaagggctgcagctgaaggagaactcggaatccgagggtgtttcctgccactattggtcgctgtttgacgggcacgcggggtccggggccgcggtggtggcgtcacgcctgctgcagcaccacatcacggagcagctgcaggacatcgtggacatcctgaagaactccgccgtcctgccccctacctgcctgggggaggagcctgagaacacgcccgccaacagccggactctgacccgggcagcctccctgcgcggaggggtgggggccccgggctcccccagcacgccccccacacgcttctttaccgagaagaagattccccatgagtgcctggtcatcggagcgcttgaaagtgcattcaaggaaatggacctacagatagaacgagagaggagttcatataatatatctggtggctgcacggccctcattgtgatttgccttttggggaagctgtatgttgcaaatgctggggatagcagggccataatcatcagaaatggagaaattatccccatgtcttcagaatttacccccgagacggagcgccagcgacttcagtacctggcattcatgcagcctcacttgctgggaaatgagttcacacatttggagtttccaaggagagtacagagaaaggagcttggaaagaagatgctctacagggactttaatatgacaggctgggcatacaaaaccattgaggatgaggacttgaagttcccccttatatatggagaaggcaagaaggcccgggtaatggcaactattggagtgaccaggggacttggggaccatgacctgaaggtgcatgaytccaacatctacattaaaccattcctgtcttcagctccagaggtaagaatctacgatctttcaaaatatgatcatggatcagatgatgtgctgatcttggccactgatggactctgggacgttttatcaaatgaagaagtagcagaagcaatcactcagtttcttcctaactgtgatccagatgatcctcacaggtacacactggcagctcaggacctggtgatgcgtgcccggggtgtgctgaaggacagaggatggcggatatctaatgaccgactgggctcaggagacgacatttctgtatatgtcattcctttaatacatggaaacaagctgtcatgaaaatggcccaggggattgggaggacagaggggaagaaagctgggatgcctcttggcaggacggaactgggaagtgccccagctgagttccaagtgatgcagtctcttcccagcccaagcggggagttcatggccaaaagactatgcttcaagatgaccctttggtttccatttcttctttagtaacaggtcaactcaacaagagcaaaacacaaaggctgctaccaagtgttgttgtatttcagttcctttcataggcctccgaggtggccattgactatttggggtatayatgtcatatttattttatctagagtagctggggcagccattttcaggtgtaaatggcagaggactcttcagcctgtcaagctgccagcttatctacgggttaaaaagtgctgcatt

SEQ ID NO: 415 - DNA, 829 bp, Homo sapiens
agaagtggggacccaaagggtgcaggacgcctggtctgccttgtgggtcctggacggagcccctacctctgcaaagatgacttggagacaggccgtcctgctgtcttgcttctccgccgtggtgctcctgtctatgctgagagagggaaccagtgtatctgtgggcaccatgcagatggcgggagaagaggcgagtgaagatgcaaaacagaagmttttcatgcaggaatcagatgcctcgaatttcctcaagaggcgcggcaagcggtcccccaagtcccgagatgaggtcaatgtggaaaacaggcagaagcttcgggttgatgagctgcggagagaatattacgaggaacaaaggaatgaatttgagaacttcgtggaggaacaaaacgatgagcaggragagaggagccgggaggctgtggagcagtggcgccagtggcactatgacggcctgcacccatcctatctctacaaccgccaccacacctgatcccatcctgaagccggccaagaagacaaagcttgtagcaccattggcatccccgtgttccagcaatctttcccatgcaaaccggcccttcagagggtctcagcttggggtctgcagtggccagcagctcttgaaaagacgcatgcctttccttccagtgtgtgaaagtgtcctgactttcacctctttgcagaccatcttctgaggtgagcaactgcctgcagggcctcctagtaccaaacctacagtggcttcccctggcttcgttcccaagcaaaagaatcagtcaagaatcacatgtttgcttatggcttacaaataaaaacgctgaatcaa

SEQ ID NO: 416 - DNA, 3729 bp, Homo sapiens
acaacatgtgaggcatttgggaatgtctcagttaacgtggtacataagttccttgctctaatagagctcacatttggatgtcttctaattctgaacctgaatgtaagagcacaatacaatcaatgaagcagtgagcccaggaagccatggatcttcacaagcctcaggaaaagtcaacatttaaaattttctrtttaaagtccaagggcacagcaagctcttggtctakatgggaaggccatggactacaattcccacaagtccgtgcgacctctccgttctgcgcagcttcgcggtatgaggaagagggtcctgtcaggcgcactcttsttgcatcatcagcgtgcacctccacgatgaaacaggtctgggctacaaaagtatggccgcttctgaggcggcggtggtgtcttcgccgtctttgaaaacagacacatcccctgtccttgaaactgcaggaacggtcgcagcaatggctgcgaccccgtcagcaagggctgcagccgcggtggttgcggccgcggccaggaccggatccgaagccagggtctccaaggccgctttggctaccaagctgctgtccttgagcggcgtgttcgccgtgcacaagcccaaagggcccacttcagccgagctgctgaatcggttgaaggagaagctgctggcagaagctggaatgccttctccagmatggaccaagaggaaaaagcagactttgaaaattgggcatggagggactctagacagcgcagcccgaggagttctggttgttggaattggaagcggaacaaaaatgttgaccagtatgttgtcagggtccaagagatatactgccaytggagaactggggaaagctactgatacactagattctacggggarggtaacagaagaaaaaccttacgataaaataacacaagaagatattgaaggcattctacagaaatttactggaaatataatgcaagtgccccccctctattctgcattaaagaaagatggacaaagactttcgactttgatgaagagaggtgaagtcgtagaagcaaaacctgccaggccagtgactgtatacagtatctcccttcaaaaattccagccaccatttttcacattagatgttgaatgtggaggaggtttttatatcagaagcttggtcagtgacattggaaaagaactatcttcctgtgccaatgtgctagagctgacccgaaccaaacagggaccatttacgctagaagaacatgcccttcctgaagacaaatggacaattgatgacattgcacagtctcttgagcattgctcatctcttttcccagcagagttggcacttaaaaaatcaaaacctgagtctaatgaacaggttttgagctgtgaatatataactctaaatgagccaaagagagaagatgatgtaattaagacgtgttgagattggcctgggaatatcatcattttctagttgacatttgaatcctgtgtgcagatgcagaatgacaagctgcattcaaaagacaaacaatatgtcttttttttttttgcatgaagaaaaatgtctatcatttacagtttcaatagcacataatttattttctatgcattataaatggccttgcagttggctcagttgtttgytgtgttgtgaaatgttttaggattttttgtattgtgaaaatatgaatatgattggattcagaaaaattaactttctgaatttgatctgtcttcagtcttgtgaaaaagttgaacaaatttcctaatcaaagaaaaaagtatgagctccatgtttctttagtttcacaaaaatgaccataatttagtgttatttttactttatttaggcttcctggtggcttcattttattgaaattctttaaattgtttaaagtggccattattgatctctttcttctgttttggagagtttattattaaaaacatttctttgataaaatggccatcatctagtaatacctgtgtttgtttagatcttggaaatgaataagctttgataatatttgtaaatgaaccaaattattactgctaccactaacaggttgtaaatagaagactaatacttaattaaagtcaccttcctaccattagagcagaagacagctcctatagttttgtattttggcagctatgagatattttcatggtaatgtcaacatggtcaagcactttgtaccaagttattaagtaacataatttttaaaatttaaagaatgtgtcttcaactaaaaactttattctttagcatttatttatatttctctgtagggtgtwccctgtgacattgtctctttagtttgctctttcaagagatacttacagatgttgagatggctgccctgcatttccagctaatctcttctgctctaaatatttaaaaacagttcttctcaaacattttcattcagatagctttctgaaagttccctatccctctttaccataattttttaaatgtagccacattgtaatagtaaacttcatatataatgagtgcttcatatttttgttatgggaaagcaatatattatgcagccagtctgtagaaacattcagatccctcttcctttactcaaatacagtttcaaaaggaagactcatgagaaatttcataaaatacaagtttttagatgtttatgctttgcctttctttttaaaggtgttttcctgctttgtagtctctaactctgaaatttaaaatatgtaaactaaagtggttttatttgtgcttaacccaatttaaactcaatgtaaaatgttatatatgcatcagtacagcattttcaacatattggcaacatattttaaatgaaaacactaaaacaattcttagtatgagacaaaactgtaaggaaaaagagtgttaataccatgatgcattaacataaaatatcaaacacacaaagtcataaaatgaaaatttacagttttacctgttcatatctagtgccccacagtgtgtgtcaaccaaaggtggcagtggctacatctgcctgttggactggtacaggttacaatatgtcctcttccattgcaaattaaagtccaaatagagaaatacttaggttttagaacacatcagaggtatttctgctgtatttttcaccttaaaaattgacacagagtttactaatagaggagtagagattgttgaccatttttaaaaaacgatagccactctttttcttttatgtttaaaactgaagttttgccaaatgggaaaattactgttacctctaccatcttaatgtagtaactttagawtttaaatttttatattactattttcctttttgttgttcacatagtcttaaggcacctatacttttaaattgactttttcatttgatattatctatatgtatgtagttgtgataatgattattttaattatattactttatactcttaatttatttagagtatttctctattgctgaatacttaagtagttttaaattttattatgataaattcctgggagggggattatttagtgaaataatatgaagaactttatgacttatgtttgccttattgcattcccaaagagttgtaacattttacagtgttaccatttgagtaggggttttatatgttgttgctaatttagtaaacataggagagaaatcaaagtttttctgatttgcttttatgtgatttatctgtatactttgttcatttatataaataaatgtcttaatggtttctata

SEQ ID NO: 417 - DNA, 3169 bp, Homo sapiens
gaaaaatatggagcaggaacaggaaagcatttaatggaacaaagttctccaggatttaggcaaactcacctacaagatttatcagaagccactcaagatgtgaaggaagagaatcattatcttactcctcgaagtgttcttttagagttggataatatcattgcttccagtgattctggtgaatccattgaaactgatggtccagaccaggtctctggaagaattgagtgtcattatgagccaatggaatcctattttttcaaagagacatcccatgagtctgtggatagcagcaaagaggaaccccagacccttccagagacccaggatggggacctccacctgcaagaacaaggctcaggaattgattggtgtctttcccctgccgatgtggaagcacagaccacaaatgaccaaaagggtaatatccccgatgaaagccaagtggagaaactgaacrttttcctttctcctcctgatgtcatcaactatcttgcyctcacagaagccacaggacggatatgtgtgtctcagtgggaaggccccccacgtttgggatgcatattttgccacggagatcatcttctggcagtgaatgacctgaaaccccagagcctggaggaggtctccctgtttcttacccggtccatccagaaggagaaattaaagcttaccatcggcaggatcccaaattcagagacattccatgcygcatcctgtatgtgtccctcaaaatgccaaagtgctgcaccttctcagctggataagcctagactgaacagagctcccaagaggagtccggccattaaaaagagccagcagaaaggagccagggagtaacgcaccccagacccatggcagcagaaccaggatggagctgggactgtccagctctgccccctgctgctgccatgtgataggagacagtcggcacccccctctgaatttctgyatctgcatcttaacaatggggatgactatcccctctctggttattgtatcagagatgytaagagggtcatgtggcatgattggagaacctgggggaattggaaggccttattatctcagctattgtcccaaacaccacagacacagattgggtcagtccttcatgtaatacatgctgtgttctgtgaggatgtggtccacacaattccttctttgttaagggacatacagttgcaaatactcactgcatgaaggcaagattcccaagggagatgtgatagctgatcaggcttcccagacacctccttcccaaacacctccttcccaacacctccttccccaacatccttcccaacacctccttcccaacacctccttcccaaacacctccttcccaaacacctccttcctcaacacctccttccccaacacctccttcccaaacacctctttcccaaacacctccttcccagacacctccttcccaacacctccttcccaacacctccttcccaaacccctctttcccaaacacctccttccccaacacctccttcccaacacctccttccccacctccttccccaacacacctccttcccaaacatccccttcccaaacacctgcctctcttcaaccccacaggccagagtgctgagacagagtggccttttggattcaataagtatcttgttctcttaaagactcagcaacgattttagaagtcgcagcagttttacatcacatgcagccaagatcagcttgctctacaagcaataacagaactacttagcacttcaaggttgaaagttcttcactaatggatccattgactaattgatcctggaaggccaaaggaataaaattcttttatataaataggaaaacaaaggcagagagctaaagcactaatcaaatcggggggtgttagagcaaaaacaggcttcagaaagagtattttaccaygcttcacatggaaaaaatcgagccccggagmgatgaaaggcatattttctttgtttctccaagtttcataaccgttcagttgcagaaccaagaatctaaaaccagctctgggaaacaaatgtccagatgccagcctcatagttgaacttggatttgaaaataccttcagcacttagaagagacattcaaatacatttcatttcctgttayccagattgttcggaaagtattaaaaatttttcatttacmtgctgatacggtttggatctgtgtccctaacaaatcccatgtcgagctgtggtccccggtgttggagatggagcctggtgggaggcagctggatcgtgaggtcrtgggggtggagttctcacgaaggagttagcatcatccccttggcgctgttctcgtgatagtaagttctcgtgagatctggttgtttaaaagtgtgcagcacctctccgctcactctcttcctcctgctcctgccgtgtaagatgcctgctctgtctgccacaagtgaaagcttcctgaggtctccccggaagcagatgctgccacgcttcctgtacagcctgcagaactgtggaccaatcaaacctcttttcttataaattacctggtcttggggatttctttatttaatgtgagaacgcatgcccttttggatctrctgtttctacttttataaatttatcmtgcagaaatacacaaatacacaaagatacatgtaaaaaaagtagtttactgcagtactgtttgtaataataaaaaatcaggctggacgtggtggttcatgcctataattccaaccctttgggaggccgggacaggtggatcacctgaggtctggagctcgagaacaacctgaccaacatggagaaaccctgtctctactaaaaatacaaaactagctgggcattgtggcacatgcctgcaatcccagctacttgagaggctggggcaggagaatcactagaaccgggaggcsgaagttgcagtgagccmagatcatgccattgcactccagcctgggcaacaagaggaaaacccagtctcaaaaaaaaaaaaaaaatcatgtgggtattgcttaattctgatttcatatcaytgaacactgtagatattaaaatgttcagcaggcacagttctgtaaaattgttcgtgatacattaagaatgaaagaatcaagttgtataataaggataacatcatcccacttttgtacaaataaatgtttggtgtttgtgtgtat

SEQ ID NO: 418 - DNA, 3145 bp, Homo sapiens
catttaatggaacaaagttctccaggatttaggcaaactcacctacaagatttatcagaagccactcaagatgtgaaggaagagaatcattatcttactcctcgaagtgttcttttagagttggataatatcattgcttccagtgattctggtgaatccattgaaactgatggtccagaccaggtctctggaagaattgagtgtcattatgagccaatggaatcctattttttcaaagagacatcccatgagtctgtggatagcagcaaagaggaaccccagacccttccagagacccaggatggggacctccacctgcaagaacaaggctcaggaattgattggtgtctttcccctgccgatgtggaagcacagaccacaaatgaccaaaagggtaatatccccgatgaaagccaagtggagaaactgaacrttttcctttctcctcctgatgtcatcaactatcttgcyctcacagaagccacaggacggatatgtgtgtctcagtgggaaggccccccacgtttgggatgcatattttgccacggagatcatcttctggcagtgaatgacctgaaaccccagagcctggaggaggtctccctgtttcttacccggtccatccagaaggagaaattaaagcttaccatcggcaggatcccaaattcagagacattccatgcygcatcctgtatgtgtccctcaaaatgccaaagtgctgcaccttctcagctggataagcctagactgaacagagctcccaagaggagtccggccattaaaaagagccagcagaaaggagccagggagtaacgcaccccagacccatggcagcagaaccaggatggagctgggactgtccagctctgccccctgctgctgccatgtgataggagacagtcggcacccccctctgaatttctgyatctgcatcttaacaatggggatgactatcccctctctggttattgtatcagagatgytaagagggtcatgtggcatgattggagaacctgggggaattggaaggccttattatctcagctattgtcccaaacaccacagacacagattgggtcagtccttcatgtaatacatgctgtgttctgtgaggatgtggtccacacaattccttctttgttaagggacatacagttgcaaatactcactgcatgaaggcaagattcccaagggagatgtgatagctgatcaggcttcccagacacctccttcccaaacacctccttcccaacacctccttccccaacacctccttcccagacacctccttcccaacacctccttcccaacacctccttcccaaacccctctttcccaaacaccttcccaacacctccttcccaaacacctccttccccaacacctccttccccaacacctccttcccaacaccgccttcccaacacctccttcccaaacacctctttcccaaacacctccttccccaacacctccttcccaacacctccttccccttccaacacctccttcccaaacccctccttcccaaacatccccttcccaaacacctgcctctcttcaaccccacaggccagagtgctgagacagagtggccttttggattcaataagtatcttgttctcttaaagactcagcaacgattttagaagtcgcagcagttttacatcacatgcagccaagatcagcttgctctacaagcaataacagaactacttagcacttcaaggttgaaagttcttcactaatggatccattgactaattgatcctggaaggccaaaggaataaaattcttttatataaataggaaaacaaaggcagagagctaaagcactaatcaaatcggggggtgttagagcaaaaacaggcttcagaaagagtattttaccaygcttcacatggaaaaaatcgagccccggagmgatgaaaggcatattttctttgtttctccaagtttcataaccgttcagttgcagaaccaagaatctaaaaccagctctgggaaacaaatgtccagatgccagcctcatagttgaacttggatttgaaaataccttcagcacttagaagagacattcaaatacatttcatttcctgttayccagattgttcggaaagtattaaaaatttttcatttacmtgctgatacggtttggatctgtgtccctaacaaatcccatgtcgagctgtggtccccggtgttggagatggagcctggtgggaggcagctggatcgtgaggtcrtgggggtggagttctcacgaaggagttagcatcatccccttggcgctgttctcgtgatagtaagttctcgtgagatctggttgtttaaaagtgtgcagcacctctccgctcactctcttcctcctgctcctgccgtgtaagatgcctgctctgtctgccacaagtgaaagcttcctgaggtctccccggaagcagatgctgccacgcttcctgtacagcctgcagaactgtggaccaatcaaacctcttttcttataaattacctggtcttggggatttctttatttaatgtgagaacgcatgcccttttggatctrctgtttctacttttataaatttatcmtgcagaaatacacaaatacacaaagatacatgtaaaaaaagtagtttactgcagtactgtttgtaataataaaaaatcaggctggacgtggtggttcatgcctataattccaaccctttgggaggccgggacaggtggatcacctgaggtctggagctcgagaacaacctgaccaacatggagaaaccctgtctctactaaaaatacaaaactagctgggcattgtggcacatgcctgcaatcccagctacttgagaggctggggcaggagaatcactagaaccgggaggcsgaagttgcagtgagccmagatcatgccattgcactccagcctgggcaacaagaggaaaacccagtctcaaaaaaaaaaaaaaaatcatgtgggtattgcttaattctgatttcatatcaytgaacactgtagatattaaaatgttcagcaggcacagttctgtaaaattgttcgtgatacattaagaatgaaagaatcaagttgtataataaggataacatcatcccacttttgtacaaataaatgtttggtgtttgtgtgtat

SEQ ID NO: 419 - DNA, 3172 bp, Homo sapiens
gaaaaatatggagcaggaacaggaaagcatttaatggaacaaagttctccaggatttaggcaaactcacctacaagatttatcagaagccactcaagatgtgaaggaagagaatcattatcttactcctcgaagtgttcttttagagttggataatatcattgcttccagtgattctggtgaatccattgaaactgatggtccagaccaggtctctggaagaattgagtgtcattatgagccaatggaatcctattttttcaaagagacatcccatgagtctgtggatagcagcaaagaggaaccccagacccttccagagacccaggatggggacctccacctgcaagaacaaggctcaggaattgattggtgtctttcccctgccgatgtggaagcacagaccacaaatgaccaaaagggtaatatccccgatgaaagccaagtggagaaactgaacrttttcctttctcctcctgatgtcatcaactatcttgcyctcacagaagccacaggacggatatgtgtgtctcagtgggaaggccccccacgtttgggatgcatattttgccacggagatcatcttctggcagtgaatgacctgaaaccccagagcctggaggaggtctccctgtttcttacccggtccatccagaaggagaaattaaagcttaccatcggcaggatcccaaattcagagacattccatgcygcatcctgtatgtgtccctcaaaatgccaaagtgctgcaccttctcagctggataagcctagactgaacagagctcccaagaggagtccggccattaaaaagagccagcagaaaggagccagggagtaacgcaccccagacccatggcagcagaaccaggatggagctgggactgtccagctctgccccctgctgctgccatgtgataggagacagtcggcacccccctctgaatttctgyatctgcatcttaacaatggggatgactatcccctctctggttattgtatcagagatgytaagagggtcatgtggcatgattggagaacctgggggaattggaaggccttattatctcagctattgtcccaaacaccacagacacagattgggtcagtccttcatgtaatacatgctgtgttctgtgaggatgtggtccacacaattccttctttgttaagggacatacagttgcaaatactcactgcatgaaggcaagattcccaagggagatgtgatagctgatcaggcttcccagacacctccttcccaaacacctccttcccaacacctccttccccaacacctccttcccagacacctccttcccaacacctccttcccaacacctccttcccaaacccctctttcccaaacaccttcccaacacctccttcccaaacacctccttccccaacacctccttccccaacacctccttcccaacaccgccttcccaacacctccttcccaaacacctctttcccaaacacctccttccccaacacctccttcccaacacctccttccccttccaacacctccttcccaaacccctccttcccaaacatccccttcccaaacacctgcctctcttcaaccccacaggccagagtgctgagacagagtggccttttggattcaataagtatcttgttctcttaaagactcagcaacgattttagaagtcgcagcagttttacatcacatgcagccaagatcagcttgctctacaagcaataacagaactacttagcacttcaaggttgaaagttcttcactaatggatccattgactaattgatcctggaaggccaaaggaataaaattcttttatataaataggaaaacaaaggcagagagctaaagcactaatcaaatcggggggtgttagagcaaaaacaggcttcagaaagagtattttaccaygcttcacatggaaaaaatcgagccccggagmgatgaaaggcatattttctttgtttctccaagtttcataaccgttcagttgcagaaccaagaatctaaaaccagctctgggaaacaaatgtccagatgccagcctcatagttgaacttggatttgaaaataccttcagcacttagaagagacattcaaatacatttcatttcctgttayccagattgttcggaaagtattaaaaatttttcatttacmtgctgatacggtttggatctgtgtccctaacaaatcccatgtcgagctgtggtccccggtgttggagatggagcctggtgggaggcagctggatcgtgaggtcrtgggggtggagttctcacgaaggagttagcatcatccccttggcgctgttctcgtgatagtaagttctcgtgagatctggttgtttaaaagtgtgcagcacctctccgctcactctcttcctcctgctcctgccgtgtaagatgcctgctctgtctgccacaagtgaaagcttcctgaggtctccccggaagcagatgctgccacgcttcctgtacagcctgcagaactgtggaccaatcaaacctcttttcttataaattacctggtcttggggatttctttatttaatgtgagaacgcatgcccttttggatctrctgtttctacttttataaatttatcmtgcagaaatacacaaatacacaaagatacatgtaaaaaaagtagtttactgcagtactgtttgtaataataaaaaatcaggctggacgtggtggttcatgcctataattccaaccctttgggaggccgggacaggtggatcacctgaggtctggagctcgagaacaacctgaccaacatggagaaaccctgtctctactaaaaatacaaaactagctgggcattgtggcacatgcctgcaatcccagctacttgagaggctggggcaggagaatcactagaaccgggaggcsgaagttgcagtgagccmagatcatgccattgcactccagcctgggcaacaagaggaaaacccagtctcaaaaaaaaaaaaaaaatcatgtgggtattgcttaattctgatttcatatcaytgaacactgtagatattaaaatgttcagcaggcacagttctgtaaaattgttcgtgatacattaagaatgaaagaatcaagttgtataataaggataacatcatcccacttttgtacaaataaatgtttggtgtttgtgtgtat

SEQ ID NO: 420 - DNA, 2364 bp, Homo sapiens
agcggggaaaaatatggagcaggaacaggaaagcatttaatggaacaaagttctccaggatttaggcaaactcacctacaagatttatcagaagccactcaagatgtgaaggaagagaatcattatcttactcctcgaagtgttcttttagagttggataatatcattgcttccagtgattctggtgaatccattgaaactgatggtccagaccaggtctctggaagaattgagtgtcattatgagccaatggaatcctattttttcaaagagacatcccatgagtctgtggatagcagcaaagaggaaccccagacccttccagagacccaggatggggacctccacctgcaagaacaaggctcaggaattgattggtgtctttcccctgccgatgtggaagcacagaccacaaatgaccaaaaggggtcggcctcactaactgttgtgcaattgtctatattaatcaataatatccccgatgaaagccaagtggagaaactgaacrttttcctttctcctcctgatgtcatcaactatcttgcyctcacagaagccacaggacggatatgtgtgtctcagtgggaaggcccccgacgtttgggatgcatattttgccacggagatcatcttctggcagtgaatgacctgaaaccccagagcctggaggaggtctccctgtttcttacccggtccatccagaaggagaaattaaagcttaccatcggcaggatcccaaattcagagacattccatgcygcatcctgtatgtgtccctcaaaatgccaaagtgctgcaccttctcagctggataagcctagactgaacagagctcccaagaggagtccggccattaaaaagagccagcagaaaggagccagggagtaacgcaccccagacccatggcagcagaaccaggatggagctgggactgtccagctctgccccctgctgctgccatgtgataggagacagtcggcacccccctctgaatttctgyatctgcatcttaacaatggggatgactatcccctctctggttattgtatcagagatgytaagagggtcatgtggcatgattggagaacctgggggaattggaaggccttattatctcagctattgtcccaaacaccacagacacagattgggtcagtccttcatgtaatacatgctgtgttctgtgaggatgtggtccacacaattccttctttgttaagggacatacagttgcaaatactcactgcaagaaggcaagattcccaagggagatgtgatagctgatcaggcttcccagacacctccttcccaaacacctccttcccaacacctccttccccaacatccttcccaacacctccttcccaacacctccttcccccttccccaacacctccttccccaacacctccttcccaacacctccttcccaaacccctccttccccaacatccttcccaacacctccttcccaacacctccttcccaaacacctccttcccaaacacctccttcccaacacctccttccccaacacctccttcccaaacacctctttcccaaacacctccttcccagacacctccttcccaacaccgccttcccaacacctccttcccaaacccctctttcccaaacacctccttccccaacacctccttccccaacacctccttcccaacacctccttcccccttccccaacaactccttccccaacacctccttcccaaacatccccttcccaaacacctgcctctcttcaaccccacaggccagagtgctgagacagagtggccttttggattcaataagtatcttgttctcttaaagactcagcaacgattttagaagtcgcagcagttttacatcacatgcagccaagatcagcttgctctacaagcaataacagaactacttagcacttcaaggttgaaagttcttcactaatggatccattgactaattgatcctggaaggccaaaggaataaaattcttttatataaataggaaaacaaaggcagagagctaaagcactaatcaaatcggggggtgttagagcaaaaacaggcttcagaaagagtattttaccaygcttcacatgaaaaaaatcgagccccggagmgatgaaaggcatattttctttgtttctccaagtttcataaccgttcagttgcagaaccaagaatctaaaaccagctctgggaaacaaatgtccagatgccagcctcatagttgaacttggatttgaaaataccttcagcacttagaagagacattcaaatacatttcatttcctgttacccagattgttcggaaagtattaaaaatttttcatttacatgctgaaaaaaaaaaaaaaaa

SEQ ID NO: 421 - DNA, 3022 bp, Homo sapiens
cctgaatccttggagactgacattttycccccctaaagscatagacaacaaaagaaattttattgagaggaaaacacaagtccttaaactgcaaagatgtttgccaggatgtctgatctccatgttctgctgttaatggctctggtgggaaagacagcctgtgggttctccctgatgtctttattggaaagcctggacccagactggacccctgaccagtatgattacagctacgaggattataatcaggaagagaacaccagtagcacacttacccaygctgagaatcctgactggtactacactgaggaccaagctgatccatgccagcccaacccctgtgaacacggtggggactgcctcgtccatgggagcaccttcacatgcagctgcctggctcctttctctgggaataagtgtcagaaagtgcaaaatacgtgcaaggacaacccatgtggccggggccaatgtctcattacccagagtcctccctactaccgmtgtgtctgtaaacacccttacacaggtcccagctgctcccaagtggttcctgtatgcaggccaaacccctgccagaatggggctacctgctcccggcataagcggagatccaagttcacctgtgcctgtcccgaccagttcaaggggaaattctgtgaaataggttctgatgactgctatgttggcgatggctactcttaccgagggaaaatgaataggacagtcaaycagcatgcgtgcctttactggaactcccacctcctcttgcaggagaattacaacatgtttatggaggatgctgaaacccatgggattggggaacacaatttctgcagaaacccagatgcggacgaaaagccctggtgctttattaaagttaccaatgacaaggtgaaatgggaatactgtgatgtctcagcctgctcagcccaggacgttgcctacccagaggaaagccccactgagccatcaaccaagcttccggggtttgactcctgtggaaagactgagatagcagagaggaagatcaagagaatctatggaggctttaaragcacggcgggcaagcacccatggcaggcgtccctccagtcctcgctgcctctgaccatctccatgccccagggccacttctgtggtggggcrctgatccacccctgctgggtgctcactgctgcccactgcaccgacataaaaaccagacatctaaaggtggtgctaggggaccaggacctgaagaaagaagaatttcatgagcagagctttagggtggagaagatattcaagtacagccactacaatgaaagagatgagattccccacaatgatattgcattgctcaagttaaagccagtggatggycactgtgctctagaatccaaatacgtgaagactgtgtgcttgcctgatgggtcctttccctctgggagtgagtgccacatctctggctggggtgttacagaaacaggaaaagggtcccgccagctcctggatgccaaagtcaagctgattgccaacactttgtgcaactcccgccaactctatgaccacatgattgatgacagtatgatctgtgcaggaaatcttcagaaacctgggcaagacacctgccagggtgactctggaggccccctgacctgtgagaaggacggcacctactacgtctatgggatagtgagctggggcctggagtgtgrgaagaggccaggggtctacacccaagttaccaaattcctgaattggatcaaagccaccatcaaaagtgaaagtggcttctaaggtactgtcttctggacctcagagcccactctccttggcaccctgacaccgggaggcctcatggccaacaatggacacctccagagcctccaggggaccacacagtagactatccctactctaagcagagacaactgccacccagcctgggccttcccagaccagcatttgcacaatatcaccaggcttcttctgcctcccttggtaacccaaggaatgatggaatcaacacaacatagtatgtttgctttccttacccaattgtaccttctagaaaatcagtgttcacagagactgcctccaccacaggcatcctgcaaatgcagactccagaatccccagcatcagcgggaaccaccatcacatctttattcctcagcccagacactcgaggcactcaacagaatcagccatccacgtctaggtatcagagaggaccacaaatacaacattctccatctgctttcagagttattattttaataaaggaagatctgggatgggctggtgggccattccagcttgccgaaatcaaagccatctgaagcctgtctctggtgaacaaacttcctctctggcctctcaggaatcagggtggacatggctcacaacagcagggccttcttctttttgacgtgcagaatctcagtggcatctgggttcacctccccactctgatgatctccagcctccactgcttctgccccccgctgctgaaatcaaacataccccaagttaaaatgaagctcccccacccccactcccggccccggttcccacaggacacgctaagaagcacagggagcatttaacaggctcaccctccctttccttttcccctcttctaccctccccaagaaaaagggccktcaaggcaggaatgagaaagcaaagccaatctctcatttagacctggcttctttcttctgaacaaagtagggttcaaaatgcagactgtcatatccagcgagtccctgaccctttctgcgaatgtaacgagcaagcagtcagcacagcctgggctgccctggcccgggattgatgtagccccggtaggtttgcctctgcagaactaatggctgtgacttcagagaaagccctgcaggaagtttaamctrcgtgtcatctgcctggtcatctcagacccatgaaattaggcgccttgtttgagctgcgtttcacacttctttagagctagctgacctttggccaaaaataaactttgaaaagaaacaatgagttt

SEQ ID NO: 422 - DNA, 4243 bp, Homo sapiens
gaacttgttcccgccaagaccctaaagggattgttcattgctgctggaggaagatcatggactgtcgcgggaaactgaagtggttgagtatccactagtcgtggatgagggcagtgacttcgcagttttttgcgaattacacatctctttgattatgttgtgactagttttgttagatagtcatttagtgtttgggatacctgttaagccctttgtccagggactgtggttggatttatgaattatttggacggttgtccacttgaaagaactgacagtagcttcataacaatgttacaaatctcgttctaagattaagctgttgaacctatatttgccattagcgcttaatttttgaagtattatttttatgaatcaagccctggaaaaggacaagatatttgaatgaaatagcacccataatggagaacttcacagttgctactcctgtgataggtttatcttagtttcattgtggtataaatggaatagcaggtgttgtcaggtacaaggtttgtagcttgccaatatgttcattaccaacactgcagattcccattgagttggtgggggttttgttacctttgttttttttctcagcaaaataattctataactttttgtttgtgacaagaaatggactttcagtttacttaagattaatacttcttgaatgataaaatcattttgccatgttagaagacatttccgaagaagacatttgggaatacaaatctaaaagaaaaccaaaacgagttgatccaaataatggctctaaaaatattctaaaatctgttgaaaaagcaacagatggaaaataccagtcaaaacggagtagaaacagaaaaagagccgcagaagctraagaggtgaaggaccatgaagtgccccttggaaatgcaggttgtcagacttctgttgcttctagtcagaattcaagttgtggagatggtattcagcagacccragacaaggaaactactccaggaaaactctgtagaactcaaaaaagccaacacgtgtccccaaagatacgtccagtttatgatggatactgtccaaattgccagatgcctttttcctcattgatagggcagacacctcgatggcatgtttttgaatgtttggattctccaccacgctctgaaacagagtgtcctgatggtcttctgtgtacctcaaccattccttttcattacaagagatacactcacttcctgctagctcaaagcagggctggtgatcatccttttagcagcccatcacctgcgtcaggtggcagtttcagtgagactaagtcaggcgtcctttgtagccttgaggaaagatggtcttcgtatcagaaccaaactgataactcggtttcaaatgatcccttattgatgacacagtattttaaaaagtctccgtctctgactgaagccagtgaaaagatttctactcatatccaaacatcccaacaagctctacaatttacagattttgttgagaatgacaaactagtgggagttgctttgcgtcttgcaaacaactcagaacacataaatttgccattgccagaaaatgacttcagtgactgtgaaatctcctattctccacttcaaagtgatgaagacactcatgatatcgatgaaaaaccgsatgattcacaagaacaactgttttttaccgaaagctcaaaagatggcagcctcgaagaagatgatgacagctgtggtttttttaaaaaacgacatggtcccttactgaaggaccaggatgagagctgccccaaagtgaacagcttcttaactcrggataagtatgatgaaggattgtatagattcaatagtctaaatgatttgtctcaacctatttctcaaaataatgagagtactttgccttatgatctggcatgtactggtggtgattttgtgttgtttccacctgcattggcagggaagcttgctgcttctgttcatcaggcaactaaagcaaaacctgatgagccagaatttcactcagctcaatcaaataaacagaaacaggtaattgaagaatcatctgtttacaatcaagtttctcttccgttagttaagagtttaatgttgaaaccttttgaaagtcaggtagaagrgtatctttcttcccaaccaacccaaaatacaattagaaaattatcaagtgagaacttgaatgctaagaataatactaactcagcatgtttctgcagaaaggcattagagggtgtgccagttggtaaagctacaattttaaatacagaaaacttgtctagtacacctgctccgaagtatttgaaaatattgccttctggtcttaagtataatgcaagacatccttctaccaaggtaatgaagcaaatggatataggtgtgtattttggactacctcccaaaagaaaggaagagaaattgctaggggaaagtgcattagaagggataaacttaaatccagttccaagtcctaatcaaaagaggtcctcgcagtgcaagaggaaagcagaaaaatctttaagtgatttagaatttgatgcaagtactttacatgagagtcagctttctgtggaactttctagtgagaggtcacagcgtcaaaaaaagagatgtagaaagtcaaattcactgcaggaaggagcgtgtcagaagagatcagatcaccttattaatacagaatctgaagcagtcaatttaagtaaagtcaaagtcttcacaaaatcagctcatggtgggctgcaaaggggcaacaagaaaatcccagagtcatctaatgtaggaggatcaagaaaaaagacatgtccattctataagaaaatacctggaaccggctttacagttgatgcctttcagtatggcgtggttgaaggttgcacagcctattttctcacacattttcattctgatcattatgctggattgtctaaacacttcacatttccagtttattgtagtgagataactggcaatttgttgaagaacaagcttcrtgtgcaagaacaatatattcacccattgccactggacactgaatgtattgtgaatggtgtcaaagttgttttgcttgatgccaatcactgtccaggtgctgtcatgatcctcttttatcttcctaatggtactgtcatattacacacgggagacttcagagcagatcccagcatggaacgttctcttcttgcggaccagaaagtccatatgctgtacttagataccacatattgtagcccagaatacacctttccatctcagcaagaggttatccggtttgccatcaacactgcctttgaggctgtaactctaaacccacatgctcttgttgtctgtggcacttactctattggaaaagagaaagtcttcctagccattgctgatgttttaggttcaaaagtgggcatgtcccaggaaaaatataaaactctacagtgcctcaatataccagaaattaattcactcatcactaccgacatgtgcagttcattggttcaccttctcccaatgatgcaaattaattttaagggcttacagagtcatttgaagaagtgtggtgggaaatacaatcagattttggcatttcgacctacaggatggacacactctaacaagttcactagaatagcagatgttattccccagaccaaaggaaacatttcaatatatggaattccttacagtgaacacagcagctacctagaaatgaagcgctttgtccagtggctgaagccccagaaaatcatacctastgtaaatgtgggcacctggaaatctaggagcacaatggagaaatattttagagagtggaaattggaagctggatattgatgatacctccgaggattcagtagtagttaagttccttggatgtagcttgttagtagttaaatctatagaaatgtgaaatacactttgtgtggaaaaacctcatgaagattgttcagatactttattttctcatttatgtttgaacaacatgttcgtggtgctgaatgcctctcagcatcatcaagrataactgaaactgggtctccctgggacccttaatttcttgtcccctgccctccatgggcagttatattctgcatcaagccttagaagaggaagcaaaggcagattcagggaccaaaaggattaatgataattaataaagtagtttgaagcattatatatataagtaattatgtgtctttaaaattatgagatgaaacttttatatgacgtgtatacttaaataaaattaatataaaatttgc

SEQ ID NO: 423 - DNA, 4469 bp, Homo sapiens
ggactctgagggctttttggagctcgctatgcttaacctggagatgattaaggccccgcttcctggcctcccagcctctaatgccaaaagataagggagaggctggcgtgtgaccccgttttgagtcaggtggacagagggctggccaccttcggaaccatgggtgcaatacggagtcagacctcaatacaagcccactctttcacatatttgaacttttttcacatatcaactttttttgttcactgcgcagggattgttcattgctgctggaggaagatcatggactgtcgcgggaaactgaagtggttgagtatccactagtcgtggatgagggcagtgacttcgcagttttttgcgaattacacatctctttgattatgttgtgactagttttgttagatagtcatttagtgtttgggatacctgttaagccctttgtccagggactgtggttggatttatgaattatttggacggttgtccacttgaaagaactgacagtagcttcataacaatgttacaaatctcgttctaagattaagctgttgaacctatatttgccattagcgcttaatttttgaagtattatttttatgaatcaagccctggaaaaggacaagatatttgaatgaaatagcacccataatggagaacttcacagttgctactcctgtgataggtttatcttagtttcattgtggtataaatggaatagcaggtgttgtcaggtacaaggtttgtagcttgccaatatgttcattaccaacactgcagattcccattgagttggtgggggttttgttacctttgttttttttctcagcaaaataattctataactttttgtttgtgacaagaaatggactttcagtttacttaagattaatacttcttgaatgataaaatcattttgccatgttagaagacatttccgaagaagacatttgggaatacaaatctaaaagaaaaccaaaacgagttgatccaaataatggctctaaaaatattctaaaatctgttgaaaaagcaacagatggaaaataccagtcaaaacggagtagaaacagaaaaagagccgcagaagctraagaggtgaaggaccatgaagtgccccttggaaatgcaggttgtcagacttctgttgcttctagtcagaattcaagttgtggagatggtattcagcagacccragacaaggaaactactccaggaaaactctgtagaactcaaaaaagccaacacgtgtccccaaagatacgtccagtttatgatggatactgtccaaattgccagatgcctttttcctcattgatagggcagacacctcgatggcatgtttttgaatgtttggattctccaccacgctctgaaacagagtgtcctgatggtcttctgtgtacctcaaccattccttttcattacaagagatacactcacttcctgctagctcaaagcagggctggtgatcatccttttagcagcccatcacctgcgtcaggtggcagtttcagtgagactaagtcaggcgtcctttgtagccttgaggaaagatggtcttcgtatcagaaccaaactgataactcggtttcaaatgatcccttattgatgacacagtattttaaaaagtctccgtctctgactgaagccagtgaaaagatttctactcatatccaaacatcccaacaagctctacaatttacagattttgttgagaatgacaaactagtgggagttgctttgcgtcttgcaaacaactcagaacacataaatttgccattgccagaaaatgacttcagtgactgtgaaatctcctattctccacttcaaagtgatgaagacactcatgatatcgatgaaaaaccgsatgattcacaagaacaactgttttttaccgaaagctcaaaagatggcagcctcgaagaagatgatgacagctgtggtttttttaaaaaacgacatggtcccttactgaaggaccaggatgagagctgccccaaagtgaacagcttcttaactcrggataagtatgatgaaggattgtatagattcaatagtctaaatgatttgtctcaacctatttctcaaaataatgagagtactttgccttatgatctggcatgtactggtggtgattttgtgttgtttccacctgcattggcagggaagcttgctgcttctgttcatcaggcaactaaagcaaaacctgatgagccagaatttcactcagctcaatcaaataaacagaaacaggtaattgaagaatcatctgtttacaatcaagtttctcttccgttagttaagagtttaatgttgaaaccttttgaaagtcaggtagaagrgtatctttcttcccaaccaacccaaaatacaattagaaaattatcaagtgagaacttgaatgctaagaataatactaactcagcatgtttctgcagaaaggcattagagggtgtgccagttggtaaagctacaattttaaatacagaaaacttgtctagtacacctgctccgaagtatttgaaaatattgccttctggtcttaagtataatgcaagacatccttctaccaaggtaatgaagcaaatggatataggtgtgtattttggactacctcccaaaagaaaggaagagaaattgctaggggaaagtgcattagaagggataaacttaaatccagttccaagtcctaatcaaaagaggtcctcgcagtgcaagaggaaagcagaaaaatctttaagtgatttagaatttgatgcaagtactttacatgagagtcagctttctgtggaactttctagtgagaggtcacagcgtcaaaaaaagagatgtagaaagtcaaattcactgcaggaaggagcgtgtcagaagagatcagatcaccttattaatacagaatctgaagcagtcaatttaagtaaagtcaaagtcttcacaaaatcagctcatggtgggctgcaaaggggcaacaagaaaatcccagagtcatctaatgtaggaggatcaagaaaaaagacatgtccattctataagaaaatacctggaaccggctttacagttgatgcctttcagtatggcgtggttgaaggttgcacagcctattttctcacacattttcattctgatcattatgctggattgtctaaacacttcacatttccagtttattgtagtgagataactggcaatttgttgaagaacaagcttcrtgtgcaagaacaatatattcacccattgccactggacactgaatgtattgtgaatggtgtcaaagttgttttgcttgatgccaatcactgtccaggtgctgtcatgatcctcttttatcttcctaatggtactgtcatattacacacgggagacttcagagcagatcccagcatggaacgttctcttcttgcggaccagaaagtccatatgctgtacttagataccacatattgtagcccagaatacacctttccatctcagcaagaggttatccggtttgccatcaacactgcctttgaggctgtaactctaaacccacatgctcttgttgtctgtggcacttactctattggaaaagagaaagtcttcctagccattgctgatgttttaggttcaaaagtgggcatgtcccaggaaaaatataaaactctacagtgcctcaatataccagaaattaattcactcatcactaccgacatgtgcagttcattggttcaccttctcccaatgatgcaaattaattttaagggcttacagagtcatttgaagaagtgtggtgggaaatacaatcagattttggcatttcgacctacaggatggacacactctaacaagttcactagaatagcagatgttattccccagaccaaaggaaacatttcaatatatggaattccttacagtgaacacagcagctacctagaaatgaagcgctttgtccagtggctgaagccccagaaaatcatacctastgtaaatgtgggcacctggaaatctaggagcacaatggagaaatattttagagagtggaaattggaagctggatattgatgatacctccgaggattcagtagtagttaagttccttggatgtagcttgttagtagttaaatctatagaaatgtgaaatacactttgtgtggaaaaacctcatgaagattgttcagatactttattttctcatttatgtttgaacaacatgttcgtggtgctgaatgcctctcagcatcatcaagrataactgaaactgggtctccctgggacccttaatttcttgtcccctgccctccatgggcagttatattctgcatcaagccttagaagaggaagcaaaggcagattcagggaccaaaaggattaatgataattaataaagtagtttgaagcattatatatataagtaattatgtgtctttaaaattatgagatgaaacttttatatgacgtgtatacttaaataaaattaatataaaatttgc

SEQ ID NO: 424 - DNA, 2894 bp, Homo sapiens
gcggccgcatcgggagcccggcggaaacatggcggcgcccggaggccggggccgcagcctctccggcctgctccccgcgcagacctcgctagagtacgccctgctcgacgccgttacccagcaggagaaggacagcytggtctaccagtatctgcagaaggtggacggctgggagcaggacttgtcagtacccgagtttccggaaggattagaatggctgaacacagaagaacctatttctgtctacaaggatctatgtggaaaaatagtcgtccttgatttcttcacctactgctgcataaactgtattcacctattgcctgatctccatgcattagaacacacatactctgataaagatggtcttcttattattggtgttcactcggctaagtttccaaatgaaaaagtcctggataacattaagagtgctgttcttcgatacaacatcacccaccctatggttaatgatgcagatgccagcctttggcaagaactagaagtttcctgctggccaactctagtcatacttggacctcgtggaaacatgttgttttctttgattggagagggacacaaagataaattatttttatatacttcaattgctttaaagtattacaaagacagggggcagatcagagataataaaattggaataaaactctataaagattctttgccaccttcaccattgctatttcctggcaaagtaacagtagaccaagttactgatagattggtaatagcagacactggacatcatagaattttggtcgtttggaagaatggacaaattcaatatagcattggaggacccaaccctggaagaaaagatggaatattttcagaatcaacttttaattctccacagggtgtagccataatgaataatatcatatatgtggcagacactgaaaaccaccttataagaaagattgacctagaagctgagaaggtgagcactrtagctggtattggaattcaaggtacagataaagaaggtggagcaaaaggagaacaacaacccattagttccccttgggatgtagtttttggaacatcagaggtccaaagaggtgacattttatggatagccatggcagggactcatcagatatgggcactcctgctggactctggcaaactgccaaagaaaaatgagttaacaaaaggaacctgccttaggtttgctggaagtggaaatgaagagaatcgaaacaatgcctatcctcacaaggcaggttttgcccaaccttcaggcctttccttggcctctgaagatccctggagctgcttgtttgtagcagatagtgagagcagtacagtgagaaccgtttcactgaaagatggagcagtgaagcacctcgtaggaggagaaagagaccccatgattaaagttgtggatccaaaaacaaaaaactgtacaacattagcaggaactggagacacaaataatgttaccagttccagttttacagagtcaacttttaatgaaccaggaggcttgtgtattggagagaatggagaattattatatgtagcagacaccaataatcatcaaattaaagtgatggatttagaaactaaaatggtatctgtgctccccatcttcagatctgaaaatgctgtggtagatggcccgttcctagtagaaaaacagaagacattacccaaactacctaaatctgctccaagcattaggctttcccccgtgactgcgtgtgctggccagactcttcagttcaaactcagattagacctcccatcaggatcaaagctaactgaaggagtatccagttgctggtttctaacagctgaaggcaatgaatggctacttcaaggacagatagcagctggagatatagagaacatttccagtcaaccaacaatttcactacaaattcctgatgattgcttatcacttgaagccattgtatctgtcagtgtgtttctttattactgtagtgcagacagcagtgcttgtatgatgaaggcaattttgttcagtcagcctttacaaataacggatacacagcaaggttgcatagctccagtagagctcaggtatgtattttagccagccagctagctagcaacccattgccaccacctactgtctcccatcctgactatcactgtaatttaaggaaagaaaacttcagttctgcctctggataccaagatgcccattgctcagttcagacaactgatattaaaataaagctatgctccttacttacttcttttattataaacaaattcctttgctttggctgatactagctgagtcattgatcatcattggtaccatgatattgtaatctatgctgctatttggcacaagactgaagttcacactacagtagagaatactataagataatttgcaataaatactgataataataataccagatattttaactaactttttctacctttattaatagcaatcagcacacttgaatgtgtaaatttcacagtaactttaggcagaacttaagctccaggccacatttgtataagaacaccaagtattcaaggcataaagtctgttgtaagccaaaaaaaagtcttttcatcactgtagaagcttaaggagtacatcagtggtaaatacgatctttattctcttctgtggttttctcagttgagatatttttaaaagagagttttgatctatttttattataaattatttgttatttaacataccattatgaatgccttaaaactttgtacagataaagttggacatagaatctctaaggactgactcctttaactgtttttgagtgactacattaccagataatgaatgagtccccagaaatattatgactttcaaggaaaaagggactttaggacacattacttagtgtctgtgataa

SEQ ID NO: 425 - DNA, 1943 bp, Homo sapiens
gctctaactcccggagagcaatcagggagacggctccccggccagacttggctgatgttttcttgtttctgtttcagccttcaggataattccttcagcagcaccactgtaacagagcctgagagaaggggagagaggtgtgccaaagtgtgcatctgcaggccgaagatgaggcctggacttcctgctccaggtgcacaggtgtgacgaagatccagtctctctacatgaagaccagactgattgctccagtctcagagatgaaaacaataaagagaactaccccgacgcaggggctctggtagaagagcacgcgccgccctcttgggagccgcagcagcagaatgtagaggcgaccgtgctggtggacagcgtattgcgacccagcatgggcaacttcaagtccaggaagcccaagtccatcttcaaagcggagagcgggaggagccacggagaaagtcaggagacagagcatgtggtatccagccagtcagagtgtcaggtgagagcaggaacaccagctcatgagagtccacaaaacaatgccttcaagtgccaagaaacagtgcgacttcaaccaagaatagaccagaggactgccatttcgccaaaggatgcttttgaaactcggcaggacttaaatgaggaagaagctgctcaggtgcatggagtcaaggacccggcgccagcatcaacccagagcgtgcttgccgatgggacagattctgcagacccctcaccagtccacaaagatgggcagaatgaggccgacagtgcaccagaagacctccactctgtggggaccagcaggctgctctatcacatcactgatggtgataacccactgctgtcgccacgatgctccatcttcagccaaagccagagattcaacttagaccccgagtcagccccatctccacccagcactcagcagtttatgatgccgcggagttcttcacgctgcagctgtggagatggcaaggagccacagaccatcacccagctcaccaagcacatccagagcctcaagcggaaaattcggaaatttgaagaaaaatttgaacaagaaaagaaataccggccttcacatggtgacaagacttctaatcctgaagtcctgaaatggatgaatgatttggctaaaggtcgtaaacagctcaaagaactaaagctaaagctgtcagaagaacaagggagtgctcccaaaggtccacctagaaacctgttgtgtgagcaacccacagtccccagagaaaatgggaaaccggaagctgcgggcccggagccaagctcctctggagaagagactccagatgctgccttgacatgcctgaaggagagaagagagcaacttcctccccaggaggattctaaggtaactaagcaagacaagaacctcataaagccgctttatgaccgatacagaattatcaagcaaatcttgtcaacaccttcccttattccaacaattgaggaagaggactctgatgaagaccgtccacagggaagccaacaaccttctttggcagatccagcatctcaccttcctgttggtgaccacctcacctactctaatgagactgagcctgttagggcccttttaccagatgaaaagaaagaagtaaaaccaccagctctctccatgtctaatttacatgaggctaccatgcctgtacttcttgaccatctccgagaaactagggctgacaagaagagactgcggaaagccttaagagaatttgaagaacagttttttaaacaaacaggaaggtatgtgtcrgcagagagatttttaaagctaatacttcctagagaattgctgttaaaaatgagctgcaattttttgcaggaacggtgactttttacaaaatgtatataatttccacactggcttagactcaggatttgtccaatgcaacattctaatagtgccagtattaggg

SEQ ID NO: 426 - DNA, 4120 bp, Homo sapiens
gtggctggcacaaagagcccaagattaaacgcggcgcctgggctggcgaggtcggggtcgtgtggtaactctccaggtgctcctcgctggatcccggggtcccagccccgccgccgcgccccgcccagctctgtccccgcagcctcgcgggctgccgggctttgtggttcgcccgtgccgctgggcccctgctgggggtgtcgttacgagcatgtgcagacagcagcccaaggtagagcgagcgtgccgggcgagcccggagacttgccttgcaatgccatgtttgtgtatgtgctctaactcccggagagcaatcagggagacggctccccggccagacttggctgatgttttcttgtttctgtttcagccttcaggataattccttcagcagcaccactgtaacagagtgtgacgaagatccagtctctctacatgaagaccagactgattgctccagtctcagagatgaaaacaataaagagaactaccccgacgcaggggctctggtagaagagcacgcgccgccctcttgggagccgcagcagcagaatgtagaggcgaccgtgctggtggacagcgtattgcgacccagcatgggcaacttcaagtccaggaagcccaagtccatcttcaaagcggagagcgggaggagccacggagaaagtcaggagacagagcatgtggtatccagccagtcagagtgtcaggtgagagcaggaacaccagctcatgagagtccacaaaacaatgccttcaagtgccaagaaacagtgcgacttcaaccaagaatagaccagaggactgccatttcgccaaaggatgcttttgaaactcggcaggacttaaatgagaattccttgctgaagctgcaagccctygaatctgatctgtgctctgcatttttaacaaaccaggaagaagctgctcaggtgcatggagtcaaggacccggcgccagcatcaacccagagcgtgcttgccgatgggacagattctgcagacccctcaccagtccacaaagatgggcagaatgaggccgacagtgcaccagaagacctccactctgtggggaccagcaggctgctctatcacatcactgatggtgataacccactgctgtcgccacgatgctccatcttcagccaaagccagagattcaacttagaccccgagtcagccccatctccacccagcactcagcagtttatgatgccgcggagttcttcacgctgcagctgtggagatggcaaggagccacagaccatcacccagctcaccaagcacatccagagcctcaagcggaaaattcggaaatttgaagaaaaatttgaacaagaaaagaaataccgggtaactaagcaagacaagaacctcataaagccgctttatgaccgatacagaattatcaagcaaatcttgtcaacaccttcccttattccaacaattgaggaagaggactctgatgaagaccgtccacagggaagccaacaaccttctttggcagatccagcatctcaccttcctgttggtgaccacctcacctactctaatgagactgagcctgttagggcccttttaccagatgaaaagaaagaagtaaaaccaccagctctctccatgtctaatttacatgaggctaccatgcctgtacttcttgaccatctccgagaaactagggctgacaagaagagactgcggaaagccttaagagaatttgaagaacagttttttaaacaaacaggaagaagtccacaaaaggaagataggataccaatggcagatgagtattatgaatataagcacataaaagccaaactgagactattagaggtcctcatcagcaagcaagatgtggccaaaactatttgaggttcaggaaatgttatgatcactttcacccatgatataaagtaaagtttattttcctctgccatccttgctaagtagttttgacacaatgaaaatggaagcactttagtggtagtattagctgtttttaagaaggaatagcaagtttaattatatacaaggagaagggatttaaacggggggaagaatacaacaggtagccatataattgggaaaaaattcagtgtcctccatgccaagcagaaaactcatagtcaatacaagtatttttaaaaatgtctaatattttatcaaatctaaataacatagctaggacacttgttagggaaagtttatttagtatccaaagactgtttatgttgatgtatggaaaagagcatgattttaaaaaatcaatcataggaggaaaagaaattcgcttttcaagtaggaaggaatacagctagcaagaaagcaatttatttgaaacttctaatggatttttgagtgataaaacatttactaccttgtcctttaagtctgctaggctctcagtaccctaaaataaactagattgtgttgctattttttttctttctctataaaaataacacattattttatccgttatttgaaattttacatttctggttaccaaagttcattctgatagcatgtactttgtgaattattatctttgtctataactgacagatgtttatattaaaataaaatattgtattaaaaatttaaaataggtattttggatagatatgtgtctgtagtatataatctaatgtgtccatagtattattgctaatcttttggtttactataagatgatataactattttttcattgggaatatacatttttcttaatgttccaacatctatactttgtaaagtcaaaacatttcccatgagctgtagttattcatccttctgtacaaaatgaaaagtttggaaattgtttgccctgataycttgaaaaagaagccagaatatttatttgcttcatcaacttcagtgtatatcattttgtgttattttatacgaaaacatgtttattattttcatttttgtaaaaggaagtaaaaggtcaacattttctctcatgtaccaaccttgtttgtatttctattttctgtaatgtttaagtatgatgttgaagaaattcacattctcttatagtttggatgggaagactattgactatttcagaaacagacttatttcagaggcttattgttttctctgtatttacctaatattttataacttttatgaatcagaataatgtccttcataaatttgtttaattgaagtcatctacttctaacaggacagatacacaactatttgaggtttacaaattacatctttgataagggaaatggtttcgtgacatgtacacagttgctattaaaatgtaactctatatattctatatgattgtaaatattttatacaacaatacaaataaaatatttttctattatatttattatgttgaaacacagtagttgtttcctgttagctaatataaataacataaataacactgtcaaacaagaagttggaagtgctgacaattctaggcttcaagatttaactcatgctgcaattacaccctttcatgcggtttggagttatcccaatatttgttcagtagattaaaatgaatgcatatttaaacaccatttataagccattattgtgtactttgctaaagcagtctatataactgttttgttatgtttggcataaaggaaacataaaaacattgcagcatctaggcaataaagtgtcaaaaggagaacttaacttagggtatttcatcattgaaagtagtgggaggggtagggaataggaaaacactaaaatggttctgaatgaaatttggaaagtggtagttgtttgttttggtgacagtggcatgtgcatgcttcagtggaaaacatctggtgataaaaatggacaacagaggaccaatgctcctaagggaggaaaaggggctgagtaagaataagaaaagtgggcattaacgtccaacactgatattacaggttttgcagctgggatctttctttgcatttgcagtagacaaactcatgagctgatgaccagtgatttctgccacggtgcccasagaaagatccacagggtcagtgtaaatgacttctaaaatgacatcctgggcatggtggtaaaccagcaccccatcttcttctgtacaggtcaaaaatttattatccttagaatttagt

SEQ ID NO: 427 - DNA, 4414 bp, Homo sapiens
gtggctggcacaaagagcccaagattaaacgcggcgcctgggctggcgaggtcggggtcgtgtggtaactctccaggtgctcctcgctggatcccggggtcccagccccgccgccgcgccccgcccagctctgtccccgcagcctcgcgggctgccgggctttgtggttcgcccgtgccgctgggcccctgctgggggtgtcgttacgagcatgtgcagacagcagcccaaggtagagcgagcgtgccgggcgagcccggagacttgccttgcaatgccatgtttgtgtatgtgctctaactcccggagagcaatcagggagacggctccccggccagacttggctgatgttttcttgtttctgtttcagccttcaggataattccttcagcagcaccactgtaacagagtgtgacgaagatccagtctctctacatgaagaccagactgattgctccagtctcagagatgaaaacaataaagagaactaccccgacgcaggggctctggtagaagagcacgcgccgccctcttgggagccgcagcagcagaatgtagaggcgaccgtgctggtggacagcgtattgcgacccagcatgggcaacttcaagtccaggaagcccaagtccatcttcaaagcggagagcgggaggagccacggagaaagtcaggagacagagcatgtggtatccagccagtcagagtgtcaggtgagagcaggaacaccagctcatgagagtccacaaaacaatgccttcaagtgccaagaaacagtgcgacttcaaccaagaatagaccagaggactgccatttcgccaaaggatgcttttgaaactcggcaggacttaaatgagaattccttgctgaagctgcaagccctygaatctgatctgtgctctgcatttttaacaaaccaggaagaagctgctcaggtgcatggagtcaaggacccggcgccagcatcaacccagagcgtgcttgccgatgggacagattctgcagacccctcaccagtccacaaagatgggcagaatgaggccgacagtgcaccagaagacctccactctgtggggaccagcaggctgctctatcacatcactgatggtgataacccactgctgtcgccacgatgctccatcttcagccaaagccagagattcaacttagaccccgagtcagccccatctccacccagcactcagcagtttatgatgccgcggagttcttcacgctgcagctgtggagatggcaaggagccacagaccatcacccagctcaccaagcacatccagagcctcaagcggaaaattcggaaatttgaagaaaaatttgaacaagaaaagaaataccggccttcacatggtgacaagacttctaatcctgaagtcctgaaatggatgaatgatttggctaaaggtcgtaaacagctcaaagaactaaagctaaagctgtcagaagaacaagggagtgctcccaaaggtccacctagaaacctgttgtgtgagcaacccacagtccccagagaaaatgggaaaccggaagctgcgggcccggagccaagctcctctggagaagagactccagatgctgccttgacatgcctgaaggagagaagagagcaacttcctccccaggaggattctaaggtaactaagcaagacaagaacctcataaagccgctttatgaccgatacagaattatcaagcaaatcttgtcaacaccttcccttattccaacaattgaggaagaggactctgatgaagaccgtccacagggaagccaacaaccttctttggcagatccagcatctcaccttcctgttggtgaccacctcacctactctaatgagactgagcctgttagggcccttttaccagatgaaaagaaagaagtaaaaccaccagctctctccatgtctaatttacatgaggctaccatgcctgtacttcttgaccatctccgagaaactagggctgacaagaagagactgcggaaagccttaagagaatttgaagaacagttttttaaacaaacaggaagaagtccacaaaaggaagataggataccaatggcagatgagtattatgaatataagcacataaaagccaaactgagactattagaggtcctcatcagcaagcaagatgtggccaaaactatttgaggttcaggaaatgttatgatcactttcacccatgatataaagtaaagtttattttcctctgccatccttgctaagtagttttgacacaatgaaaatggaagcactttagtggtagtattagctgtttttaagaaggaatagcaagtttaattatatacaaggagaagggatttaaacggggggaagaatacaacaggtagccatataattgggaaaaaattcagtgtcctccatgccaagcagaaaactcatagtcaatacaagtatttttaaaaatgtctaatattttatcaaatctaaataacatagctaggacacttgttagggaaagtttatttagtatccaaagactgtttatgttgatgtatggaaaagagcatgattttaaaaaatcaatcataggaggaaaagaaattcgcttttcaagtaggaaggaatacagctagcaagaaagcaatttatttgaaacttctaatggatttttgagtgataaaacatttactaccttgtcctttaagtctgctaggctctcagtaccctaaaataaactagattgtgttgctattttttttctttctctataaaaataacacattattttatccgttatttgaaattttacatttctggttaccaaagttcattctgatagcatgtactttgtgaattattatctttgtctataactgacagatgtttatattaaaataaaatattgtattaaaaatttaaaataggtattttggatagatatgtgtctgtagtatataatctaatgtgtccatagtattattgctaatcttttggtttactataagatgatataactattttttcattgggaatatacatttttcttaatgttccaacatctatactttgtaaagtcaaaacatttcccatgagctgtagttattcatccttctgtacaaaatgaaaagtttggaaattgtttgccctgataycttgaaaaagaagccagaatatttatttgcttcatcaacttcagtgtatatcattttgtgttattttatacgaaaacatgtttattattttcatttttgtaaaaggaagtaaaaggtcaacattttctctcatgtaccaaccttgtttgtatttctattttctgtaatgtttaagtatgatgttgaagaaattcacattctcttatagtttggatgggaagactattgactatttcagaaacagacttatttcagaggcttattgttttctctgtatttacctaatattttataacttttatgaatcagaataatgtccttcataaatttgtttaattgaagtcatctacttctaacaggacagatacacaactatttgaggtttacaaattacatctttgataagggaaatggtttcgtgacatgtacacagttgctattaaaatgtaactctatatattctatatgattgtaaatattttatacaacaatacaaataaaatatttttctattatatttattatgttgaaacacagtagttgtttcctgttagctaatataaataacataaataacactgtcaaacaagaagttggaagtgctgacaattctaggcttcaagatttaactcatgctgcaattacaccctttcatgcggtttggagttatcccaatatttgttcagtagattaaaatgaatgcatatttaaacaccatttataagccattattgtgtactttgctaaagcagtctatataactgttttgttatgtttggcataaaggaaacataaaaacattgcagcatctaggcaataaagtgtcaaaaggagaacttaacttagggtatttcatcattgaaagtagtgggaggggtagggaataggaaaacactaaaatggttctgaatgaaatttggaaagtggtagttgtttgttttggtgacagtggcatgtgcatgcttcagtggaaaacatctggtgataaaaatggacaacagaggaccaatgctcctaagggaggaaaaggggctgagtaagaataagaaaagtgggcattaacgtccaacactgatattacaggttttgcagctgggatctttctttgcatttgcagtagacaaactcatgagctgatgaccagtgatttctgccacggtgcccasagaaagatccacagggtcagtgtaaatgacttctaaaatgacatcctgggcatggtggtaaaccagcaccccatcttcttctgtacaggtcaaaaatttattatccttagaatttagt

SEQ ID NO: 428 - DNA, 1721 bp, Homo sapiens
gtggctggcacaaagagcccaagattaaacgcggcgcctgggctggcgaggtcggggtcgtgtggtaactctccaggtgctcctcgctggatcccggggtcccagccccgccgccgcgccccgcccagctctgtccccgcagcctcgcgggctgccgggctttgtggttcgcccgtgccgctgggcccctgctgggggtgtcgttacgagcatgtgcagacagcagcccaaggtagagcgagcgtgccgggcgagcccggagacttgccttgcaatgccatgtttgtgtatgtgctctaactcccggagagcaatcagggagacggctccccggccagacttggctgatgttttcttgtttctgtttcagccttcaggataattccttcagcagcaccactgtaacagagtgtgacgaagatccagtctctctacatgaagaccagactgattgctccagtctcagagatgaaaacaataaagagaactaccccgacgcaggggctctggtagaagagcacgcgccgccctcttgggagccgcagcagcagaatgtagaggcgaccgtgctggtggacagcgtattgcgacccagcatgggcaacttcaagtccaggaagcccaagtccatcttcaaagcggagagcgggaggagccacggagaaagtcaggagacagagcatgtggtatccagccagtcagagtgtcaggtgagagcaggaacaccagctcatgagagtccacaaaacaatgccttcaagtgccaagaaacagtgcgacttcaaccaagaatagaccagaggactgccatttcgccaaaggatgcttttgaaactcggcaggacttaaatgaggaagaagctgctcaggtgcatggagtcaaggacccggcgccagcatcaacccagagcgtgcttgccgatgggacagattctgcagacccctcaccagtccacaaagatgggcagaatgaggccgacagtgcaccagaagacctccactctgtggggaccagcaggctgctctatcacatcactgatggtgataacccactgctgtcgccacgatgctccatcttcagccaaagccagagattcaacttagaccccgagtcagccccatctccacccagcactcagcagtttatgatgccgcggagttcttcacgctgcagctgtggagatggcaaggagccacagaccatcacccagctcaccaagcacatccagagcctcaagcggaaaattcggaaatttgaagaaaaatttgaacaagaaaagaaataccggccttcacatggtgacaagacttctaatcctgaagtcctgaaatggatgaatgatttggctaaaggtcgtaaacagctcaaagaactaaagctaaagctgtcagaagaacaagggagtgctcccaaaggtccacctagaaacctgttgtgtgagcaacccacagtccccagagaaaatgggaaaccggaagctgcgggcccggagccaagctcctctggagaagagactccagatgctgccttgacatgcctgaaggagagaagagagcaacttcctccccaggaggattctaaggtaactaagcaagacaagaacctcataaagccgctttatgaccgatacagaattatcaagcaaatcttgtcaacaccttcccttattccaacaattgtaagtcaggatacttgcatgctgttactttgtactgatgtg

SEQ ID NO: 429 - DNA, 3770 bp, Homo sapiens
gtggctggcacaaagagcccaagattaaacgcggcgcctgggctggcgaggtcggggtcgtgtggtaactctccaggtgctcctcgctggatcccggggtcccagccccgccgccgcgccccgcccagctctgtccccgcagcctcgcgggctgccgggctttgtggttcgcccgtgccgctgggcccctgctgggggtgtcgttacgagcatgtgcagacagcagcccaaggtagagcgagcgtgccgggcgagcccggagacttgccttgcaatgccatgtttgtgtatgtgctctaactcccggagagcaatcagggagacggctccccggccagacttggctgatgttttcttgtttctgtttcagccttcaggataattccttcagcagcaccactgtaacagagtgtgacgaagatccagtctctctacatgaagaccagactgattgctccagtctcagagatgaaaacaataaagagaactaccccgacgcaggggctctggtagaagagcacgcgccgccctcttgggagccgcagcagcagaatgtagaggcgaccgtgctggtggacagcgtattgcgacccagcatgggcaacttcaagtccaggaagcccaagtccatcttcaaagcggagagcgggaggagccacggagaaagtcaggagacagagcatgtggtatccagccagtcagagtgtcaggtgagagcaggaacaccagctcatgagagtccacaaaacaatgccttcaagtgccaagaaacagtgcgacttcaaccaagaatagaccagaggactgccatttcgccaaaggatgcttttgaaactcggcaggacttaaatgagaattccttgctgaagctgcaagccctygaatctgatctgtgctctgcatttttaacaaaccaggaagaagctgctcaggtgcatggagtcaaggacccggcgccagcatcaacccagagcgtgcttgccgatgggacagattctgcaggtaactaagcaagacaagaacctcataaagccgctttatgaccgatacagaattatcaagcaaatcttgtcaacaccttcccttattccaacaattgaggaagaggactctgatgaagaccgtccacagggaagccaacaaccttctttggcagatccagcatctcaccttcctgttggtgaccacctcacctactctaatgagactgagcctgttagggcccttttaccagatgaaaagaaagaagtaaaaccaccagctctctccatgtctaatttacatgaggctaccatgcctgtacttcttgaccatctccgagaaactagggctgacaagaagagactgcggaaagccttaagagaatttgaagaacagttttttaaacaaacaggaagaagtccacaaaaggaagataggataccaatggcagatgagtattatgaatataagcacataaaagccaaactgagactattagaggtcctcatcagcaagcaagatgtggccaaaactatttgaggttcaggaaatgttatgatcactttcacccatgatataaagtaaagtttattttcctctgccatccttgctaagtagttttgacacaatgaaaatggaagcactttagtggtagtattagctgtttttaagaaggaatagcaagtttaattatatacaaggagaagggatttaaacggggggaagaatacaacaggtagccatataattgggaaaaaattcagtgtcctccatgccaagcagaaaactcatagtcaatacaagtatttttaaaaatgtctaatattttatcaaatctaaataacatagctaggacacttgttagggaaagtttatttagtatccaaagactgtttatgttgatgtatggaaaagagcatgattttaaaaaatcaatcataggaggaaaagaaattcgcttttcaagtaggaaggaatacagctagcaagaaagcaatttatttgaaacttctaatggatttttgagtgataaaacatttactaccttgtcctttaagtctgctaggctctcagtaccctaaaataaactagattgtgttgctattttttttctttctctataaaaataacacattattttatccgttatttgaaattttacatttctggttaccaaagttcattctgatagcatgtactttgtgaattattatctttgtctataactgacagatgtttatattaaaataaaatattgtattaaaaatttaaaataggtattttggatagatatgtgtctgtagtatataatctaatgtgtccatagtattattgctaatcttttggtttactataagatgatataactattttttcattgggaatatacatttttcttaatgttccaacatctatactttgtaaagtcaaaacatttcccatgagctgtagttattcatccttctgtacaaaatgaaaagtttggaaattgtttgccctgataycttgaaaaagaagccagaatatttatttgcttcatcaacttcagtgtatatcattttgtgttattttatacgaaaacatgtttattattttcatttttgtaaaaggaagtaaaaggtcaacattttctctcatgtaccaaccttgtttgtatttctattttctgtaatgtttaagtatgatgttgaagaaattcacattctcttatagtttggatgggaagactattgactatttcagaaacagacttatttcagaggcttattgttttctctgtatttacctaatattttataacttttatgaatcagaataatgtccttcataaatttgtttaattgaagtcatctacttctaacaggacagatacacaactatttgaggtttacaaattacatctttgataagggaaatggtttcgtgacatgtacacagttgctattaaaatgtaactctatatattctatatgattgtaaatattttatacaacaatacaaataaaatatttttctattatatttattatgttgaaacacagtagttgtttcctgttagctaatataaataacataaataacactgtcaaacaagaagttggaagtgctgacaattctaggcttcaagatttaactcatgctgcaattacaccctttcatgcggtttggagttatcccaatatttgttcagtagattaaaatgaatgcatatttaaacaccatttataagccattattgtgtactttgctaaagcagtctatataactgttttgttatgtttggcataaaggaaacataaaaacattgcagcatctaggcaataaagtgtcaaaaggagaacttaacttagggtatttcatcattgaaagtagtgggaggggtagggaataggaaaacactaaaatggttctgaatgaaatttggaaagtggtagttgtttgttttggtgacagtggcatgtgcatgcttcagtggaaaacatctggtgataaaaatggacaacagaggaccaatgctcctaagggaggaaaaggggctgagtaagaataagaaaagtgggcattaacgtccaacactgatattacaggttttgcagctgggatctttctttgcatttgcagtagacaaactcatgagctgatgaccagtgatttctgccacggtgcccasagaaagatccacagggtcagtgtaaatgacttctaaaatgacatcctgggcatggtggtaaaccagcaccccatcttcttctgtacaggtcaaaaatttattatccttagaatttagt

SEQ ID NO: 430 - DNA, 3107 bp, Homo sapiens
tgctcggtctctcagagccgcacactccgcggagctcctgccacagccgtcgccttcgcggcggctctccagccccgcgcctcagcctcggcgccgcatcaccgcgtcccaggcctccttccctccctctgccactccccctccctttcccgctcttcttgcccacccggccggcagagagagcctggatacgaagcaggcgggcttcagagtgggttggaaaaatggaggtgccgcgcctggatcatgccctcaacagccccaccagcccctgtgaggaggtgatcaaaaacctcagcctggaggccattcagctgtgcgaccgggacgggaacaaatcacaagacagtggcatagcagagatggaagaacttcctgtaccacataacatcaaaataagcaatataacgtgtgactcattcaagatttcatgggaaatggattcaaaatcaaaggatcgcattacacactattttattgacctcaacaagaaagagaacaagaactccaataaatttaaacacaaggatgttcccacaaaattggtggcaaaagctgttcccttgcctatgactgtccgtggacactggtttttaagcccaagaactgaatatacagtagcagtgcagactgcctcaaaacaagttgatggtgattatgttgtgtctgaatggagtgaaattatagaattctgcaccgcagactattcaaaagttcatctaacacaattgttggagaaggctgaagtgattgcaggacgcatgcttaagttttctgttttttatcgtaatcagcacaaagaatattttgactatgttcgagaacatcatgggaatgctatgcagccatctgtcaaggataacagtggtagccatggctctcctatcagtggaaaattagaaggcatcttcttcagctgcagcactgaattcaatactggaaagccaccccaggattcaccttatggaagatacaggtttgagattgccgcagaaaaactttttaaccccaatactaacttatactttggggacttctactgtatgtacactgcttatcattatgtgattcttgttattgctcctgtgggatcaccaggagatgaattttgtaagcagcgccttcctcaactaaattctaaggataataaatttttgacctgtacagaagaagatggggtgctggtttaccaccatgcccaggatgtcattttagaagtcatttacactgaccctgtggatctttctstgggcaccgtggcagaaatcactggtcatcagctcatgagtttgtctactgcaaatgcaaagaaagatcccagctgcaaaacctgtaatatcagtgttggacgttaatgcccacttgttttcctattccctacccctcccactactttcaatgatgaaataccctaagttaagttctccttttgacactttattgcctagatgctgcaatgtttttatgtttcctttatgccaaacataacaaaacagttatatagactgctttagcaaagtacacaataatggcttataaatggtgtttaaatatgcattcattttaatctactgaacaaatattgggataactccaaaccgcatgaaagggtgtaattgcagcatgagttaaatcttgaagcctagaattgtcagcacttccaacttcttgtttgacagtgttatttatgttatttatattagctaacaggaaacaactactgtgtttcaacataataaatataatagaaaaatattttatttgtattgttgtataaaatatttacaatcatatagaatatatagagttacattttaatagcaactgtgtacatgtcacgaaaccatttcccttatcaaagatgtaatttgtaaacctcaaatagttgtgtatctgtcctgttagaagtagatgacttcaattaaacaaatttatgaaggacattattctgattcataaaagttataaaatattaggtaaatacagagaaaacaataagcctctgaaataagtctgtttctgaaatagtcaatagtcttcccatccaaactataagagaatgtgaatttcttcaacatcatacttaaacattacagaaaatagaaatacaaacaaggttggtacatgagagaaaatgttgaccttttacttccttttacaaaaatgaaaataataaacatgttttcgtataaaataacacaaaatgatatacactgaagttgatgaagcaaataaatattctggcttctttttcaagrtatcagggcaaacaatttccaaacttttcattttgtacagaaggatgaataactacagctcatgggaaatgttttgactttacaaagtatagatgttggaacattaagaaaaatgtatattcccaatgaaaaaatagttatatcatcttatagtaaaccaaaagattagcaataatactatggacacattagattatatactacagacacatatctatccaaaatacctattttaaatttttaatacaatattttattttaatataaacatctgtcagttatagacaaagataataattcacaaagtacatgctatcagaatgaactttggtaaccagaaatgtaaaatttcaaataacggataaaataatgtgttatttttatagagaaagaaaaaaaatagcaacacaatctagtttattttagggtactgagagcctagcagacttaaaggacaaggtagtaaatgttttatcactcaaaaatccattagaagtttcaaataaattgctttcttgctagctgtattccttcctacttgaaaagcgaatttcttttcctcctatgattgattttttaaaatcatgctcttttccatacatcaacataaacagtctttggatactaaataaactttccctaacaagtgtcctagctatgttatttagatttgataaaatattagacatttttaaaaatacttgtattgactatgagttttctgcttggcatggaggacactgaattttttcccaattatatggctacctgttgtattcttccccccgtttaaatcccttctccttgtatataattaaacttgctattccttcttaaaaacagctaata

SEQ ID NO: 431 - DNA, 2121 bp, Homo sapiens
cggccttcctcacccaccatgtctcggcagtcctccatcaccttccagtctggcagccgcaggggcttcagcaccacctcggccatcaccccggcagctggccgctcccgcttcagctctgtctctgtggccygctctgcagcagggagtgggggcctgggaaggatcagcagtgctggggccagctttggaagccgcagcctctacaacctggggggtgccaagcgggtctccatcaatgggtgtggcagcagctgccgaagtggctttggtggcagggccagcaacrggtttggagtcaacagtggatttggctatggrggtggagttggaggaggcttcagtggccccagcttccccgtgtgtscccctggaggcatccaagaggtcactgtcaaccagagtctcctgactcctcttcacctgcaaatcgaccccaccatccagcgggtgcgggccgaggagcgcgagcagatcaagaccctcaacaataagttcrcctccttcatcgacaaggtgaggttcttggagcagcagaacaaggtcctggagacyaagtgggccctcctgcaggagcagggctccaggactgtgaggcagaacctagagcccctctttgattcctataccagtgagctcygacrgcagctggaaagcatcaccaccgagaggggcaggcttgaagctgaactgaggaacatgcaggatgttgtggaagatttcaaagtcaggtacgaagatgraattaacaagcgcacagctgctgagaatgaatttgtagccctgaaaaaggacgtagatgctgcctatatgaacaaggtggagctggaagccaaggtcaaatctctgccygaggagatcaacttcatccactcagtctttgatgcagagctgtcccagttgcagacccaggtcggtgacacatccgtggtgctgtccatggacaacaaccgcaacctggacctggatagtatcatcgccgaggtcaaagcacaatacgaggacattgccaacygcagcygggcyraggctgagtcctggtaccagaccaagtacgaggagctgcaggtcaccgcaggcagacatggggatgaccttcgaaacaccaaacaagagrtctctgaaatgaaccgcatgatccagaggctgagagctgagattgacagcgtcaagaagcagtgytccagcttgcaaacggccattgctgatgcagagcagcggggagaactggctctcaaggatgcacgggccaagctggtggaccttgaggaggccctgcagaaggccaagcaggacayggctcggctcctgygtgagtaccaggagctgatgaacatcaagctggccctggacgtggagatcgccacctaccgcaagctgctggaaggcgaggagtgcaggttgagtggagagggagtttctccagttaacatttctgtggtcacctctactctttccagtggctatggamgcggcagcagcattggaggtggaaacctgggcctcggtgggggcagcggctactccttcaccaccagtggtgggcatagcctggrtgcaggcctgggaggttctggattcagtgccaccagcaaccrgggcttagggggcagtggttctagcgtcaagtttgtctccaccacatcctccagccagaagagctacacgcactaagagagccccatggctccctctaccctgccttgaggcctgtttgcagtcacacctggacaccagggtcctcctccttcctctctccttgtaaggtgcacctgtgctgctgggagcctggagtactggctatacccattcccaggcctaagccagcctctccctcctgacagtgcccagactgccagcagcacccgtctgttacacatgtgaaaccaaagcctgctctctccyaaggctctcattcagcctatcttgcgaggcccgggcagctggaaagtcctcctccagctccacctccctccctccctccagatgcagaggctggggagtctctcaatgccaggttgtcacccacctgtctcatagtgtttataagtggcctgctgggagtgagtgctccctctgttccctccctggaatgtgtctattaaatgcatgtgtcayctg

SEQ ID NO: 432 - DNA, 2121 bp, Homo sapiens
cggccttcctcacccaccatgtctcggcagtcctccatcaccttccagtctggcagccgcaggggcttcagcaccacctcggccatcaccccggcagctggccgctcccgcttcagctctgtctctgtggccygctctgcagcagggagtgggggcctgggaaggatcagcagtgctggggccagctttggaagccgcagcctctacaacctggggggtgccaagcgggtctccatcaatgggtgtggcagcagctgccgaagtggctttggtggcagggccagcaacrggtttggagtcaacagtggatttggctatggrggtggagttggaggaggcttcagtggccccagcttccccgtgtgtscccctggaggcatccaagaggtcactgtcaaccagagtctcctgactcctcttcacctgcaaatcgaccccaccatccagcgggtgcgggccgaggagcgcgagcagatcaagaccctcaacaataagttcrcctccttcatcgacaaggtgaggttcttggagcagcagaacaaggtcctggagacyaagtgggccctcctgcaggagcagggctccaggactgtgaggcagaacctagagcccctctttgattcctataccagtgagctcygacrgcagctggaaagcatcaccaccgagaggggcaggcttgaagctgaactgaggaacatgcaggatgttgtggaagatttcaaagtcaggtacgaagatgraattaacaagcgcacagctgctgagaatgaatttgtagccctgaaaaaggacgtagatgctgcctatatgaacaaggtggagctggaagccaaggtcaaatctctgccygaggagatcaacttcagccactcagtctttgatgcagagctgtcccagttgcagacccaggtcggtgacacatccgtggtgctgtccatggacaacaaccgcaacctggacctggatagtatcatcgccgaggtcaaagcacaatacgaggacattgccaacygcagcygggcyraggctgagtcctggtaccagaccaagtacgaggagctgcaggtcaccgcaggcagacatggggatgaccttcgaaacaccaaacaagagrtctctgaaatgaaccgcatgatccagaggctgagagctgagattgacagcgtcaagaagcagtgytccagcttgcaaacggccattgctgatgcagagcagcggggagaactggctctcaaggatgcacgggccaagctggtggaccttgaggaggccctgcagaaggccaagcaggacayggctcggctcctgygtgagtaccaggagctgatgaacatcaagctggccctggacgtggagatcgccacctaccgcaagctgctggaaggcgaggagtgcaggttgagtggagagggagtttctccagttaacatttctgtggtcacctctactctttccagtggctatggamgcggcagcagcattggaggtggaaacctgggcctcggtgggggcagcggctactccttcaccaccagtggtgggcatagcctggrtgcaggcctgggaggttctggattcagtgccaccagcaaccrgggcttagggggcagtggttctagcgtcaagtttgtctccaccacatcctccagccagaagagctacacgcactaagagagccccatggctccctctaccctgccttgaggcctgtttgcagtcacacctggacaccagggtcctcctccttcctctctccttgtaaggtgcacctgtgctgctgggagcctggagtactggctatacccattcccaggcctaagccagcctctccctcctgacagtgcccagactgccagcagcacccgtctgttacacatgtgaaaccaaagcctgctctctccyaaggctctcattcagcctatcttgcgaggcccgggcagctggaaagtcctcctccagctccacctccctccctccctccagatgcagaggctggggagtctctcaatgccaggttgtcacccacctgtctcatagtgtttataagtggcctgctgggagtgagtgctccctctgttccctccctggaatgtgtctattaaatgcatgtgtcacctg

SEQ ID NO: 433 - DNA, 1388 bp, Homo sapiens
atggcgagccaatcctgccacatcagctctggctgcggggtcaagaacttcagctcccgctctgccactgtgcccaagcctgggtatcacagctgtgtcagtgccatggcccatcatggggtcagccctggggggctaggctccaggcgcctcggaggctttggcagtcagagcctgtgtacggtggggtctccccggatcgcggtgagttgtagatggcccctacacagcaggggcaggtttggctactgggcagggggcctttgcaggcccagcccaccccgcatcacatctgttaccatcaacgagagcctcctcatgcccctcaacctagagatcgaccccaatgcccagtgtgtgaagcatgaggagaaggagcacatcaggtgtctcaacaagtttgctgccttcattgacaaggtgcgcttcctggagcagcagaacaaactgctggagaccaagctgcagttctaccagaaccgcgagtgctgcgagagcaacctggagcccctgttgcagggctacayggcgactctgcggcgggaggctgagtgcgtggaggccgacagtggcaggctggcctyagagctcaactgcacgcaggaggcgctggagggctacaagaagaagtatgaagaagagctggccctcagggccacagctgagaatgagttcatgatgctgaagaaggatgtaggctacacctatctgcacgagacggacctggaggccaaygtgagccgctgaaggaggagtcagtcttcctgcagtccctctacggggaggaaatctgcctccttcaatcacaaatctctgacacctccatggtggtgaagatggacaacagctgggagctcaacatggacttggttgtggcttagatcaaggctcagtatgatgatattgccagctgcagccgggtggaggctgagacctgataccaaaccaagtgcgaggaggtgaaggccacagtgayccaacagggtgagaacctccgcagaaccaaggatgagctcaacgagctgaactgcatgatccagaggctgacggcagaggtggagaacgacaagcagcagcgctgcaagctggaggctgcggtggcccaktctgagcagcagggtgaggcagccctcagcaatgcccactgcaagctggctgagctggaggacgccctgcagaaggccaagcaggacatggcctgcatgctcaagcagtaccaggaggtgatgaactccaagctgggcttggacgtggagatcgccacttatcgcaaactgctggagggygaggagatccggctgtgtgaaggcgtgggctcagtcaatatctgtaaccattcccagggtggtgtggtctgcggggacctggactccactgcctcctgtggc

SEQ ID NO: 434 - protein, 499 aa, Homo sapiens [sequence omitted]

SEQ ID NO: 435 - protein, 499 aa, Homo sapiens [sequence omitted]

SEQ ID NO: 436 - protein, 499 aa, Homo sapiens [sequence omitted]

SEQ ID NO: 437 - protein, 555 aa, Homo sapiens
MESTPFSGVANQIHTLCERPTYGEVKDGALDVKRQHKCPGPTSGPSPGTNLSGCIRMNDDPSMEENGVERVCPESLLQSRGYSSLPLPRHTSSTDGTITSSDPGLEILNMASCDLDRNSLCKKEEDTRSASPTIEAQGTSPAHDNIAFQDSTSKDKTILNLEAKEEPETIEEHKKEHASGDSVVSPLPVTTVKSVNVRQSENTSANEKEVEAEFLRLSLGFKCDWFTLEKRVKLEERSRDWAEENLKKEITNSLKLLESLTPLCEDDNQAQEIIKKLEKSIKFLSQCAARVASRAEMLGAINQESRVSKAVEVMIQHVENLKRMYAKEHAELEELKQVLLQNERSFNPLEDDDDCQIKKRSASLNSKPSSLRRVTIASLPRNIGNAGMVAGMENNDRFSRRSSSWRILGSKQSEHRPSLPRFISTYSWADAEEEKCELKTKDDSEPSGEETVERTRKPSLSEKKNNPSKWDVSSVYDTIASWATNLKSSIRKANKALWLSIAFIVLFAALMSFLTGQLFQKSVDAAPTQQEDSWTSLEHILWPFTRLRHNGPPPV

SEQ ID NO: 438 - protein, 1999 aa, Homo sapiens
MKVWCLMRAQASMPPPTQQPQPPTQAAPLHPYKCTMCNYSTTTLKGLRVHQQHKHSFCDNLPKFEGQPSSLPLENETDSHPSSSNTVKKSQTSILGLSSKNNFVAKASRKLANDFPLDLSPVKKRTRIDEIASNLQSKINQTKQQEDAVINVEDDEEEEEDNEVEIEVELDREEEPTEPIIEVPTSFSAQQIWVRDTSEPQKEPNFRNITHDYNATNGAEIELTLSEDEEDYYGSSTNLKDHQVSNTALLNTQTPIYGTEHNSENTDFGDSGRLYYCKHCDFNNKSARSVSTHYQRMHPYIKFSFRYILDPNDHSAVYRCLECYIDYTNFEDLQQHYGEHHPEAMNVLNFDHSDLIYRCRFCSYTSPNVRSLMPHYQRMHPTVKINNAMIFSSYVVEQQEGLNTESQTLREILNSAPKNMATSTPVARGGGLPATFNKNTPKTFTPECENQKDPLVNTVVVYDCDVCSFASPNMHSVLVHYQKKHPEEKASYFRIQKTMRMVSVDRGSALSQLSFEVGAPMSPKMSNMGSPPPPQPPPPDLSTELYYCKHCSYSNRSVVGVLVHYQKRHPEIKVTAKYIRQAPPTAAMMRGVEGPQGSPRPPAPIQQLNRSSSERDGPPVENEMFFCQHCDYGNRTVKGVLIHYQKKHRDFKANADVIRQHTATIRSLCDRNQKKPASCVLVSPSNLERDKTKLRALKCRQCSYTSPYFYALRKHIKKDHPALKATVTSIMRWAFLDGLIEAGYHCEWCIYSHTEPNGLLLHYQRRHPEHYVDYTYMATKLWAGPDPSPPSLTMPAEAKTYRCRDCVFEAVSIWDITNHYQAFHPWAMNGDESVLLDIIKEKDAVEKPILSSEELAGPVNCENSIPTPFPEQEAECPEDARLSPEKSLQLASANPAISSTPYQCTVCQSEYNNLHGLLTHYGKKHPGMKVKAADFAQDIDINPGAVYKCRHCPYINTRIHGVLTHYQKRHPSIKVTAEDFVHDVEQSADISQNDVEETSRIFKQGYGAYRCKLCPYTHGTLEKLKIHYEKYHNQPEFDVFSQSPPKLPVPLEPEMTTEVSPSQVSITEEEVGEEPVSTSHFSTSHLVSHTVFRCQLCKYFCSTRKGIARHYRIKHNNVRAQPEGKNNLFKCALCAYTNPIRKGLAAHYQKRHDIDAYYTHCLAASRTISDKPNKVIIPSPPKDDSPQLSEELRRAVEKKKCSLCSFQSFSKKGIVSHYMKRHPGVFPKKQHASKLGGYFTAVYADEHEKPTLMEEEERGNFEKAEVEGEAQEIEWLPFRCIKCFKLSFSTAELLCMHYTDHHSRDLKRDFIILGNGPRLQNSTYQCKHCDSKLQSTAELTSHLNIHNEEFQKRAKRQERRKQLLSKQKYADGAFADFKQERPFGHLEEVPKIKERKVVGYKCKFCVEVHPTLRAICNHLRKHVQYGNVPAVSAAVKQEADDPAHLFLDGLEAAKDASGALVGRVDGEHCLLDGMLEDETRPGGYHCSQCDRVLMSMQGLRSHERSHLALAMFTREDKYSCQYCSFVSAFRHNLDRHMQTHHGHHKPFRCKLCSFKSSYNSRLKTHILKAHAGEHAYKCSWCSFSTMTISQLKEHSLKVHGKALTLPRPRIVSLLSSHSHHSSQKATPAEEVEDSNDSSYSEPPDVQQQLNHYQSAALARNNSRVSPVPLSGAAAGTEQKTEAVLHCEFCEFSSGYIQSIRRHYRDKHGGKKLFKCKDCSFYTGFKSAFTMHVEAGHSAVPEEGPKDLRCPLCLYHTKYKRNMIDHIVLHREERVVPIEVCRSKLSKYLQGVVFRCDKCTFTCSSDESLQQHIEKHNELKPYKCQLCYYETKHTEELDSHLRDEHKVSRNFELVGRVNLDQLEQMKEKMESSSSDDEDKEEEMNSKAEDRELMRFSDHGAALNTEKRFPCEFCGRAFSQGSEWERHVLRHGMALNDTKQVSREEIHPKEIMENSVKMPSIEEKEDDEAIGIDFSLKNETVAICVVTADKSLLENAEAKKE

SEQ ID NO: 439 - protein, 1998 aa, Homo sapiens
MKVWCLMRAQASMPPPTQQPQPPTQAAPLHPYKCTMCNYSTTTLKGLRVHQQHKHSFCDNLPKFEGQPSSLPLENETDSHPSSSNTVKKSQTSILGLSSKNNFVAKASRKLANDFPLDLSPVKKRTRIDEIASNLQSKINQTKQQEDAVINVEDDEEEEEDNEVEIEVELDREEEPTEPIIEVPTSFSAQQIWVRDTSEPQKEPNFRNITHDYNATNGAEIELTLSEDEEDYYGSSTNLKDHQVSNTALLNTQTPIYGTEHNSENTDFGDSGRLYYCKHCDFNNKSARSVSTHYQRMHPYIKFSFRYILDPNDHSAVYRCLECYIDYTNFEDLQQHYGEHHPEAMNVLNFDHSDLIYRCRFCSYTSPNVRSLMPHYQRMHPTVKINNAMIFSSYVVEQQEGLNTESQTLREILNSAPKNMATSTPVARGGGLPATFNKNTPKTFTPECENQKDPLVNTVVVYDCDVCSFASPNMHSVLVHYQKKHPEEKASYFRIQKTMRMVSVDRGSALSQLSFEVGAPMSPKMSNMGSPPPPQPPPPDLSTELYYCKHCSYSNRSVVGVLVHYQKRHPEIKVTAKYIRQAPPTAAMMRGVEGPQGSPRPPAPIQQLNRSSSERDGPPVENEMFFCQHCDYGNRTVKGVLIHYQKKHRDFKANADVIRQHTATIRSLCDRNQKKPASCVLVSPSNLERDKTKLRALKCRQCSYTSPYFYALRKHIKKDHPALKATVTSIMRWAFLDGLIEAGYHCEWCIYSHTEPNGLLLHYQRRHPEHYVDYTYMATKLWAGPDPSPPSLTMPAEAKTYRCRDCVFEAVSIWDITNHYQAFHPWAMNGDESVLLDIIKEKDAVEKPILSSEELAGPVNCENSIPTPFPEQEAECPEDARLSPEKSLQLASANPAISSTPYQCTVCQSEYNNLHGLLTHYGKKHPGMKVKAADFAQDIDINPGAVYKCRHCPYINTRIHGVLTHYQKRHPSIKVTAEDFVHDVEQSADISQNDVEETSRIFKQGYGAYRCKLCPYTHGTLEKLKIHYEKYHNQPEFDVFSQSPPKLPVPLEPEMTTEVSPSQVSITEEEVGEEPVSTSHFSTSHLVSHTVFRCQLCKYFCSTRKGIARHYRIKHNNVRAQPEGKNNLFKCALCAYTNPIRKGLAAHYQKRHDIDAYYTHCLAASRTISDKPNKVIIPSPPKDDSPQLSEELRRAVEKKKCSLCSFQSFSKKGIVSHYMKRHPGVFPKKQHASKLGGYFTAVYADEHEKPTLMEEEERGNFEKAEVEGEAQEIEWLPFRCIKCFKLSFSTAELLCMHYTDHHSRDLKRDFIILGNGPRLQNSTYQCKHCDSKLQSTAELTSHLNIHNEEFQKRAKRQERRKQLLSKQKYADGAFADFKQERPFGHLEEVPKIKERKVVGYKCKFCVEVHPTLRAICNHLRKHVQYGNVPAVSAAVKEADDPAHLFLDGLEAAKDASGALVGRVDGEHCLLDGMLEDETRPGGYHCSQCDRVLMSMQGLRSHERSHLALAMFTREDKYSCQYCSFVSAFRHNLDRHMQTHHGHHKPFRCKLCSFKSSYNSRLKTHILKAHAGEHAYKCSWCSFSTMTISQLKEHSLKVHGKALTLPRPRIVSLLSSHSHHSSQKATPAEEVEDSNDSSYSEPPDVQQQLNHYQSAALARNNSRVSPVPLSGAAAGTEQKTEAVLHCEFCEFSSGYIQSIRRHYRDKHGGKKLFKCKDCSFYTGFKSAFTMHVEAGHSAVPEEGPKDLRCPLCLYHTKYKRNMIDHIVLHREERVVPIEVCRSKLSKYLQGVVFRCDKCTFTCSSDESLQQHIEKHNELKPYKCQLCYYETKHTEELDSHLRDEHKVSRNFELVGRVNLDQLEQMKEKMESSSSDDEDKEEEMNSKAEDRELMRFSDHGAALNTEKRFPCEFCGRAFSQGSEWERHVLRHGMALNDTKQVSREEIHPKEIMENSVKMPSIEEKEDDEAIGIDFSLKNETVAICVVTADKSLLENAEAKKE

SEQ ID NO: 440 - protein, 102 aa, Homo sapiens [sequence omitted]

SEQ ID NO: 441 - protein, 215 aa, Homo sapiens
MSAAGPDRRKAMRRCDRLIDSLVHYVRGTIADYQPDDKATENCVHILHNLSYQLEVELPEKYSQNIYIQNPNVQTNNKTGSGPMPTSVAQTVVQKENGLQHTRKMVHVSDPSVKKTANLLLRNLSQNLSLQNKIAKETLPSLVSIIPDTVPSTDLLIETTASACYMLNNVIQNSYQNAQRLPNTGGIQKIMTISAGDAYASNKASKAASILLYSL

SEQ ID NO: 442 - protein, 163 aa, Homo sapiens
MYLSLIAKSVPNYTQEASLGALQNLTAGSGPMPTSVAQTVVQKENGLQHTRKMVHVSDPSVKKTANLLLRNLSQNLSLQNKIAKETLPSLVSIIPDTVPSTDLLIETTASACYMLNNVIQNSYQNAQRLPNTGGIQKIMTISAGDAYASNKASKAASILLYSL

SEQ ID NO: 443 - protein, 148 aa, Homo sapiens [sequence omitted]

SEQ ID NO: 444 - protein, 104 aa, Homo sapiens [sequence omitted]

SEQ ID NO: 445 - protein, 289 aa, Homo sapiens [sequence omitted]

SEQ ID NO: 446 - protein, 228 aa, Homo sapiens
MNLTIFQMNEERLKIAIKDALNENSQLQENERQLLQEAEVWKEQGFSDTGSLSPPWEQDRRMMFLPPGQSYPDSALPPQRQDRFYSNSGTLSGPAELRRFNMTSLDKVDGSMLSEMESSRNDTKDDLGNLNVPDSSLPAENEATGPYFSPPPLAPIRGPLFPGDTRGLFMRRGPPFPPPPPGTMFGASQDYFPPRDFPDPPHAPFAMRNVYPARRFLLTFPQNLDFSP

SEQ ID NO: 447 - protein, 276 aa, Homo sapiens
MSEEVTYATLTFQDSAGARNNRDGNNLRKRGHPAPSPIWRHAALGLVTLCLMLLIGLVTLGMMFLQISNDINSDSEKLSQLQKTIQQQQDNLSQQLGNSNNLSMEEEFLKSQISSLLKRQEQMAIKLCQELIIHTSDHRCNPCPKMWQWYQNSCYYFTTNEEKTWANSRKDCIDKNSTLVKIDSLEEKDFLMSQPLLMFSFFWLGLSWDSSGRSWFWEDGSVPSPSLFSTKELDQINGSKGCAYFQKGNIYISRCSAEIFWICEKTAAPVKTEDLD

SEQ ID NO: 448 - protein, 458 aa, Homo sapiens [sequence omitted]

SEQ ID NO: 449 - protein, 458 aa, Homo sapiens [sequence omitted]

SEQ ID NO: 450 - protein, 458 aa, Homo sapiens
MASTITGSQDCIVNHRGEVDGEPELDISPCQQWGEASSPISRNRDSVMTLQSGCFENIESETYLPLKVSSQIDTQDSSVKFCKNEPQDHQESRRLFVMEESTERKVIKGESCSENLQVKLVSDGQELASPLLNGEATCQNGQLKESLDPIDCNCKDIHGWKSQVVSCSQQRGHTEEKPCDHNNCGKILNTSPDGHPYEKIHTAEKQYEGSQCGKNFSQSSELLLHQRDHTEEKPYKCEQCGKGFTRSSSLLIHQAVHTDEKPYKCEKCGKGFTRSSSLLIHHAVHTGEKPYKCDKCGKGFSQSSKLHIHQRVHTGEKPYECEECGMSFSQRSNLHIHQRDHTGERPYKCGECGKGFSQSSNLHIHRCIHTGEKPYQCYECGKGFSQSSDLRIHLRVHTGEKPYHCGKCGKGFSQSSKLLIHQRVHTGEKPYECSKCGKGFSQSSNLHSHQRVHKKDPR

SEQ ID NO: 451 - protein, 95 aa, Homo sapiens
MTKRWEPSLNWKTTVNYKDYAQQKKSKRTNTQENLKNQDHLFHTEEHNYFGRVLKRLRKLLAIAPQKVRKMKNHLTIVRKQVQICHQNIGKFRSW

SEQ ID NO: 452 - protein, 247 aa, Homo sapiens
MKVLQAQKKHTSTELTIEPEAASDSNGINLSGFGSDQFEIQLTQQPRSLIPNNNVRRLISHVIRTLKMDCSETHVQLTCAKLISRTGLLMKLLSEQQEVKVSKAEWDTDQWKTENYINDSTEAQNEQKEQKSSELTKEVPGYGYNNKLILAIFVTEILTTLIIIFCLIEIYSHRWSSQEDGEGFSRGIFRFLPQRRCSSRSETQDESFSFRQPLWLKDMYKPLSATRVNNQAWKLHKKSSNEDEIPI

SEQ ID NO: 453 - protein, 296 aa, Homo sapiens [sequence omitted]

SEQ ID NO: 454 - protein, 269 aa, Homo sapiens [sequence omitted]

SEQ ID NO: 455 - protein, 269 aa, Homo sapiens [sequence omitted]

SEQ ID NO: 456 - protein, 269 aa, Homo sapiens
MEVKPPPGCPQPDSGSRRRRWGEEGHDPKEPEQLRKLFIGGLSFETTDDSLREHFEKWGTLTDCLVMRDPQTKRSRGFGFVTYSCVTEVDAAIGARPFKVDGRVVEPKRAVSREDSVKPGAHLTVKKIFVGSIKEDTEEYNLRDYFEKYGKIETIEVMEDRQSGKKRGFASVTFDDHDTVDKIVVQKYHTINGHNCEVKKALAKQVMQPAGSQRGRGGGSGNCMGHRGNFGGGGGNFGRDGNFGGRGGYGGGGGGSRGSYGGGDVDIMD

SEQ ID NO: 457 - protein, 483 aa, Homo sapiens
MRQGKRTAQSHSQIVTECITGQAMAPRSRRRRHKKPPSSVAPIIMAPTTIVTPVPLTPSKPGPSIDTLGFFSLDDNVPGLSQLILQKLNMKSYEEYKLVVDGGTPVSGFGFRCPQEMFQRMEDTFRFCAHCRALPSGLSDSKVLRHCKRCRNVYYCGPECQKSDWPAHRRVCQELRLVAVDRLMEWLLVTGDFVLPSGPWPWPPEAVQDWDSWFSMKGLHLDATLDAVLVSHAVTTLWASVGRPRPDPDVLQGSLKRLLTDVLSRPLTLGLGLRALGIDVRRTGGSTVHVVGASHVETFLTRPGDYDELGYMFPGHLGLRVVMVGVDVATGFSQSTSTSPLEPGTIQLSAHRGLYHDFWEEQVETGQTHHPDLVAAFHPGFHSSPDLMEAWLPTLLLLRDYKIPTLITVYSHQELVSSLQILVELDTHITAFGSNPFMSLKPEQVYSSPNKQPVYCSAYYIMFLGSSCQLDNRQLEEKVDGGI

SEQ ID NO: 458 - protein, 63 aa, Homo sapiens
GWTQEIPLVTLPLASATAWARTPSCSCRPCRPCGPRGSGSRLSCRTFVCDAQSSSLFGTCVCG

SEQ ID NO: 459 - protein, 252 aa, Homo sapiens
MFSKCNTPASRAPGTASAPPGTLMALPGTDTAPPPRTASVPPGTASAPPGTLMALPGTDTAPPPRTASVPPGTASAPPGTLMALPGTDTAPRQNRHGARWNTNGPPWNSLGAPWNTNGPPWNRHGAPPQNSLDAPWNSLGAPWNSLGAPWNSLVLLEQTQPPQNRHSTPWNSLALPGMATSPHPFCAALGICPYVVRVQLCQQGQLHKRPQLSPPQWAPLLRLWVSFFPGGVLAPVLAPPRCLDTCPCHPGH

SEQ ID NO: 460 - protein, 252 aa, Homo sapiens; identical to SEQ ID NO: 459

SEQ ID NO: 461 - protein, 441 aa, Homo sapiens
MAPRAQIQGPLTFGDVAVAFTRIEWRHLDAAQRALYRDVMLENYGNLVSVGLLSSKPKLITQLEQGAEPWTEVREAPSGTHAVEDYWFETKMSALKQSTSEASVLGERTKSVMMEKGLDWEGRSSTEKNYKCKECGKVFKYNSSFISHQRNHTSEKPHKCKECGIAFMNSSSLLNHHKVHAGKQPYRCIECGKFLKKHSTFINHQRIHSREKPHKCIECGKTFRKNSILLSHQRIHTGQKPYKCNDCGKAFAQNAALTRHERIHSGEKPFKCNKCGRAFRDNSTVLEHQKIHTGEKPYQCNECGKAFRKSSTLISHQRMHTGEKPYHCSKCGKSFRYSSSFAGHQKTHSGNKPYQCRDCGKAFTKSSTLTGHQRIHTGEKPYHCKKCGKAFRHSSGLVEHQRLHTGEKPYKCNECGKAFPRSSALKQHKKIHNKERAMKCS

SEQ ID NO: 462 - protein, 590 aa, Homo sapiens
MSYFVGSILLSRKFWKVDLMEKNQENQDQHLRKAGFVNNKILMEDRNSVLGETFNINSNLVPMRKIPDKYDLCIMNVNYISELIVSDKPNECSECGKKFCEKSYLQVHQRTHTGEKSHEGKECGKTFVYNSFLIVHQRIHIGVRPYECNECGKTFSQKPDFTYHQRTHTGERPCECNECGKSFSVKSKLIVHQRTHTGEKPYECNECGKTFSQKSSLTVHQRTHTGEKPYKFEDYWFETKMSALKQSTSEASVLGERTKSVMMEKGLDWEGRSSTEKNYKCKECGKVFKYNSSFISHQRNHTSEKPHKCKECGIAFMNSSSLLNHHKVHAGKQPYRCIECGKFLKKHSTFINHQRIHSREKPHKCIECGKTFRKNSILLSHQRIHTGQKPYKCNDCGKAFAQNAALTRHERIHSGEKPFKCNKCGRAFRDNSTVLEHQKIHTGEKPYQCNECGKAFRKSSTLISHQRMHTGEKPYHCSKCGKSFRYSSSFAGHQKTHSGNKPYQCRDCGKAFTKSSTLTGHQRIHTGEKPYHCKKCGKAFRHSSGLVEHQRLHTGEKPYKCNECGKAFPRSSALKQHKKIHNKERAMKCS

SEQ ID NO: 463 - protein, 441 aa, Homo sapiens; identical to SEQ ID NO: 461

SEQ ID NO: 464 - protein, 1020 aa, Homo sapiens
MASRPRPRTPSRGPSDLRFRGEAGLRRVFLKKAGGSVSFSDVAVGFTQEEWQHLDSAQRTPYRDMMLENYSLLLSVGYCITKPEVVCKLEHGQVLWILEEESPSQSHLDCCIDDDLMEKRQENQDQHLQKVDFVNNKTLTMDRNGVLGKTFSLDTNPILSRKIRGNCDSSGMNLNNISELIISNRSSFVRNPAECNVRGKFLLCMKRENPYARGKPLEYDGNGKAVSQNEDLFRHQYIQTLKQCFEYNQCGKAFHEEAACSTHKRERMPIKLISMLVHFAVSQSILYIRKQIQKKNSMNVVNVGKPSAINPLLSYSRGYTEERNPMNALNVGKLLDIGHALQYIKEHTRDKTYECNECGKNFCEKSNLHVHQRTHTGEKPYGCNECQKAFGDRSALKVHQRIHTGEKPYEWYCISKPKVVFKLQQGEEAWILEEESSSQSHFEFWKVDLMEKNQENQDQHLRKAGFVNNKILMEDRNSVLGETFNINSNLVPMRKIPDKYDLCIMNVNYISELIVSDKPNECSECGKKFCEKSYLQVHQRTHTGEKSHEGKECGKTFVYNSFLIVHQRIHIGVRPYECNECGKTFSQKPDFTYHQRTHTGERPCECNECGKSFSVKSKLIVHQRTHTGEKPYECNECGKTFSQKSSLTVHQRTHTGEKPYKFEDYWFETKMSALKQSTSEASVLGERTKSVMMEKGLDWEGRSSTEKNYKCKECGKVFKYNSSFISHQRNHTSEKPHKCKECGIAFMNSSSLLNHHKVHAGKQPYRCIECGKFLKKHSTFINHQRIHSREKPHKCIECGKTFRKNSILLSHQRIHTGQKPYKCNDCGKAFAQNAALTRHERIHSGEKPFKCNKCGRAFRDNSTVLEHQKIHTGEKPYQCNECGKAFRKSSTLISHQRMHTGEKPYHCSKCGKSFRYSSSFAGHQKTHSGNKPYQCRDCGKAFTKSSTLTGHQRIHTGEKPYHCKKCGKAFRHSSGLVEHQRLHTGEKPYKCNECGKAFPRSSALKQHKKIHNKERAMKCS

SEQ ID NO: 465 - protein, 402 aa, Homo sapiens
MLENYGNLVSVGLLSSKPKLITQLEQGAEPWTEVREAPSGTHAVEDYWFETKMSALKQSTSEASVLGERTKSVMMEKGLDWEGRSSTEKNYKCKECGKVFKYNSSFISHQRNHTSEKPHKCKECGIAFMNSSSLLNHHKVHAGKQPYRCIECGKFLKKHSTFINHQRIHSREKPHKCIECGKTFRKNSILLSHQRIHTGQKPYKCNDCGKAFAQNAALTRHERIHSGEKPFKCNKCGRAFRDNSTVLEHQKIHTGEKPYQCNECGKAFRKSSTLISHQRMHTGEKPYHCSKCGKSFRYSSSFAGHQKTHSGNKPYQCRDCGKAFTKSSTLTGHQRIHTGEKPYHCKKCGKAFRHSSGLVEHQRLHTGEKPYKCNECGKAFPRSSALKQHKKIHNKERAMKCS

SEQ ID NO: 466 - protein, 449 aa, Homo sapiens
  VARIANT (1)...(449): Xaa = Any Amino Acid
MQDPSPASLSPPAPPAPLASTLSPGPMTFSEPFGPHSTLSASGPPEPLLPLKCPATQPHVVFPPSPQPHGPLASSPPPPDSSLAGLQCGSTTCPVPQSSPLHNQVLPPPTRVISGLGCSSDPIWDLYCWREAATTWGLSTYSHGKSQPRHLPDHPSEASFWGDPTPKHMEVGGCTFIHPDVQKLLETLIAKRALMKMWQEKERKRADHPHMTSLGKEWDITTLNPFWNVSTQPQQLPRPQQVSDATTVGNHLQQKRSQLFWDLPSLNSESLATTVWVSRNPSSQNAHSVPLDKASTSLPGEPEVEASSQLSQAPPQPHHMAQPQHFTPAWPQSQPPPLAEIQTQAHLSPPVPSLGCSSPPQIRGCGASYPTSQERTQSVIPTGKEYLEWPLKKRPKWKRVLPSLLKKSQAVLSQPTAHLPQERPASWSPKSAPILPGVVTSPELPEHWX

SEQ ID NO: 467 - protein, 106 aa, Homo sapiens
  VARIANT (1)...(106): Xaa = Any Amino Acid
MEKLLRLCCWYSWLLLFYYNFQVRGVYSRSQDHPGFQVLASASHYWPLENVDGIHELQDTTGASRTHKLTVLPSRNATFVYSNDSAYSNLSATVDIVEGKVNKGIX

SEQ ID NO: 468 - protein, 179 aa, Homo sapiens [sequence omitted]

SEQ ID NO: 469 - protein, 526 aa, Homo sapiens
MKISTTQIERRFEISSSLVGLIDGSFEIGNLFVIVFVSYFGSKLHRPKLIGIGCFLMGTGSILMALPHFFMGYYRYSKETNIDPSENSTSNLPNCLINQMLSLNRTPSEIIERGCVKESGSHMWIYVFMGNMLRGIGETPIVPLGISYIDDFAKEGHSSLYLGTVNVMGMTGLVFAFMLGSLFAKMYVDIGYVDLSTIRITPKDSRWVGAWWLGFLVSGIVSIISSIPFFFLPLNPNKPQKERKVSLFLHVLKTNDKRNQIANLTNRRKYITKNVTGFFQSLKSILTNPLYVIFVIFTLLHMSSYIASLTYIIKMVEQQYGWSASKTNFLLGVLALPAVAIGMFSGGYIIKKFKLSLVGLAKLAFCSATVHLLSQVLYFFLICESKSVAGLTLTYDGNSPVRSHVDVPLSYCNSECNCDESQWEPVCGNNGITYLSPCLAGCKSSSGNKEPIVFYNCSCVEVIGLQNKNYSAHLGECPRDDACTRKSYVYFVIQVLDAFLCAVGLTSYSVLVIRRYSSSNIFWGSD

SEQ ID NO: 470 - protein, 86 aa, Homo sapiens
MASDGPAGETMWRDGIEPEIHVPGALTVSSQGIESPCAPDPMRGCHPLLPSDCNLRRHPKPELSSQATLIFLTHRHWEIKTDCCQF

SEQ ID NO: 471 - protein, 127 aa, Homo sapiens
MSFIFEWIYNGFSSVLQFLGLYKKSGKLVFLGLDNAGKTTLLHMLKDDRLGQHVPTLHPTSEELTIAGMTFTTFDLGGHEQARRVWKNYLPAINGIVFLVDCADHSRLVESKVELNDILQLTSHTGP

SEQ ID NO: 472 - protein, 198 aa, Homo sapiens
MSFIFEWIYNGFSSVLQFLGLYKKSGKLVFLGLDNAGKTTLLHMLKDDRLGQHVPTLHPTSEELTIAGMTFTTFDLGGHEQARRVWKNYLPAINGIVFLVDCADHSRLVESKVELNALMTDETISNVPILILGNKIDRTDAISEEKLREIFGLYGQTTGKGNVTLKELNARPMEVFMCSVLKRQGYGEGFRWLSQYID

SEQ ID NO: 473 - protein, 198 aa, Homo sapiens; identical to SEQ ID NO: 472

SEQ ID NO: 474 - protein, 92 aa, Homo sapiens [sequence omitted]

SEQ ID NO: 475 - protein, 526 aa, Homo sapiens [sequence omitted]

SEQ ID NO: 476 - protein, 655 aa, Homo sapiens [sequence omitted]

SEQ ID NO: 477 - protein, 546 aa, Homo sapiens [sequence omitted]

SEQ ID NO: 478 - protein, 717 aa, Homo sapiens
MVAERTHKAAATGARGPGELGAPGTVALVAARAERGARLPSPGSCGLLTLALCSLALSLLAHFRTAELQARVLRLEAERGEQQMETAILGRVNQLLDEKWKLHSRRRREAPKTSPGCNCPPAFQGPTGRPGLPGDKGAIGMPGRVGSPGDAGLSIIGPRGPPGQPGTRGFPGFPGPIGLDGKPGHPGPKGDMGLTGPPGQPGPQGQKGEKGQCGEYPHRECLSSMPAALRSSQIIALKLLPLLNSVRLAPPPVIKRRTFQGEQSQASIQGPPGPPGPPGPSGPLGHPGLPGPMGPPGLPGPPGPKGDPGIQGYHGRKGERGMPGMPGKHGAKGAPGIAVAGMKGEPGIPGTKGEKGAEGSPGLPGLLGQKGEKGDAGNSIGGGRGEPGPPGLPGPPGPKGEAGVDGQVGPPGQPGDKGERGAAGEQGPDGPKGSKGEPGKGEMVDYNGNINEALQEIRTLALMGPPGLPGQIGPPGAPGIPGQKGEIGLPGPPGHDGEKGPRGKPGDMGPPGPQGPPGKDGPPGVKGENGHPGSPGEKGEKGETGQAGSPGEKGEAGEKGNPGAEVPGLPGPEGPPGPPGLQGVPGPKGEAGLDGAKGEKGFQGEKGDRGPLGLPGASGLDGRPGPPGTPGPIGVPGPAGPKGERGSKGDPGMTGPTGAAGLPGLHGPPGDKGNRGERGKKGSRGPKGDKGDQGAPGLDAPCPLGEDGLPVQGCWNK

SEQ ID NO: 479 - protein, 555 aa, Homo sapiens [sequence omitted]

SEQ ID NO: 480 - protein, 448 aa, Homo sapiens [sequence omitted]

SEQ ID NO: 481 - protein, 485 aa, Homo sapiens [sequence omitted]

SEQ ID NO: 482 - protein, 705 aa, Homo sapiens [sequence omitted]

SEQ ID NO: 483 - protein, 562 aa, Homo sapiens [sequence omitted]

SEQ ID NO: 484 - protein, 663 aa, Homo sapiens [sequence omitted]

SEQ ID NO: 485 - protein, 708 aa, Homo sapiens [sequence omitted]

SEQ ID NO: 486 - protein, 565 aa, Homo sapiens [sequence omitted]

SEQ ID NO: 487 - protein, 667 aa, Homo sapiens [sequence omitted]

SEQ ID NO: 488 - protein, 703 aa, Homo sapiens [sequence omitted]

SEQ ID NO: 489 - protein, 679 aa, Homo sapiens [sequence omitted]

SEQ ID NO: 490 - protein, 563 aa, Homo sapiens [sequence omitted]

SEQ ID NO: 491 - protein, 691 aa, Homo sapiens [sequence omitted]

SEQ ID NO: 492 - protein, 701 aa, Homo sapiens [sequence omitted]

SEQ ID NO: 493 - protein, 536 aa, Homo sapiens [sequence omitted]

SEQ ID NO: 494 - protein, 526 aa, Homo sapiens [sequence omitted]

SEQ ID NO: 495 - protein, 504 aa, Homo sapiens [sequence omitted]

SEQ ID NO: 496 - protein, 706 aa, Homo sapiens [sequence omitted]

SEQ ID NO: 497 - protein, 698 aa, Homo sapiens [sequence omitted]

SEQ ID NO: 498 - protein, 550 aa, Homo sapiens [sequence omitted]

SEQ ID NO: 499 - protein, 660 aa, Homo sapiens [sequence omitted]

SEQ ID NO: 500 - protein, 507 aa, Homo sapiens [sequence omitted]

SEQ ID NO: 501 - protein, 485 aa, Homo sapiens [sequence omitted]

SEQ ID NO: 502 - protein, 693 aa, Homo sapiens [sequence omitted]

SEQ ID NO: 503 - protein, 558 aa, Homo sapiens [sequence omitted]

SEQ ID NO: 504 - protein, 694 aa, Homo sapiens [sequence omitted]

SEQ ID NO: 505 - protein, 720 aa, Homo sapiens [sequence omitted]

SEQ ID NO: 506 - protein, 577 aa, Homo sapiens [sequence omitted]

SEQ ID NO: 507 - protein, 560 aa, Homo sapiens [sequence omitted]

SEQ ID NO: 508 - protein, 613 aa, Homo sapiens [sequence omitted]

SEQ ID NO: 509 - protein, 536 aa, Homo sapiens [sequence omitted]

SEQ ID NO: 510 - protein, 708 aa, Homo sapiens [sequence omitted]

SEQ ID NO: 511 - protein, 551 aa, Homo sapiens [sequence omitted]

SEQ ID NO: 512 - protein, 528 aa, Homo sapiens [sequence omitted]

SEQ ID NO: 513 - protein, 432 aa, Homo sapiens
MMDVNSSGRPDLYGHLRSFLLPEVGRGLPDLSPDGGADPVAGSWAPHLLSEVTASPAPTWDAPPDNASGCGEQINYGRVEKVVIGSILTLITLLTIAGNCLVVISVCFVKKLRQPSNYLIVSLALADLSVAVAVMPFVSVTDLIGGKWIFGHFFCNVFIAMDVMCCTASIMTLCVISIDRYLGITRPLTYPVRQNGKCMAKMILSVWLLSASITLPPLFGWAQNVNDDKVCLISQDFGYTIYSTAVAFYIPMSVMLFMYYQIYKAARKSAAKHKFPGFPRVEPDSVIALNGIVKLQKEVEECANLSRLLKHERKNISIFKREQKAATTLGIIVGAFTVCWLPFFLLSTARPFICGTSCSCIPLWVERTFLWLGYANSLINPFIYAFFNRDLRTTYRSLLQCQYRNINRKLSAAGMHEALKLAERPERPEFVL

SEQ ID NO: 514 - protein, 479 aa, Homo sapiens
MMDVNSSGRPDLYGHLRSFLLPEVGRGLPDLSPDGGADPVAGSWAPHLLSEVTASPAPTWDAPPDNASGCGEQINYGRVEKVVIGSILTLITLLTIAGNCLVVISVCFVKKLRQPSNYLIVSLALADLSVAVAVMPFVSVTDLIGGKWIFGHFFCNVFIAMDVMCCTASIMTLCVISIDRYLGITRPLTYPVRQNGKCMAKMILSVWLLSASITLPPLFGWAQNVNDDKVCLISQDFGYTIYSTAVAFYIPMSVMLFMYYQIYKAARKSAAKHKFPGFPRVEPDSVIALNGIVKLQKEVEECANLSRLLKHERKNISIFKREQKAATTLGIIVGAFTVCWLPFFLLSTARPFICGTSCSCIPLWVERTFLWLGYANSLINPFIYAFFNRDLRTTYRSLLQCQYRNINRKLSAAGMHEALKLAERPERPEFVLRACTRRVLLRPEKRPPVSVWVLQSPDHHNWLADKMLTTVEKKVMIHD

SEQ ID NO: 515 - protein, 445 aa, Homo sapiens
MMDVNSSGRPDLYGHLRSFLLPEVGRGLPDLSPDGGADPVAGSWAPHLLSEVTASPAPTWDAPPDNASGCGEQINYGRVEKVVIGSILTLITLLTIAGNCLVVISVCFVKKLRQPSNYLIVSLALADLSVAVAVMPFVSVTDLIGGKWIFGHFFCNVFIAMDVMCCTASIMTLCVISIDRYLGITRPLTYPVRQNGKCMAKMILSVWLLSASITLPPLFGWAQNVNDDKVCLISQDFGYTIYSTAVAFYIPMSVMLFMYYQIYKAARKSAAKHKFPGFPRVEPDSVIALNGIVKLQKEVEECANLSRLLKHERKNISIFKREQKAATTLGIIVGAFTVCWLPFFLLSTARPFICGTSCSCIPLWVERTFLWLGYANSLINPFIYAFFNRDLRTTYRSLLQCQYRNINRKLSAAGMHEALKLAERPERPEFVLQNADYCRKKGHDS

SEQ ID NO: 516 - protein, 247 aa, Homo sapiens
MAKMILSVWLLSASITLPPLFGWAQNVNDDKVCLISQDFGYTIYSTAVAFYIPMSVMLFMYYQIYKAARKSAAKHKFPGFPRVEPDSVIALNGIVKLQKEVEECANLSRLLKHERKNISIFKREQKAATTLGIIVGAFTVCWLPFFLLSTARPFICGTSCSCIPLWVERTFLWLGYANSLINPFIYAFFNRDLRTTYRSLLQCQYRNINRKLSAAGMHEALKLAERPERPEFVLQNADYCRKKGHDS

SEQ ID NO: 517 - protein, 49 aa, Homo sapiens
MATQRKHLVKDFNPYITCYICKGYLIKPTTVTECLHTSAESYWMSTWMS

SEQ ID NO: 518 - protein, 49 aa, Homo sapiens; identical to SEQ ID NO: 517

SEQ ID NO: 519 - protein, 256 aa, Homo sapiens
MATQRKHLVKDFNPYITCYICKGYLIKPTTVTECLHTFCKTCIVQHFEDSNDCPRCGNQVHETNPLEMLRLDNTLEEIIFKLVPGLREQELERESEFWKKNKPQENGQDDTSKADKPKVDEEGDENEDDKDYHRSDPQIAICLDCLRNNGQSGDNVVKGLMKKFIRCSTRVTVGTIKKFLSLKLKLPSSYELDVLCNGEIMGKDHTMEFIYMTRWRLRGENFRCLNCSASQVCSQDGPLYQSYPMVLQYRPRIDFG

SEQ ID NO: 520 - protein, 252 aa, Homo sapiens
MACWPQLRLLLWKNLTFRRRQTCQLLLEVAWPLFIFLILISVRLSYPPYEQHECHFPNKAMPSAGTLPWVQGIICNANNPCFRYPTPGEAPGVVGNFNKSIVARLFSDARRLLLYSQKDTSMKDMRKVLRTLQQIKKSSSNLKLQDFLVDNETFSGFLYHNLSLPKSTVDKMLRADVILHKVFLQGYQLHLTSLCNGSKSEEMIQLGDQEVSELCGLPREKLAAAERVLRSNMDILKPILVSRLAHWRNFKH

SEQ ID NO: 521 - protein, 2201 aa, Homo sapiens [sequence omitted]

SEQ ID NO: 522 - protein, 363 aa, Homo sapiens
MACWPQLRLLLWKNLTFRRRQTCQLLLEVAWPLFIFLILISVRLSYPPYEQHECHFPNKAMPSAGTLPWVQGIICNANNPCFRYPTPGEAPGVVGNFNKSIVARLFSDARRLLLYSQKDTSMKDMRKVLRTLQQIKKSSSNLKLQDFLVDNETFSGFLYHNLSLPKSTVDKMLRADVILHKVFLQGYQLHLTSLCNGSKSEEMIQLGDQEVSELCGLPREKLAAAERVLRSNMDILKPILMDVTCDDIAHGQLTVPRSAAVAATGDAKPNMMGRETLLSICASVPKVEFHERHILKHFSFCVCVSVSLFPAKGIVSFSWASFRIWVLWKAVFWQHGESMAVWEGQLGLGLNIAFEYFTSIDVG

SEQ ID NO: 523 - protein, 2261 aa, Homo sapiens [sequence omitted]

SEQ ID NO: 524 - protein, 2201 aa, Homo sapiens [sequence omitted]

SEQ ID NO: 525 - protein, 746 aa, Homo sapiens
MGDVLSTHLDDARRQHIAEKTGKILTEFLQFYEDQYGVALFNSMRHEIEGTGLPQAQLLWRKVPLDERIVFSGNLFQHQEDSKKWRNRFSLVPHNYGLVLYENKAAYERQVPPRAVINSAGYKILTSVDQYLELIGNSLPGTTAKSGSAPILKCPTQFPLILWHPYARHYYFCMMTEAEQDKWQAVLQDCIRHCNNGIPEDSKVEGPAFTDAIRMYRQSKELYGTWEMLCGNEVQILSNLVMEELGPELKAELGPRLKGKPQERQRQWIQISDAVYHMVYEQAKARFEEVLSKVQQVQPAMQAVIRTDMDQIITSKEHLASKIRAFILPKAEVCVRNHVQPYIPSILEALMVPTSQGFTEVRDVFFKEVTDMNLNVINEGGIDKLGEYMEKLSRLAYHPLKMQSCYEKMESLRLDGLQQRFDVSSTSVFKQRAQIHMREQMDNAVYTFETLLHQELGKGPTKEELCKSIQRVLERVLKKYDYDSSSVRKRFFREALLQISIPFLLKKLAPTCKSELPRFQELIFEDFARFILVENTYEEVVLQTVMKDILQAVKEAAVQRKHNLYRDSMVMHNSDPNLHLLAEGAPIDWGEEYSNSGGGGSPSPSTPESATLSEKRRRAKQVVSVVQDEEVGLPFEASPESPPPASPDGVTEIRGLLAQGLRPESPPPAGPLLNGAPAGESPQPKAAPEASSPPASPLQHLLPGKAVDLGPPKPSDQETGEQVSSPSSHPALHTTTEDSAGVQTEF

SEQ ID NO: 526 - protein, 733 aa, Homo sapiens
MGWMGEKTGKILTEFLQFYEDQYGVALFNSMRHEIEGTGLPQAQLLWRKVPLDERIVFSGNLFQHQEDSKKWRNRFSLVPHNYGLVLYENKAAYERQVPPRAVINSAGYKILTSVDQYLELIGNSLPGTTAKSGSAPILKCPTQFPLILWHPYARHYYFCMMTEAEQDKWQAVLQDCIRHCNNGIPEDSKVEGPAFTDAIRMYRQSKELYGTWEMLCGNEVQILSNLVMEELGPELKAELGPRLKGKPQERQRQWIQISDAVYHMVYEQAKARFEEVLSKVQQVQPAMQAVIRTDMDQIITSKEHLASKIRAFILPKAEVCVRNHVQPYIPSILEALMVPTSQGFTEVRDVFFKEVTDMNLNVINEGGIDKLGEYMEKLSRLAYHPLKMQSCYEKMESLRLDGLQQRFDVSSTSVFKQRAQIHMREQMDNAVYTFETLLHQELGKGPTKEELCKSIQRVLERVLKKYDYDSSSVRKRFFREALLQISIPFLLKKLAPTCKSELPRFQELIFEDFARFILVENTYEEVVLQTVMKDILQAVKEAAVQRKHNLYRDSMVMHNSDPNLHLLAEGAPIDWGEEYSNSGGGGSPSPSTPESATLSEKRRRAKQVVSVVQDEEVGLPFEASPESPPPASPDGVTEIRGLLAQGLRPESPPPAGPLLNGAPAGESPQPKAAPEASSPPASPLQHLLPGKAVDLGPPKPSDQETGEQVSSPSSHPALHTTTEDSAGVQTEF

SEQ ID NO: 527 - protein, 173 aa, Homo sapiens [sequence omitted]

SEQ ID NO: 528 - protein, 568 aa, Homo sapiens
MASSCAVQVKLELGHRAQVRKKPTVEGFTHDWMVFVRGPEHSNIQHFVEKVVFHLHESFPRPKRVCKDPPYKVEESGYAGFILPIEVYFKNKEEPRKVRFDYDLFLHLEGHPPVNHLRCEKLTFNNPTEDFRRKLLKAGGDPNRSIHTSSSSSSSSSSSSSSSSSSSSSSSSSSSSSSSSSSSSSSSSSSTSFSKPHKLMKEHKEKPSKDSREHKSAFKEPSRDHNKSSKESSKKPKENKPLKEEKIVPKMAFKEPKPMSKEPKPDSNLLTITSGQDKKAPSKRPPISDSEELSAKKRKKSSSEALFKSFSSAPPLILTCSADKKQIKDKSHVKMGKVKIESETSEKKKSTLPPFDDIVDPNDSDVEENISSKSDSEQPSPASSSSSSSSSFTPSQTRQQGPLRSIMKDLHSDDNEEESDEVEDNDNDSEMERPVNRGGSRSRRVSLSDGSDSESSSASSPLHHEPPPPLLKTNNNQILEVKSPIKQSKSDKQIKNGECDKAYLDELVELHRRLMTLRERHILQQIVNLIEETGHFHITNTTFDFDLCSLDKTTVRKLQSYLETSGTS

SEQ ID NO: 529 - protein, 568 aa, Homo sapiens; identical to SEQ ID NO: 528

SEQ ID NO: 530 - protein, 138 aa, Homo sapiens
MKDLHSDDNEEESDEVEDNDNDSEMERPVNRGGSRSRRVSLSDGSDSESSSASSPLHHEPPPPLLKTNNNQILEVKSPIKQSKSDKQIKNGECDKIVNLIEETGHFHITNTTFDFDLCSLDKTTVRKLQSYLETSGTS

SEQ ID NO: 531 - protein, 1695 aa, Homo sapiens
MNVQPCSRCGYGVYPAEKISCIDQIWHKACFHCEVCKMMLSVNNFVSHQKKPYCHAHNPKNNTFTSVYHTPLNLNVRTFPEAISGIHDQEDGEQCKSVFHWDMKSKDKEGAPNRQPLANERAYWTGYGEGNAWCPGALPDPEIVRMVEARKSLGEEYTEDYEQPRGKGSFPAMITPAYQRAKKANQLASQVEYKRGHDERISRFSTVADTPELLRSKAGAQLQSDVRYTEDYEQQRGKGSFPAMITPAYQIAKRANELASDVRYHQQYQKEMRGMAGPAIGAEGILTRECADQYGQGYPEEYEEHRGKGSFPAMITPAYQNAKKAHELASDIKYRQDFNKMKGTAHYHSLPAQDNLVLKRAQSVNKLVSENKYKENYQNHMRGRYEGVGMDRRTLHAMKVGSLASNVAYKADYKHDIVDYNYPATLTPSYQTAMKLVPLKDANYRQSIDKLKYSSVTDTPQIVQAKINAQQLSHVNYRADYEKNKLNYTLPQDVPQLVKAKTNAKLFSEVKYKEGWEKTKGKGFEMKLDAMSLLAAKASGELASNIKYKEEYEKTKGKAMGTADSRLLHSLQIAKMSSEVEYKKGFEESKTRFHLPMDMVNIRHAKKAQTLASDLDYRKKLHEYTVLPEDMKTQWAKKVYGLQSELQYKADLAWMKGVGWLTEGSLNLEQAKKAGQLVSEKNYRQRVDELKFTSVTDSSQMEHAKKSQELQSGVAYKAGNEQSVHQYTISKDEPLFLQARANAANLSEKLYKSSWENQKAKGFELRLDSLTFLAAKAKRDLASEVKYKEDYERSRGKLIGAKDVQGDSQMSHSLQMSKLQSELEYKKGFEDTKSQCHVSLDMVHLVHARKAQHLATDVGYKTAEHHFTALPTDMKVEWAKKAYGLQSDNQYRADVKWMKGMGWVATGSLNVEQAKKAGELISEKKYRQHPDALKFTSIKDTPEMVQARISYTQAVDRLYREQGENIKHHYTPTADLPEVLLAKLNAMNISETRYKESWSKLRDGGYKLRLDALPFQAAKASGEIISDYKYKEAFEKMKGQMLGSRSLEDDISLAHSVYATSLQSDVNYKKGFEHSKAQFHLPLDMAALVHAKKAQTLASNQDYKHPLPQYTSLAEDLRLSCAKKAHKLQSENLYRSDLNFMRGVACVIPGTLEIEGRKKASELISESKYRQHPHSFKYTAVTDTPNLLHAKFSNQITNERLYKAAGEDARHEYTMTLGLPEFIRAKTNAANLSDARYKESWRNLRAQGYKLTIEALPFQAARASGDIASDFLYRHDFVKERGKLIGPQSVRDDPRIQHCRRMGQLQSELQYRRGATSSQAQFHLPMDMVHLVHAKNAQALASDHDYRTQYHKFTALPEDLKMAWAKKAHALQSELRYKSDLIGMKGIGWLALRSPQMESAKKAGELISETKYRKKPDSIKFTTVVDSPDLVHAKNSYMHCNERMYRSGDAESLHRYTLIPDHPDFTRARLNALHLSDKVYRNSWEQTRAGSYDFRLDAIPFQTARASREIASDFRYKEAFLRDRGLQIGYRSVDDDPRMKHFLNVGRLQSDNEYKKDFAKSRSQFHSSTDQPGLLQAKRSQQLASDVHYRQPLPQPTCDPEQLGLRHAQKAHQLQSDVKYKSDLNLTRGVGWTPPGSYKVEMARRAAELANARGLGLQGAYRGAEAVEAGDHQSGEVNPDATEILHVKKKKALLL

SEQ ID NO: 532 - protein, 1168 aa, Homo sapiens
MGKVGAGGGSQARLSALLAGAGLLILCAPGVCGGGSCCPSPHPSSAPRSASTPRGFSHQGRPGRAPATPLPLVVRPLFSVAPGDRALSLERARGTGASMAVAARSGRRRRSGADQEKAERGEGASRSPRGVLRDGGQQEPGTRERDPDKATRFRMEELRLTSTTFALTGDSAHNQAMVHWSGHNSSVILILTKLYDYNLGSITESSLWRSTDYGTTYEKLNDKVGLKTILSYLYVCPTNKRKIMLLTDPEIESSLLISSDEGATYQKYRLNFYIQSLLFHPKQEDWILAYSQDQKLYSSAEFGRRWQLIQEGVVPNRFYWSVMGSNKEPDLVHLEARTVDGHSHYLTCRMQNCTEANRNQPFPGYIDPDSLIVQDHYVFVQLTSGGRPHYYVSYRRNAFAQMKLPKYALPKDMHVISTDENQVFAAVQEWNQNDTYNLYISDTRGVYFTLALENVQSSRGPEGNIMIDLYEVAGIKGMFLANKKIDNQVKTFITYNKGRDWRLLQAPDTDLRGDPVHCLLPYCSLHLHLKVSENPYTSGIIASKDTAPSIIVASGNIGSELSDTDISMFVSSDAGNTWRQIFEEEHSVLYLDQGGVLVAMKHTSLPIRHLWLSFDEGRSWSKYSFTSIPLFVDGVLGEPGEETLIMTVFGHFSHRSEWQLVKVDYKSIFDRRCAEEDYRPWQLHSQGEACIMGAKRIYKKRKSERKCMQGKYAGAMESEPCVCTEADFDCDYGYERHSNGQCLPAFWFNPSSLSKDCSLGQSYLNSTGYRKVVSNNCTDGVREQYTAKPQKCPGKAPRGLRIVTADGKLTAEQGHNVTLMVQLEEGDVQRTLIQVDFGDGIAVSYVNLSSMEDGIKHVYQNVGIFRVTVQVDNSLGSDSAVLYLHVTCPLEHVHLSLPFVTTKNKEVNATAVLWPSQVGTLTYVWWYGNNTEPLITLEGSISFRFTSEGMNTITVQVSAGNAILQDTKTIAVYEEFRSLRLSFSPNLDDYNPDIPEWRRDIGRVIKKSLVEATGVPGQHILVAVLPGLPTTAELFVLPYQDPAGENKRSTDDLEQISELLIHTLNQNSVHFELKPGVRVLVHAAHLTAAPLVDLTPTHSGSAMLMLLSVVFVGLAVFVIYKFKRRVALPSPPSPSTQPGDSSLRLQRARHATPPSTPKRGSAGAQYAI

SEQ ID NO: 533 - protein, 335 aa, Homo sapiens
MRVENPAKCDGEVSTWSAMVRSLDIILFVMGTVPRTEENGKQKTGHFLQVARNLIFLSSMSLQSLRETKIYTLKKRVVESVFLNMIACRKIGFKFSECFRSRQRRARAATFVLGPLSPLLFAPAMGKVGAGGGSQARLSALLAGAGLLILCAPGVCGGGSCCPSPHPSSAPRSASTPRGFSHQGRPGRAPATPLPLVVRPLFSVAPGDRALSLERARGTGASMAVAARSGRRRRSGADQEKAERGEGASRSPRGVLRDGGQQEPGTRERDPDKATRFRMEELRLTSTTFALTGDSAHNQAMVHWSGHNSSNAKQSGDLNSSSAYLWFDRGKLSVR

SEQ ID NO: 534 - protein, 541 aa, Homo sapiens [sequence omitted]

SEQ ID NO: 535 - protein, 2541 aa, Homo sapiens [sequence omitted]

SEQ ID NO: 536 - protein, 2541 aa, Homo sapiens
MVALSLKISIGNVVKTMQFEPSTMVYDACRIIRERIPEAPAGPPSDFGLFLSDDDPKKGIWLEAGKALDYYMLRNGDTMEYRKKQRPLKIRMLDGTVKTIMVDDSKTVTDMLMTICARIGITNHDEYSLVRELMEEKKEEITGTLRKDKTLLRDEKKMEKLKQKLHTDDELNWLDHGRTLREQGVEEHETLLLRRKFFYSDQNVDSRDPVQLNLLYVQARDDILNGSHPVSFDKACEFAGFQCQIQFGPHNEQKHKAGFLDLKDFLPKEYVKQKGERKIFQAHKNCGQMSEIEAKVRYVKLARSLKTYGVSFFLVKEKMKGKNKLVPRLLGITKECVMRVDEKTKEVIQEWNLTNIKRWAASPKSFTLDFGDYQDGYYSVQTTEGEQIAQLIAGYIDIILKKKKSKDHFGLEGDEESTMLEDSVSPKKSTVLQQQYNRVGKVEHGSVALPAIMRSGASGPENFQVGSMPPAQQQITSGQMHRGHMPPLTSAQQALTGTINSSMQAVQAAQATLDDFDTLPPLGQDAASKAWRKNKMDESKHEIHSQVDAITAGTASVVNLTAGDPAETDYTAVGCAVTTISSNLTEMSRGVKLLAALLEDEGGSGRPLLQAAKGLAGAVSELLRSAQPASAEPRQNLLQAAGNVGQASGELLQQIGESDTDPHFQDALMQLAKAVASAAAALVLKAKSVAQRTEDSGLQTQVIAAATQCALSTSQLVACTKVVAPTISSPVCQEQLVEAGRLVAKAVEGCVSASQAATEDGQLLRGVGAAATAVTQALNELLQHVKAHATGAGPAGRYDQATDTILTVTENIFSSMGDAGEMVRQARILAQATSDLVNAIKADAEGESDLENSRKLLSAAKILADATAKMVEAAKGAAAHPDSEEQQQRLREAAEGLRMATNAAAQNAIKKKLVQRLEHAAKQAAASATQTIAAAQHAASTPKASAGPQPLLVQSCKAVAEQIPLLVQGVRGSQAQPDSPSAQLALIAASQSFLQPGGKMVAAAKASVPTIQDQASAMQLSQCAKNLGTALAELRTAAQKAQEACGPLEMDSALSVVQNLEKDLQEVKAAARDGKLKPLPGETMEKCTQDLGNSTKAVSSAIAQLLGEVAQGNENYAGIAARDVAGGLRSLAQAARGVAALTSDPAVQAIVLDTASDVLDKASSLIEEAKKAAGHPGDPESQQRLAQVAKAVTQALNRCVSCLPGQRDVDNALRAVGDASKRLLSDSLPPSTGTFQEAQSRLNEAAAGLNQAATELVQASRGTPQDLARASGRFGQDFSTFLEAGVEMAGQAPSQEDRAQVVSNLKGISMSSSKLLLAAKALSTDPAAPNLKSQLAAAARAVTDSINQLITMCTQQAPGQKECDNALRELETVRELLENPVQPINDMSYFGCLDSVMENSKVLGEAMTGISQNAKNGNLPEFGDAISTASKALCGFTEAAAQAAYLVGVSDPNSQAGQQGLVEPTQFARANQAIQMACQSLGEPGCTQAQVLSAATIVAKHTSALCNSCRLASARTTNPTAKRQFVQSAKEVANSTANLVKTIKALDGAFTEENRAQCRAATAPLLEAVDNLSAFASNPEFSSIPAQISPEGRAAMEPIVISAKTMLESAGGLIQTARALAVNPRDPPSWSVLAGHSRTVSDSIKKLITSMRDKAPGQLECETAIAALNSCLRDLDQASLAAVSQQLAPREGISQEALHTQMLTAVQEISHLIEPLANAARAEASQLGHKVSQMAQYFEPLTLAAVGAASKTLSHPQQMALLDQTKTLAESALQLLYTAKEAGGNPKQAAHTQEALEEAVQMMTEAVEDLTTTLNEAASAAGVVGGMVDSITQAINQLDEGPMGEPEGSFVDYQTTMVRTAKAIAVTVQEMVTKSNTSPEELGPLANQLTSDYGRLASEAKPAAVAAENEEIGSHIKHRVQELGHGCAALVTKAGALQCSPSDAYTKKELIECARRVSEKVSHVLAALQAGNRGTQACITAASAVSGIIADLDTTIMFATAGTLNREGTETFADHREGILKTAKVLVEDTKVLVQNAAGSQEKLAQAAQSSVATITRLADVVKLGAASLGAEDPETQVVLINAVKDVAKALGDLISATKAAAGKVGDDPAVWQLKNSAKVMVTNVTSLLKTVKAVEDEATKGTRALEATTEHIRQELAVFCSPEPPAKTSTPEDFIRMTKGITMATAKAVAAGNSCRQEDVIATANLSRRAIADMLRACKEAAYHPEVAPDVRLRALHYGRECANGYLELLDHVLLTLQKPSPELKQQLTGHSKRVAGSVTELIQAAEAMKGTEWVDPEDPTVIAENELLGAAAAIEAAAKKLEQLKPRAKPKEADESLNFEEQILEAAKSIAAATSALVKAASAAQRELVAQGKVGAIPANALDDGQWSQGLISAARMVAAATNNLCEAANAAVQGHASQEKLISSAKQVAASTAQLLVACKVKADQDSEAMKRLQAAGNAVKRASDNLVKAAQKAAAFEEQENETVVVKEKMVGGIAQIIAAQEEMLRKERELEEARKKLAQIRQQQYKFLPSELRDEH

SEQ ID NO: 537 - protein, 2302 aa, Homo sapiens
MTSEEMTASVLIPVTQRKVVSAQSAADESSEKVSDINISKAHTVRRSGETSHTISQLNKLKEEPSGSNLPKILSIAREKIVSDENSNEKCWEKIMPDSAKNLNINCNNILRNHQHGLPQRQFYEMYNSVAEEDLCLETGIPSPLERKVFPGIQLELDRPSMGISPLGNQSVIIETGRAHPDSRRAVFHFHYEVDRRMSDTFCTLSENLILDDCGNCVPLPGGEEKQKKNYVAYTCKLMELAKNCDNKNEQLQCDHCDTLNDKYFCFEGSCEKVDMVYSGDSFCRKDFTDSQAAKTFLSHFEDFPDNCDDVEEDAFKSKKERSTLLVRRFCKNDREVKKSVYTGTRAIVRTLPSGHIGLTAWSYIDQKRNGPLLPCGRVMEPPSTVEIRQDGSQRLSEAQWYPIYNAVRREETENTVGSLLHFLTKLPASETAHGRISVGPCLKQCVRDTVCEYRATLQRTSISQYITGSLLEATTSLGARSGLLSTFGGSTGRMMLKERQPGPSVANSNALPSSSAGISKELIDLQPLIQFPEEVASILMEQEQTIYRRVLPVDYLCFLTRDLGTPECQSSLPCLKASISASILTTQNGEHNALEDLVMRFNEVSSWVTWLILTAGSMEEKREVFSYLVHVAKCCWNMGNYNAVMEFLAGLRSRKVLKMWQFMDQSDIETMRSLKDAMAQHESSCEYRKVVTRALHIPGCKVVPFCGVFLKELCEVLDGASGLMKLCPRYNSQEETLEFVADYSGQDNFLQRVGQNGLKNSEKESTVNSIFQVIRSCNRSLETDEEDSPSEGNSSRKSSLKDKSRWQFIIGDLLDSDNDIFEQSKEYDSHGSEDSQKAFDHGTELIPWYVLSIQADVHQFLLQGATVIHYDQDTHLSARCFLQLQPDNSTLTWVKPTTASPASSKAKLGVLNNTAEPGKFPLLGNAGLSSLTEGVLDLFAVKAVYMGHPGIDIHTVCVQNKLGSMFLSETGVTLLYGLQTTDNRLLHFVAPKHTAKMLFSGLLELTRAVRKMRKFPDQRQQWLRKQYVSLYQEDGRYEGPTLAHAVELFGGRRWSARNPSPGTSAKNAEKPNMQRNNTLGISTTKKKKKILMRGESGEVTDDEMATRKAKMHKECRSRSGSDPQDINEQEESEVNAIANPPNPLPSRRAHSLTTAGSPNLAAGTSSPIRPVSSPVLSSSNKSPSSAWSSSSWHGRIKGGMKGFQSFMVSDSNMSFVEFVELFKSFSVRSRKDLKDLFDVYAVPCNRSGSESAPLYTNLTIDENTSDLQPDLDLLTRNVSDLGLFIKSKQQLSDNQRQISDAIAAASIVTNGTGIESTSLGIFGVGILQLNDFLVNCQGEHCTYDEILSIIQKFEPSISMCHQGLMSFEGFARFLMDKENFASKNDESQENIKELQLPLSYYYIESSHNTYLTGHQLKGESSVELYSQVLLQGCRSVELDCWDGDDGMPIIYHGHTLTTKIPFKEVVEAIDRSAFINSDLPIIISIENHCSLPQQRKMAEIFKTVFGEKLVTKFLFETDFSDDPMLPSPDQLRKKVLLKNKKLKAHQTPVDILKQKAHQLASMQVQAYNGGNANPRPANNEEEEDEEDEYDYDYESLSDDNILEDRPENKSCNDKLQFEYNEEIPKRIKKADNSACNKGKVYDMELGEEFYLDQNKKESRQIAPELSDLVIYCQAVKFPGLSTLNASGSSRGKERKSRKSIFGNNPGRMSPGETASFNKTSGKSSCEGIRQTWEESSSPLNPTTSLSAIIRTPKCYHISSLNENAAKRLCRRYSQKLTQHTACQLLRTYPAATRIDSSNPNPLMFWLHGIQLVALNYQTDDLPLHLNAAMFEANGGCGYVLKPPVLWDKNCPMYQKFSPLERDLDSMDPAVYSLTIVSGQNVCPSNSMGSPCIEVDVLGMPLDSCHFRTKPIHRNTLNPMWNEQFLFHVHFEDLVFLRFAVVENNSSAVTAQRIIPLKALKRGYRHLQLRNLHNEVLEISSLFINSRRMEENSSGNTMSASSMFNTEERKCLQTHRVTVHGVPGPEPFTVFTINGGTKAKQLLQQILTNEQDIKPVTTDYFLMEEKYFISKEKNECRKQPFQRAIGPEEEIMQILSSWFPEEGYMGRIVLKTQQENLEEKNIVQDDKEVILSSEEESFFVQVHDVSPEQPRTVIKAPRVSTAQDVIQQTLCKAKYSYSILSNPNPSDYVLLEEVVKDTTNKKTTTPKSSQRVLLDQECVFQAQSKWKGAGKFILKLKEQVQASREDKKKGISFASELKKLTKSTKQPRGLTSPSQLLTSESIQTKEEKPVGGLSSSDTMDYRQ

SEQ ID NO: 538 - protein, 1994 aa, Homo sapiens
MVSEGSAAGRDFAGMEEVRQLHVRFCKGIKIWHQAWFLCSLLGREPQEREAGCQLWLCTLSAVLKVGWLFPLSEVPNFTLLKDGCGCWRLKEDQIYNAVRREETENTVGSLLHFLTKLPASETAHGRISVGPCLKQCVRDTVCEYRATLQRTSISQYITGSLLEATTSLGARSGLLSTFGGSTGRMMLKERQPGPSVANSNALPSSSAGISKELIDLQPLIQFPEEVASILMEQEQTIYRRVLPVDYLCFLTRDLGTPECQSSLPCLKASISASILTTQNGEHNALEDLVMRFNEVSSWVTWLILTAGSMEEKREVFSYLVHVAKCCWNMGNYNAVMEFLAGLRSRKVLKMWQFMDQSDIETMRSLKDAMAQHESSCEYRKVVTRALHIPGCKVVPFCGVFLKELCEVLDGASGLMKLCPRYNSQEETLEFVADYSGQDNFLQRVGQNGLKNSEKESTVNSIFQVIRSCNRSLETDEEDSPSEGNSSRKSSLKDKSRWQFIIGDLLDSDNDIFEQSKEYDSHGSEDSQKAFDHGTELIPWYVLSIQADVHQFLLQGATVIHYDQDTHLSARCFLQLQPDNSTLTWVKPTTASPASSKAKLGVLNNTAEPGKFPLLGNAGLSSLTEGVLDLFAVKAVYMGHPGIDIHTVCVQNKLGSMFLSETGVTLLYGLQTTDNRLLHFVAPKHTAKMLFSGLLELTRAVRKMRKFPDQRQQWLRKQYVSLYQEDGRYEGPTLAHAVELFGGRRWSARNPSPGTSAKNAEKPNMQRNNTLGISTTKKKKKILMRGESGEVTDDEMATRKAKMHKECRSRSGSDPQDINEQEESEVNAIANPPNPLPSRRAHSLTTAGSPNLAAGTSSPIRPVSSPVLSSSNKSPSSAWSSSSWHGRIKGGMKGFQSFMVSDSNMSFVEFVELFKSFSVRSRKDLKDLFDVYAVPCNRSGSESAPLYTNLTIDENTSDLQPDLDLLTRNVSDLGLFIKSKQQLSDNQRQISDAIAAASIVTNGTGIESTSLGIFGVGILQLNDFLVNCQGEHCTYDEILSIIQKFEPSISMCHQGLMSFEGFARFLMDKENFASKNDESQENIKELQLPLSYYYIESSHNTYLTGHQLKGESSVELYSQVLLQGCRSVELDCWDGDDGMPIIYHGHTLTTKIPFKEVVEAIDRSAFINSDLPIIISIENHCSLPQQRKMAEIFKTVFGEKLVTKFLFETDFSDDPMLPSPDQLRKKVLLKNKKLKAHQTPVDILKQKAHQLASMQVQAYNGGNANPRPANNEEEEDEEDEYDYDYESLSDDNILEDRPENKSCNDKLQFEYNEEIPKRIKKADNSACNKGKVYDMELGEEFYLDQNKKESRQIAPELSDLVIYCQAVKFPGLSTLNASGSSRGKERKSRKSIFGNNPGRMSPGETASFNKTSGKSSCEGIRQTWEESSSPLNPTTSLSAIIRTPKCYHISSLNENAAKRLCRRYSQKLTQHTACQLLRTYPAATRIDSSNPNPLMFWLHGIQLVALNYQTDDLPLHLNAAMFEANGGCGYVLKPPVLWDKNCPMYQKFSPLERDLDSMDPAVYSLTIVSGQNVCPSNSMGSPCIEVDVLGMPLDSCHFRTKPIHRNTLNPMWNEQFLFHVHFEDLVFLRFAVVENNSSAVTAQRIIPLKALKRGYRHLQLRNLHNEVLEISSLFINSRRMEENSSGNTMSASSMFNTEERKCLQTHRVTVHGVPGPEPFTVFTINGGTKAKQLLQQILTNEQDIKPVTTDYFLMEEKYFISKEKNECRKQPFQRAIGPEEEIMQILSSWFPEEGYMGRIVLKTQQENLEEKNIVQDDKEVILSSEEESFFVQVHDVSPEQPRTVIKAPRVSTAQDVIQQTLCKAKYSYSILSNPNPSDYVLLEEVVKDTTNKKTTTPKSSQRVLLDQECVFQAQSKWKGAGKFILKLKEQVQASREDKKKGISFASELKKLTKSTKQPRGLTSPSQLLTSESIQTKEEKPVGGLSSSDTMDYRQ

SEQ ID NO: 539 - protein, 2303 aa, Homo sapiens
MTSEEMTASVLIPVTQRKVVSAQSAADESSEKVSDINISKAHTVRRSGETSHTISQLNKLKEEPSGSNLPKILSIAREKIVSDENSNEKCWEKIMPDSAKNLNINCNNILRNHQHGLPQRQFYEMYNSVAEEDLCLETGIPSPLERKVFPGIQLELDRPSMGISPLGNQSVIIETGRAHPDSRRAVFHFHYEVDRRMSDTFCTLSENLILDDCGNCVPLPGGEEKQKKNYVAYTCKLMELAKNCDNKNEQLQCDHCDTLNDKYFCFEGSCEKVDMVYSGDSFCRKDFTDSQAAKTFLSHFEDFPDNCDDVEEDAFKSKKERSTLLVRRFCKNDREVKKSVYTGTRAIVRTLPSGHIGLTAWSYIDQKRNGPLLPCGRVMEPPSTVEIRQDGSQRLSEAQWYPIYNAVRREETENTVGSLLHFLTKLPASETAHGRISVGPCLKQCVRDTVCEYRATLQRTSISQYITGSLLEATTSLGARSGLLSTFGGSTGRMMLKERQPGPSVANSNALPSSSAGISKELIDLQPLIQFPEEVASILMEQEQTIYRRVLPVDYLCFLTRDLGTPECQSSLPCLKASISASILTTQNGEHNALEDLVMRFNEVSSWVTWLILTAGSMEEKREVFSYLVHVAKCCWNMGNYNAVMEFLAGLRSRKVLKMWQFMDQSDIETMRSLKDAMAQHESSCEYRKVVTRALHIPGCKVVPFCGVFLKELCEVLDGASGLMKLCPRYNSQEETLEFVADYSGQDNFLQRVGQNGLKNSEKESTVNSIFQVIRSCNRSLETDEEDSPSEGNSSRKSSLKDKSRWQFIIGDLLDSDNDIFEQSKEYDSHGSEDSQKAFDHGTELIPWYVLSIQADVHQFLLQGATVIHYDQDTHLSARCFLQLQPDNSTLTWVKPTTASPASSKAKLGVLNNTAEPGKFPLLGNAGLSSLTEGVLDLFAVKAVYMGHPGIDIHTVCVQNKLGSMFLSETGVTLLYGLQTTDNRLLHFVAPKHTAKMLFSGLLELTRAVRKMRKFPDQRQQWLRKQYVSLYQEDGRYEGPTLAHAVELFGGRRWSARNPSPGTSAKNAEKPNMQRNNTLGISTTKKKKKILMRGESGEVTDDEMATRKAKMHKECRSRSGSDPQDINEQEESEVNAIANPPNPLPSRRAHSLTTAGSPNLAAGTSSPIRPVSSPVLSSSNKSPSSAWSSSSWHGRIKGGMKGFQSFMVSDSNMSFVEFVELFKSFSVRSRKDLKDLFDVYAVPCNRSGSESAPLYTNLTIDENTSDLQPDLDLLTRNVSDLGLFIKSKQQLSDNQRQISDAIAAASIVTNGTGIESTSLGIFGVGILQLNDFLVNCQGEHCTYDEILSIIQKFEPSISMCHQGLMSFEGFARFLMDKENFASKNDESQENIKELQLPLSYYYIESSHNTYLTGHQLKGESSVELYSQVLLQGCRSVELDCWDGDDGMPIIYHGHTPTTKIPFKEVVEAIDRSAFINSDLPIIISIENHCSLPQQRKMAEIFKTVFGEKLVTKFLFETDFSDDPMLPSPDQLRKKVLLKNKKLKAHQTPVDILKQKAHQLASMQVQAYNGGNANPRPANNEEEEDEEDEYDYDYESLSDDNILEDRPENKSCNDKLQFEYNEEIPKRIKKADNSACNKGKVYDMELGEEFYLDQNKKESRQIAPELSDLVIYRQAVKFPGLSTLNASGSSRGKERKSRKSIFGNNPGRMSPGETASFNKTSGKSSCEGIRQTWEESSSPLNPTTSLSAIIRTPKCYHISSLNENAAKRLCRRYSQKLIQHTACQLLRTYPAATRIDSSNPNPLMFWLHGIQLVALNYQTDDLPLHLNAAMFEANGGCGYVLKPPVLWDKNCPMYQKFSPLERDLDSMDPAVYSLTIVSGQNVCPSNSMGSPCIEVDVLGMPLDSCHFRTKPIHRNTLNPMWNEQFLFRVHFEDLVFLRFAVVENNSSAVTAQRIIPLKALKRGYRHLQLRNLHNEVLEISSLFINSRRMEENSSGNTMSASSMFNTEERKCLQTHRVTVHGVPGPEPFTVFTINGGTKAKQLLQQILTNEQDIKPVTTDYFLMEEKYFISKEKNECRKQPFQRAIGPEEEIMQILSSWFPEEGYMGRIVLKTQQENLEEKNIVQDDKEVILSSEEESFFVQVHDVSPEQPRTVIKAPRVSTAQDVIQQTLCKAKYSYSILSNPNPSDYVLLEEVVKDTTNKKTTTPKSSQRVLLDQECVFQAQSKWKGAGKFILKLKEQVQASREDKKKGISFASELKKLTKSTKQPRGLTSPSQLLTSESIQTKEEKPVGGLSPVTQWITDSD

SEQ ID NO: 540 - protein, 73 aa, Homo sapiens
MLWTLGPETQIQGKEEATCAVLILELNKEWSGEETNKKCNLPPELRNSGTLKDIRNNEIWIGRSIFTTIFRCN

SEQ ID NO: 541 - protein, 1752 aa, Homo sapiens [sequence omitted]

SEQ ID NO: 542 - protein, 1865 aa, Homo sapiens
MTRWVPTKREEKYGVAFYNYDARGADELSLQIGDTVHILETYEGWYRGYTLRKKSKKGIFPASYIHLKEAIVEGKGQHETVIPGDLPLIQEVTTTLREWSTIWRQLYVQDNREMFRSVRHMIYDLIEWRSQILSGTLPQDELKELKKKVTAKIDYGNRILDLDLVVRDEDGNILDPELTSTISLFRAHEIASKQVEERLQEEKSQKQNIDINRQAKFAATPSLALFVNLKNVVCKIGEDAEVLMSLYDPVESKFISENYLVRWSSSGLPKDIDRLHNLRAVFTDLGSKDLKREKISFVCQIVRVGRMELRDNNTRKLTSGLRRPFGVAVMDVTDIINGKVDDEDKQHFIPFQPVAGENDFLQTVINKVIAAKEVNHKGQGLWVTLKLLPGDIHQIRKEFPHLVDRTTAVARKTGFPEIIMPGDVRNDIYVTLVQGDFDKGSKTTAKNVEVTVSVYDEDGKRLEHVIFPGAGDEAISEYKSVIYYQVKQPRWFETVKVAIPIEDVNRSHLRFTFRHRSSQDSKDKSEKIFALAFVKLMRYDGTTLRDGEHDLIVYKAEAKKLEDAATYLSLPSTKAELEEKGHSATGKSMQSLGSCTISKDSFQISTLVCSTKLTQNVDLLGLLKWRSNTSLLQQNLRQLMKVDGGEVVKFLQDTLDALFNIMMENSESETFDTLVFDALVFIIGLIADRKFQHFNPVLETYIKKHFSATLAYTKLTKVLKNYVDGAEKPGVNEQLYKAMKALESIFKFIVRSRILFNQLYENKGEADFVESLLQLFRSINDMMSSMSDQTVRVKGAALKYLPTIVNDVKLVFDPKELSKMFTEFILNVPMGLLTIQKLYCLIEIVHSDLFTQHDCREILLPMMTDQLKYHLERQEDLEACCQLLSHILEVLYRKDVGPTQRHVQIIMEKLLRTVNRTVISMGRDSELIGNFVACMTAILRQMEDYHYAHLIKTFGKMRTDVVDFLMETFIMFKNLIGKNVYPFDWVIMNMVQNKVFLRAINQYADMLNKKFLDQANFELQLWNNYFHLAVAFLTQESLQLENFSSAKRAKILNKYGDMRRQIGFEIRDMWYNLGQHKIKFIPEMVGPILEMTLIPETELRKATIPIFFDMMQCEFHSTRSFQMFENEIITKLDHEVEGGRGDEQYKVLFDKILLEHCRKHKYLAKTGETFVKLVVRLMERLLDYRTIMHDENKENRMSCTVNVLNFYKEIEREEMYIRYLYKLCDLHKECDNYTEAAYTLLLHAKLLKWSEDVCVAHLTQRDGYQATTQGQLKEQLYQEIIHYFDKGKMWEEAIALGKELAEQYENEMFDYEQLSELLKKQAQFYENIVKVIRPKPDYFAVGYYGQGFPTFLRGKVFIYRGKEYERREDFEARLLTQFPNAEKMKTTSPPGDDIKNSPGQYIQCFTVKPKLDLPPKFHRPVSEQIVSFYRVNEVQRFEYSRPIRKGEKNPDNEFANMWIERTIYTTAYKLPGILRWFEVKSVFMVEISPLENAIETMQLTNDKINSMVQQHLDDPSLPINPLSMLLNGIVDPAVMGGFANYEKAFFTDRYLQEHPEAHEKIEKLKDLIAWQIPFLAEGIRIHGDKVTEALRPFHERMEACFKQLKEKVEKEYGVRIMPSSLDDRRGSRPRSMVRSFTMPSSSRPLSVASVSSLSSDSTPSRPGSDGFALEPLLPKKMHSRSQDKLDKDDLEKEKKDKKKEKRNSKHQEIFEKEFKPTDISLQQSEAVILSETISPLRPQRPKSQVMNVIGSERRFSVSPSSPSSQQTPPPVTPRAKLSFSMQSSLELNGMTGADVADVPPPLPLKGSVADYGNLMENQDLLGSPTPPPPPPHQRHLPPPLPSKTPPPPPPKTTRKQTSVDSGIVQ

SEQ ID NO: 543 - protein, 122 aa, Homo sapiens
MTPARQLRQPRPLSQRSERASSPTATHRNRLPTSSARVSTAIAVAAEAAAASSSAREPMKPHSYRPLMLRRADRDTAADPKERRLGTNRPLCPGHSDLGPSPQTLLWTPRFAALCCSATQEN

SEQ ID NO: 544 - protein, 343 aa, Homo sapiens
MKLAHGFEILCSKCSPHFSDCKKSLVTASPLWASFLESLKKNDYFKGLIEGSAQYRERLEMAENYFQLSVDWPESSLAMSPGEEILTLLQTIPFDIEDLKKEAANLPPEDDDQWLDLSPDQLDQLLQEAVGKKESESVSKEEKEQNYDLTEVSESMKAFISKVSTHKGAELPREPSEAPITFDADSFLNYFDKILGPRPNESDSDDLDDEDFECLDSDDDLDFETHEPGEEASLKGTLDNLKSYMAQMDQELAHTCISKSFTTRNQVEPVSQTTDNNSDEEDSGTGESVMAPVDVDLNLVSNILESYSSQAGLAGPASNLLQSMGVQLPDNTDHRPTSKPTKN

SEQ ID NO: 545 - protein, 580 aa, Homo sapiens
MEETMKLATMEDTVEYCLFLIPDESRDSDKHKEILQKYIERIITRFAPMLVPYIWQNQPFNLKYKPGKGGVPAHMFGVTKFGDNIEDEWFIVYVIKQITKEFPELVARIEDNDGEFLLIEAADFLPKWLDPENSTNRVFFCHGELCIIPAPRKSGAESWLPTTPPTIPQALNIITAHSEKILASESIRAAVNRRIRGVTFTKCLYAQLVQQRFVPDRRSGYRLPPPSDPQYRAHELGMKLAHGFEILCSKCSPHFSDCKKSLVTASPLWASFLESLKKNDYFKGLIEGSAQYRERLEMAENYFQLSVDWPESSLAMSPGEEILTLLQTIPFDIEDLKKEAANLPPEDDDQWLDLSPDQLDQLLQEAVGKKESESVSKEEKEQNYDLTEVSESMKAFISKVSTHKGAELPREPSEAPITFDADSFLNYFDKILGPRPNESDSDDLDDEDFECLDSDDDLDFETHEPGEEASLKGTLDNLKSYMAQMDQELAHTCISKSFTTRNQVEPVSQTTDNNSDEEDSGTGESVMAPVDVDLNLVSNILESYSSQAGLAGPASNLLQSMGVQLPDNTDHRPTSKPTKN

SEQ ID NO: 546 - protein, 805 aa, Homo sapiens
MNAVGSPEGQELQKLGSGAWDNPAYSGPPSPHGTLRVCTISSTGPLQPQPKKPEDEPQETAYRTQVSSCCLHICQGIRGLWGTTLTENTAENRELYIKTTLRELLVYIVFLVDICLLTYGMTSSSAYYYTKVMSELFLHTPSDTGVSFQAISSMADFWDFAQGPLLDSLYWTKWYNNQSLGHGSHSFIYYENMLLGVPRLRQLKVRNDSCVVHEDFREDILSCYDVYSPDKEEQLPFGPFNGTAWTYHSQDELGGFSHWGRLTSYSGGGYYLDLPGSRQGSAEALRALQEGLWLDRGTRVVFIDFSVYNANINLFCVLRLVVEFPATGGAIPSWQIRTVKLIRYVSNWDFFIVGCEVIFCVFIFYYVVEEILELHIHRLRYLSSIWNILDLVVILLSIVAVGFHIFRTLEVNRLMGKLLQQPNTYADFEFLAFWQTQYNNMNAVNLFFAWIKIFKYISFNKTMTQLSSTLARCAKDILGFAVMFFIVFFAYAQLGYLLFGTQVENFSTFIKCIFTQFRIILGDFDYNAIDNANRILGPAYFVTYVFFVFFVLLNMFLAIINDTYSEVKEELAGQKDELQLSDLLKQGYNKTLLRLRLRKERVSDVQKVLQGGEQEIQFEDFTNTLRELGHAEHEITELTATFTKFDRDGNRILDEKEQEKMRQDLEEERVALNTEIEKLGRSIVSSPQGKSGPEAARAGGWVSGEEFYMLTRRVLQLETVLEGVVSQIDAVGSKLKMLERKGWLAPSPGVKEQAIWKHPQPAPAVTPDPWGVQGGQESEVPYKREEEALEERRLSRGEIPTLQRS

SEQ ID NO: 547 - protein, 865 aa, Homo sapiens
MNAVGSPEGQELQKLGSGAWDNPAYSGPPSPHGTLRVCTISSTGPLQPQPKKPEDEPQETAYRTQVSSCCLHICQGIRGLWGTTLTENTAENRELYIKTTLRELLVYIVFLVDICLLTYGMTSSSAYYYTKVMSELFLHTPSDTGVSFQAISSMADFWDFAQGPLLDSLYWTKWYNNQSLGHGSHSFIYYENMLLGVPRLRQLKVRNDSCVVHEDFREDILSCYDVYSPDKEEQLPFGPFNGTAWTYHSQDELGGFSHWGRLTSYSGGGYYLDLPGSRQGSAEALRALQEGLWLDRGTRVVFIDFSVYNANINLFCVLRLVVEFPATGGAIPSWQIRTVKLIRYVSNWDFFIVGCEVIFCVFIFYYVVEEILELHIHRLRYLSSIWNILDLVVILLSIVAVGFHIFRTLEVNRLMGKLLQQPNTYADFEFLAFWQTQYNNMNAVNLFFAWIKIFKYISFNKTMTQLSSTLARCAKDILGFAVMFFIVFFAYAQLGYLLFGTQVENFSTFIKCIFTQFRIILGDFDYNAIDNANRILGPAYFVTYVFFVFFVLLNCAERLGSGDPERQGLMGCRTGVESTDPFGTRVLDINGVSGLNPFSGSGGEDPGPHFIFQNMFLAIINDTYSEVKEELAGQKDELQLSDLLKQGYNKTLLRLRLRKERVSDVQKVLQGGEQEIQFEDFTNTLRELGHAEHEITELTATFTKFDRDGNRILDEKEQEKMRQDLEEERVALNTEIEKLGRSIVSSPQGKSGPEAARAGGWVSGEEFYMLTRRVLQLETVLEGVVSQIDAVGSKLKMLERKGWLAPSPGVKEQAIWKHPQPAPAVTPDPWGVQGGQESEVPYKREEEALEERRLSRGEIPTLQRS

SEQ ID NO: 548 - protein, 538 aa, Homo sapiens
MAQKPLRLLACGDVEGKFDILFNRVQAIQKKSGNFDLLLCVGNFFGSTQDAEWEEYKTGIKKAPIQTYVLGANNQETVKYFQDADGCELAENITYLGRKGIFTGSSGLQIVYLSGTESLNEPVPGYSFSPKDVSSLRMMLCTTSQFKGVDILLTSPWPKCVGNFGNSSGEVDTKKCGSALVSSLATGLKPRYHFAALEKTYYERLPYRNHIILQENAQHATRFIALANVGNPEKKKYLYAFSIVPMKLMDAAELVKQPPDVTENPYRKSGQEASIGKQILAPVEESACQFFFDLNEKQGRKRSSTGRDSKSSPHPKQPRKPPQPPGPCWFCLASPEVEKHLVVNIGTHCYLALAKGGLSDDHVLILPIGHYQSVVELSAEVVEEVEKYKATLRRFFKSRGKWCVVFERNYKSHHLQLQVIPVPISCSTTDDIKDAFITQAQEQQIELLEIPEHSDIKQIAQPGAAYFYVELDTGEKLFHRIKKNFPLQFGREVLASEAILNVPDKSDWRQCQISKEDEETLARRFRKDFEPYDFTLDD

SEQ ID NO: 549 - protein, 293 aa, Homo sapiens
MKLMDAAELVKQPPDVTENPYRKSGQEASIGKQILAPVEESACQFFFDLNEKQGRKRSSTGRDSKSSPHPKQPRKPPQPPGPCWFCLASPEVEKHLVVNIGTHCYLALAKGGLSDDHVLILPIGHYQSVVELSAEVVEEVEKYKATLRRFFKSRGKWCVVFERNYKSHHLQLQVIPVPISCSTTDDIKDAFITQAQEQQIELLEIPEHSDIKQIAQPGAAYFYVELDTGEKLFHRIKKNFPLQFGREVLASEAILNVPDKSDWRQCQISKEDEETLARRFRKDFEPYDFTLDD

SEQ ID NO: 550 - protein, 538 aa, Homo sapiens; identical to SEQ ID NO: 548

SEQ ID NO: 551 - protein, 995 aa, Homo sapiens
MELFHMTSGGDAAMFRDGKEPQPSAEAAAAPSLANISCFTQKLVEKLYSGMFSADPRHILLFILEHIMVVIETASSQRDTVLSTLYSSLNKVILYCLSKPQQSLSECLGLLSILGFLQEHWDVVFATYNSNISFLLCLMHCLLLLNERSYPEGFGLEPKPRMSTYHQVFLSPNEDVKEKREDLPSLSDVQHNIQKTVQTLWQQLVAQRQQTLEDAFKIDLSVKPGEREVKIEEVTPLWEETMLKAWQHYLASEKKSLASRSNVAHHSKVTLWSGSLSSAMKLMPGRQAKDPECKTEDFVSCIENYRRRGQELYASLYKDHVQRRKCGNIKAANAWARIQEQLFGELGLWSQGEETKPCSPWELDWREGPARMRKRIKRLSPLEALSSGRHKESQDKNDHISQTNAENQDELTLREAEGEPDEVGVDCTQLTFFPALHESLHSEDFLELCRERQVILQELLDKEKVTQKFSLVIVQGHLVSEGVLLFGHQHFYICENFTLSPTGDVYCTRHCLSNISDPFIFNLCSKDRSTDHYSCQCHSYADMRELRQARFLLQDIALEIFFHNGYSKFLVFYNNDRSKAFKSFCSFQPSLKGKATSEDTLNLRRYPGSDRIMLQKWQKRDISNFEYLMYLNTAAGRTCNDYMQYPVFPWVLADYTSETLNLANPKIFRDLSKPMGAQTKERKLKFIQRFKEVEKTEGDMTVQCHYYTHYSSAIIVASYLVRMPPFTQAFCALQGGSFDVADRMFHSVKSTWESASRENMSDVRELTPEFFYLPEFLTNCNGVEFGCMQDGTVLGDVQLPPWADGDPRKFISLHRKALESDFVSANLHHWIDLIFGYKQQGPAAVDAVNIFHPYFYGDRMDLSSITDPLIKSTILGFVSNFGQVPKQLFTKPHPARTAAGKPLPGKDVSTPVSLPGHPQPFFYSLQSLRPSQVTVKGDSLAMHCLVSCPRVVPSVAGFLWRSSTTYLGKVLGTDFEWLHLQSQPDSRGVSSLGSV

SEQ ID NO: 552 - protein, 662 aa, Homo sapiens
MSVVGPVSVKAECVCLLSEEIQCSLASHIQSLVKSEKNRQVMCEAGLLGTLMASCHRALVTSGSPLHSRLIRIFEKLASQAIEPDVLSCLFIPTLSTVMGTSTEYSVSGGIGTGATRPFPPPGGLTFSCWFLISRHGAATEGHPLRFLTLVRHLARTEQPFVCFSVSLCPDDLSLVVSTEEKEFQPLGKNIGRPYETVEAADTLVHSTTAYPTLWDSAYNGVSVECSTTRETQCSCCLPDVMEPEDDSEPSAGCQLQMLYIQALPGPFLSMDPSAFVDVYGYIATPRVWKQKSSLIWRLGPTYLFEEAISMETLEVINKLGPRYCGNFQAVHVQGEDLDSEATPFVAEERVSFGLHIASSSITSVADIRNAYNEVDSRLIAKEMNISSRDNAMPVFLLRNCAGHLSGSLRTIGAVAVGQLGVRVFHSSPAASSLDFIGGPAILLGLISLATDDHTMYAAVKVLHSVLTSNAMCDFLMQHICGYQIMAFLLRKKASLLNHRIFQLILSVAGTVELGFRSSAITNTGVFQHILCNFELWMNTADNLELSLFSHLLEILQSPREGPRNAEAAHQAQLIPKLIFLFNEPSLIPSKISTIIGILACQLRGHFSTQDLLRIGLFVVYTLKPSSVNERQICMDGALDPSLPGEKTFASSKAVGRPSRNP

SEQ ID NO: 553 - protein, 1259 aa, Homo sapiens
MELFHMTSGGDAAMFRDGKEPQPSAEAAAAPSLANISCFTQKLVEKLYSGMFSADPRHILLFILEHIMVVIETASSQRDTVLSTLYSSLNKVILYCLSKPQQSLSECLGLLSILGFLQEHWDVVFATYNSNISFLLCLMHCLLLLNERSYPEGFGLEPKPRMSTYHQVFLSPNEDVKEKREDLPSLSDVQHNIQKTVQTLWQQLVAQRQQTLEDAFKIDLSVKPGEREVKIEEVTPLWEETMLKAWQHYLASEKKSLASRSNVAHHSKVTLWSGSLSSAMKLMPGRQAKDPECKTEDFVSCIENYRRRGQELYASLYKDHVQRRKCGNIKAANAWARIQEQLFGELGLWSQGEETKPCSPWELDWREGPARMRKRIKRLSPLEALSSGRHKESQDKNDHISQTNAENQDELTLREAEGEPDEVGVDCTQLTFFPALHESLHSEDFLELCRERQVILQELLDKEKVTQKFSLVIVQGHLVSEGVLLFGHQHFYICENFTLSPTGDVYCTRHCLSNISDPFIFNLCSKDRSTDHYSCQCHSYADMRELRQARFLLQDIALEIFFHNGYSKFLVFYNNDRSKAFKSFCSFQPSLKGKATSEDTLNLRRYPGSDRIMLQKWQKRDISNFEYLMYLNTAAGRTCNDYMQYPVFPWVLADYTSETLNLANPKIFRDLSKPMGAQTKERKLKFIQRFKEVEKTEGDMTVQCHYYTHYSSAIIVASYLVRMPPFTQAFCALQGGSFDVADRMFHSVKSTWESASRENMSDVRELTPEFFYLPEFLTNCNGVEFGCMQDGTVLGDVQLPPWADGDPRKFISLHRKALESDFVSANLHHWIDLIFGYKQQGPAAVDAVNIFHPYFYGDRMDLSSITDPLIKSTILGFVSNFGQVPKQLFTKPHPARTAAGKPLPGKDVSTPVSLPGHPQPFFYSLQSLRPSQVTVKDMYLFSLGSESPKGAIGHIVSTEKTILAVERNKVLLPPLWNRTFSWGFDDFSCCLGSYGSDKVLMTFENLAAWGRCLCAVCPSPTTIVTSGTSTVVCVWELSMTKGRPRGLRLRQALYGHTQAVTCLAASVTFSLLVSGSQDCTCILWDLDHLTHVTRLPAHREGISAITISDVSGTIVSCAGAHLSLWNVNGQPLASITTAWGPEGAITCCCLMEGPAWDTSQIIITGSQDGMVRVWKTEDVKMSVPGRPAGEEPLAQPPSPRGHKWEKNLALSRELDVSIALTGKPSKTSPAVTALAVSRNHTKLLVGDERGRIFCWSADG

SEQ ID NO: 554 - protein, 501 aa, Homo sapiens
MELFHMTSGGDAAMFRDGKEPQPSAEAAAAPSLANISCFTQKLVEKLYSGMFSADPRHILLFILEHIMVVIETASSQRDTVLSTLYSSLNKVILYCLSKPQQSLSECLGLLSILGFLQEHWDVVFATYNSNISFLLCLMHCLLLLNERSYPEGFGLEPKPRMSTYHQVFLSPNEDVKEKREDLPSLSDVQHNIQKTVQTLWQQLVAQRQQTLEDAFKIDLSVKPGEREVKIEEVTPLWEETMLKAWQHYLASEKKSLASRSNVAHHSKVTLWSGSLSSAMKLMPGRQAKDPECKTEDFVSCIENYRRRGQELYASLYKDHVQRRKCGNIKAANAWARIQEQLFGELGLWSQGEETKPCSPWELDWREGPARMRKRIKRLSPLEALSSGRHKESQDKNDHISQTNAENQDELTLREAEGEPDEVGVDCTQLTFFPALHESLHSEDFLELCRERQVILQELLDKEKPHRICSHSPRSKKGRWKNPGTYGMAQGPCQGKDEGSC

SEQ ID NO: 555 - protein, 2392 aa, Homo sapiens
MWAWNARNFFLLEWTLQPISQFVEIMPLKPAPVQEHFFQLLEALVFELHYVPHEILRKVQHLIKESPGPSCTLMALQSILSIAGGDPLFTDIFRDSGLLGLLLAQLRKQAKIMRKEIQCSLASHIQSLVKSEKNRQVMCEAGLLGTLMASCHRALVTSGSPLHSRLIRIFEKLASQAIEPDVLRYHMLHIQCRQAGQPYAGLHPGVTQAPQPLGESQDSTTALQTALSLISMTSPRNLQPQRAALAPSFVEFDMSVEGYGCLFIPTLSTVMGTSTEYSVSGGIGTGATRPFPPPGGLTFSCWFLISRHGAATEGHPLRFLTLVRHLARTEQPFVCFSVSLCPDDLSLVVSTEEKEFQPLDVMEPEDDSEPSAGCQLQVRCGQLLACGQWHHLAVVVTKEMKRHCTVSTCLDGQVIGSAKMLYIQALPGPFLSMDPSAFVDVYGYIATPRVWKQKSSLIWRLGPTYLFEEAISMETLEVINKLGPRYCGNFQAVHVQATPFVAEERVSFGLHIASSSITSVADIRNAYNEVDSRLIAKEMNISSRDNAMPVFLLRNCAGHLSGSLRTIGAVAVGQLGVRVFHSSPAASSLDFIGGPAILLGLISLATDDHTMYAAVKVLHSVLTSNAMCDFLMQHICGYQIMAFLLRKKASLLNHRIFQLILSVAGTVELGFRSSAITNTGVFQHILCNFELWMNTADNLELSLFSHLLEILQSPREGPRNAEAAHQAQLIPKLIFLFNEPSLIPSKISTIIGILACQLRGHFSTQDLLSKYYVSLHPFSLKSEFFFVAGSQTSGKTIWLRNQLLEMLLSVISSPQLHLSSESKEEMFLKLGPDWFLLLLQGHLHASTTVLALKLLLYFLASPSLRTRFRDGLCAGSWVERSTEGVDIVMDNLKSQSPLPEQSPCLLPGFRVLNDFLAHHVHIPEVYLIVSTFFLQTPLTELMDGPKDSLDAMLQWLLQRHHQEEVLQAGLCTEGALLLLEMLKATMSQPLAGSEDGAWAQTFPASVLQFLSLVHRTYPQDPAWQAPEFLQTLAIAAFPLGAQKGVGAESTRNTSSPEAAAEGDSTVEGLQAPTKAHPARRKLREFTQLLLRELLLGASSPKQWLPLEVLLEASPDHATSQQKRDFQSEVLLSAMELFHMTSGGDAAMFRDGKEPQPSAEAAAAPSLANISCFTQKLVEKLYSGMFSADPRHILLFILEHIMVVIETASSQRDTVLSTLYSSLNKVILYCLSKPQQSLSECLGLLSILGFLQEHWDVVFATYNSNISFLLCLMHCLLLLNERSYPEGFGLEPKPRMSTYHQVFLSPNEDVKEKREDLPSLSDVQHNIQKTVQTLWQQLVAQRQQTLEDAFKIDLSVKPGEREVKIEEVTPLWEETMLKAWQHYLASEKKSLASRSNVAHHSKVTLWSGSLSSAMKLMPGRQAKDPECKTEDFVSCIENYRRRGQELYASLYKDHVQRRKCGNIKAANAWARIQEQLFGELGLWSQGEETKPCSPWELDWREGPARMRKRIKRLSPLEALSSGRHKESQDKNDHISQTNAENQDELTLREAEGEPDEVGVDCTQLTFFPALHESLHSEDFLELCRERQVILQELLDKEKVTQKFSLVIVQGHLVSEGVLLFGHQHFYICENFTLSPTGDVYCTRHCLSNISDPFIFNLCSKDRSTDHYSCQCHSYADMRELRQARFLLQDIALEIFFHNGYSKFLVFYNNDRSKAFKSFCSFQPSLKGKATSEDTLNLRRYPGSDRIMLQKWQKRDISNFEYLMYLNTAAGRTCNDYMQYPVFPWVLADYTSETLNLANPKIFRDLSKPMGAQTKERKLKFIQRFKEVEKTEGDMTVQCHYYTHYSSAIIVASYLVRMPPFTQAFCALQGGSFDVADRMFHSVKSTWESASRENMSDVRELTPEFFYLPEFLTNCNGVEFGCMQDGTVLGDVQLPPWADGDPRKFISLHRKALESDFVSANLHHWIDLIFGYKQQGPAAVDAVNIFHPYFYGDRMDLSSITDPLIKSTILGFVSNFGQVPKQLFTKPHPARTAAGKPLPGKDVSTPVSLPGHPQPFFYSLQSLRPSQVTVKDMYLFSLGSESPKGAIGHIVSTEKTILAVERNKVLLPPLWNRTFSWGFDDFSCCLGSYGSDKVLMTFENLAAWGRCLCAVCPSPTTIVTSGTSTVVCVWELSMTKGRPRGLRLRQALYGHTQAVTCLAASVTFSLLVSGSQDCTCILWDLDHLTHVTRLPAHREGISAITISDVSGTIVSCAGAHLSLWNVNGQPLASITTAWGPEGAITCCCLMEGPAWDTSQIIITGSQDGMVRVWKTEDVKMSVPGRPAGEEPLAQPPSPRGHKWEKNLALSRELDVSIALTGKPSKTSPAVTALAVSRNHTKLLVGDERGRIFCWSADG

SEQ ID NO: 556 - protein, 185 aa, Homo sapiens
MSLTKWSLRAMPAPASKVEEWVRSTTDTLAVGTRKAMPVSFPFSSGMTLPTALAAPVEAGMMFWLLSYFSWFTPMTNMGASAEGAEMMTLLAPPCLPKAHFFHSVFHSLLEDGDGISIDDKLPVLSLDGAMEFAMGGIILEHLWGSPCSTHHVVEVNEGVIDGNNIHFTRVKSSPGDQAPNTTKS

SEQ ID NO: 557 - protein, 543 aa, Homo sapiens
MRKPAAGFLPSLLKVLLLPLAPAAAQDSTQASTPGSPLSPTEYERFFALLTPTWKAETTCRLRATHGCRNPTLVQLDQYENHGLVPDGAVCSNLPYASWFESFCQFTHYRCSNHVYYAKRVLCSQPVSILSPNTLKEIEASAEVSPTTMTSPISPHFTVTERQTFQPWPERLSNNVEELLQSSLSLGGQEQAPEHKQEQGVEHRQEPTQEHKQEEGQKQEEQEEEQEEEGKQEEGQGTKEGREAVSQLQTDSEPKFHSESLSSNPSSFAPRVREVESTPMIMENIQELIRSAQEIDEMNEIYDENSYWRNQNPGSLLQLPHTEALLVLCYSIVENTCIITPTAKAWKYMEEEILGFGKSVCDSLGRRHMSTCALCDFCSLKLEQCHSEASLQRQQCDTSHKTPFVSPLLASQSLSIGNQVGSPESGRFYGLDLYGGLHMDFWCARLATKGCEDVRVSGWLQTEFLSFQDGDFPTKICDTDYIQYPNYCSFKSQQCLMRNRNRKVSRMRCLQNETYSALSPGKSEDVVLRWSQEFSTLTLGQFG

SEQ ID NO: 558 - protein, 335 aa, Homo sapiens
MGKVKVGVNGFGRIGRLVTRAAFNSGKVDIVAINDPFIDLNYMVYMFQYDSTHGKFHGTVKAENGKLVINGNPITIFQERDPSKIKWGDAGAEYVVESTGVFTTMEKAGAHLQGGAKRVIISAPSADAPMFVMGVNHEKYDNSLKIISNASCTTNCLAPLAKVIHDNFGIVEGLMTTVHAITATQKTVDGPSGKLWRDGRGALQNIIPASTGAAKAVGKVIPELNGKLTGMAFRVPTANVSVVDLTCRLEKPAKYDDIKKVVKQASEGPLKGILGYTEHQVVSSDFNSDTHSSTFDAGAGIALNDHFVKLISWYDNEFGYSNRVVDLMAHMASKE

SEQ ID NO: 559 - protein, 214 aa, Homo sapiens
MGKVKVGVNGFGRIGRLVTRAAFNSGKVDIVAINDPFIDLNYMVYMFQYDSTHGKFHGTVKAENGKLVINGNPITIFQERDPSKIKWGDAGAEYVVESTGVFTTMEKAGAHLQGGAKRVIISAPSADAPMFVMGVNHEKYDNSLKIISNASCTTNCLAPLAKVIHDNFGIVEGLMTTVHAITATQKTVDGPSGKLWRDGRGALQNIIRCGQGHP

SEQ ID NO: 560 - protein, 335 aa, Homo sapiens; identical to SEQ ID NO: 558

SEQ ID NO: 561 - protein, 623 aa, Homo sapiens
MRVALGMLWLLALAWPPQARGFCPSQCSCSLHIMGDGSKARTVVCNDPDMTLPPASIPPDTSRLRLERTAIRRVPGEAFRPLGRLEQLWLPYNALSELNALMLRGLRRLRELRLPGNRLAAFPWAALRDAPKLRLLDLQANRLSAVPAEAARFLENLTFLDLSSNQLMRLPQELIVSWAHLETGIFPPGHHPRRVLGLQDNPWACDCRLYDLVHLLDGWAPNLAFIETELRCASPRSLAGVAFSQLELRKCQGPELHPGVASIRSLLGGTALLRCGATGVPGPEMSWRRANGRPLNGTVHQEVSSDGTSWTLLGLPAVSHLDSGDYICQAKNFLGASETVISLIVTEPPTSTEHSGSPGALWARTGGGGEAAAYNNKLVARHVPQIPKPAVLATGPSVPSTKEELTLEHFQMDALGELSDGRAGPSEARMVRSVKVVGDTYHSVSLVWKAPQAKNTTAFSVLYAVFGQHSMRRVIVQPGKTRVTITGLLPKTKYVACVCVQGLVPRKEQCVIFSTNEVVDAENTQQLINVVVISVAIVIALPLTLLVCCSALQKRCRKCFNKDSTEATVTYVNLERLGYSEDGLEELSRHSVSEADRLLSARSSVDFQAFGVKGGRRINEYFC

SEQ ID NO: 562 - protein, 90 aa, Homo sapiens
MFLTIIVCGMVAALSAIRANCHQEPSVCLQAACPESWIGFQRKCFYFSDDTKNWTSSQRFCDSQDADLAQVESFQELVSYPGSRRVCLFE

SEQ ID NO: 563 - protein, 210 aa, Homo sapiens
MNDEGSPIKVTLATLKMSVQPTVSLGGFEITPPVDLRLKCGSGPVHISGQHLVAVKEGAESEDEEEEDVKLLSISGKQSAPGGGAAADDDDEDDDDDDDEEAEEKAPVKKSIRDTPAKNAQKSNQNGKDSKPSSTPRSKGQESFKKQEKSPKTPKGSSSVEDIKAKMQASIEKRGSLPKVETKFINYVKNFFWMTDQEAIQDLWQWRKSL

SEQ ID NO: 564 - protein, 218 aa, Homo sapiens [sequence omitted]

SEQ ID NO: 565 - protein, 207 aa, Homo sapiens
MNDEGSPIKVTLATLKMSVQPTVSLGGFEITPPVDLRLKCGSGPVHISGQHLVAVKEGAESEDEEEEDVKLLSISGKQSAPGGGDDDDEDDDDDDDEEAEEKAPVKKSIRDTPAKNAQKSNQNGKDSKPSSTPRSKGQESFKKQEKSPKTPKGSSSVEDIKAKMQASIEKRGSLPKVETKFINYVKNFFWMTDQEAIQDLWQWRKSL

SEQ ID NO: 566 - protein, 149 aa, Homo sapiens [sequence omitted]

SEQ ID NO: 567 - protein, 207 aa, Homo sapiens; identical to SEQ ID NO: 565

SEQ ID NO: 568 - protein, 218 aa, Homo sapiens [sequence omitted]

SEQ ID NO: 569 - protein, 191 aa, Homo sapiens
MHDSNNVEKDITPSELPANPGCLHSKEHSIKATLIWRLFFLIMFLTIIVCGMVAALSAIRANCHQEPSVCLQAACPESWIGFQRKCFYFSDDTKNWTSSQRFCDSQDADLAQVESFQELNFLLRYKGPSDHWIGLSREQGQPWKWINGTEWTRQFPILGAGECAYLNDKGASSARHYTERKWICSKSDIHV

SEQ ID NO: 570 - protein, 218 aa, Homo sapiens [sequence omitted]

SEQ ID NO: 571 - protein, 676 aa, Homo sapiens
MERLEIQRIEKEKWHRLEAKDLERRNEELEELYLLERCFPEAEKLKQETKLLSQWKHYIQCDGSPDPSVAQEMNTFISLWKEKTNETFEEVIEKSKVVLNLIEKLKFILLETPPCDLQDKNIIQYQESILQLQELLHLKFGVATEILLKQASTLADLDSGNMEKVIKDENVTLYVWANLKKNPRHRSVRFSETQIGFEIPRILATSDIAVRLLHTHYDHVSALHPVSTPSKEYTSAVTELVKDDVKNVEKAISKEVEEESKQQERGSHLIQEEEIKVEEEQGDIEVKMSSAEEESEAIKCEREMKVLSETVSAAQLLLVENSSEKPDFFEDNVVDLCQFTTLGGVYHLDILELPPQCKPVKGWMIVEILKEGLQKYTYPPETTEEFETENAFPPIEVTLEVHENVIFFEDPVVVRWDAEGKHWRTDGISNVSYKPKERLVTFSLDTFGPVTLIQDAHINMPYQSWELRPLDVNKVLLTVTTVFTEIQIQIKENLCMLSSIKLKDKKHISILEGTWMTPIPFIIALKEAGLNIFPTRHSHFYVIINNKVPLVEVKAYRQMALLSSAFAFGWSKWNLLCNSTKVVFKVREHLTEECTENPNWALLMFSGDRAQRLKIKEESEAFSEALKEETEFHSTLYHMVKDFASEEAMEKVRSSNCQFVNSVCHMLLSTRLLSYS

SEQ ID NO: 572 - protein, 515 aa, Homo sapiens
MEKVIKDENVTLYVWANLKKNPRHRSVRFSETQIGFEIPRILATSDIAVRLLHTHYDHVSALHPVSTPSKEYTSAVTELVKDDVKNVEKAISKEVEEESKQQERGSHLIQEEEIKVEEEQGDIEVKMSSAEEESEAIKCEREMKVLSETVSAAQLLLVENSSEKPDFFEDNVVDLCQFTTLGGVYHLDILELPPQCKPVKGWMIVEILKEGLQKYTYPPETTEEFETENAFPPIEVTLEVHENVIFFEDPVVVRWDAEGKHWRTDGISNVSYKPKERLVTFSLDTFGPVTLIQDAHINMPYQSWELRPLDVNKVLLTVTTVFTEIQIQIKENLCMLSSIKLKDKKHISILEGTWMTPIPFIIALKEAGLNIFPTRHSHFYVIINNKVPLVEVKAYRQMALLSSAFAFGWSKWNLLCNSTKVVFKVREHLTEECTENPNWALLMFSGDRAQRLKIKEESEAFSEALKEETEFHSTLYHMVKDFASEEAMEKVRSSNCQFVNSVCHMLLSTRLLSYS

SEQ ID NO: 573 - protein, 83 aa, Homo sapiens [sequence omitted]

SEQ ID NO: 574 - protein, 1591 aa, Homo sapiens
MSLLCVRVKRAKFQGSPDKFNTYVTLKVQNVKSTTVAVRGDQPSWEQDFMFEISRLDLGLSVEVWNKGLIWDTMVGTVWIALKTIRQSDEEGPGEWSTLEAETLMKDDEICGTRNPTPHKILLDTRFELPFDIPEEEARYWTYKWEQINALGADNEYSSQEESQRKPLPTAAAQCSFEDPDSAVDDRDSDYRSETSNSFPPPYHTASQPNASVHQFPVPVRSPQQLLLQGSSRDSCNDSMQSYDLDYPERRAISPTSSSRYGSSCNVSQGSSQLSELDQYHEQDDDHRETDSIHSCHSSHSLSRDGQAGFGEQEKPLEVTGQAEKEAACEPKEMKEDATTHPPPDLVLQKDHFLGPQESFPEENASSPFTQARAHWIRAVTKVRLQLQEIPDDGDPSLPQWLPEGPAGGLYGIDSMPDLRRKKPLPLVSDLSLVQSRKAGITSAMATRTSLKDEELKSHVYKKTLQALIYPISCTTPHNFEVWTATTPTYCYECEGLLWGIARQGMRCSECGVKCHEKCQDLLNADCLQRAAEKSCKHGAEDRTQNIIMAMKDRMKIRERNKPEIFEVIRDVFTVNKAAHVQQMKTVKQSVLDGTSKWSAKITITVVCAQGLQAKDKTGSSDPYVTVQVSKTKKRTKTIFGNLNPVWEEKFHFECHNSSDRIKVRVWDEDDDIKSRVKQRLKRESDDFLGQTIIEVRTLSGEMDVWYNLEKRTDKSAVSGAIRLQISVEIKGEEKVAPYHVQYTCLHENLFHYLTDIQGSGGVRIPEARGDDAWKVYFDETAQEIVDEFAMRYGIESIYQAMTHFACLSSKYMCPGVPAVMSTLLANINAYYAHTTASTNVSASDRFAASNFGKERFVKLLDQLHNSLRIDLSTYRNNFPAGSPERLQDLKSTVDLLTSITFFRMKVQELQSPPRASQVVKDCVKACLNSTYEYIFNNCHDLYSRQYQLKQELPPEEQGPSIRNLDFWPKLITLIVSIIEEDKNSYTPVLNQFPQELNVGKVSAEVMWHLFAQDMKYALEEHEKDHLCKSADYMNLHFKVKWLHNEYVRDLPVLQGQVPEYPAWFEQFVLQWLDENEDVSLEFLRGALERDKKDGFQQTSEHALFSCSVVDVFTQLNQSFEIIRKLECPDPSILAHYMRRFAKTIGKVLMQYADILSKDFPAYCTKEKLPCILMNNVQQLRVQLEKMFEAMGGKELDLEAADSLKELQVKLNTVLDELSMVFGNSFQVRIDECVRQMADILGQVRGTGNASPDARASAAQDADSVLRPLMDFLDGNLTLFATVCEKTVLKRVLKELWRVVMNTMERMIVLPPLTDQTGTQLIFTAAKELSHLSKLKDHMVREETRNLTPKQCAVLDLALDTIKQYFHAGGNGLKKTFLEKSPDLQSLRYALSLYTQTTDTLIKTFVRSQTTQGSGVDDPVGEVSIQVDLFTHPGTGEHKVTVKVVAANDLKWQTAGMFRPFVEVTMVGPHQSDKKRKFTTKSKSNNWAPKYNETFHFLLGNEEGPESYELQICVKDYCFAREDRVLGLAVMPLRDVTAKGSCACWCPLGRKIHMDETGLTILRILSQRSNDEVAREFVKLKSESRSTEEGS

SEQ ID NO: 575 - protein, 92 aa, Homo sapiens
MERGRVELGSPCLVGERELTYPQQQLRDDDVGELGRQVEWGAQLWVLYAGVERPVSRMGQKQENGSHVLGLHGGPQLAAQRLLRGAQRRQEQ

SEQ ID NO: 576 - protein, 277 aa, Homo sapiens
MSKSLKKLVEESREKNQPEVDMSDRGISNMLDVNGLFTLSHITQLVLSHNKLTMVPPNIAELKNLEVLNFFNNQIEELPTQISSLQKLKHLNLGMNRLNTLPRGFGSLPALEVLDLTYNNLSENSLPGNFFYLTTLRALYLSDNDFEILPPDIGKLTKLQILSLRDNDLISLPKEIGELTQLKELHIQGNRLTVLPPELGNLDLTGQKQVFKAENNPWVTPIADQFQLGVSHVFEYIRSETYKYLYGRHMQANPEPPKKNNDKSKKISRKPLAAKNR

SEQ ID NO: 577 - protein, 277 aa, Homo sapiens; identical to SEQ ID NO: 576

SEQ ID NO: 578 - protein, 319 aa, Homo sapiens
MRSCFCVRRSRDPPPPQPPPPPPQRGTDQSTMPEVKDLSEALPETSMDPITGVGVVASRNRAPTGYDVVAQTADGVDADLWKDGLFKSKVTRYLCFTRSFSKENSHLGNVLVDMKLIDIKDTLPVGFIPIQETVDTQEVAFRKKRLCIKFIPRDSTEAAICDIRIMGRTKQAPPQYTFIGELNSMGIWYRMGRVPRNHDSSQPTTPSQSSAASTPAPNLPRHISLTLPATFRGRNSTRTDYEYQHSNLYAISAMDGVPFMISEKFSCVPESMQPFDLLGITIKSLAEIEKEYEYSFRTEQSAAARLPPSPTRCQQIPQS

SEQ ID NO: 579 - protein, 319 aa, Homo sapiens; identical to SEQ ID NO: 578

SEQ ID NO: 580 - protein, 236 aa, Homo sapiens [sequence omitted]

SEQ ID NO: 581 - protein, 158 aa, Homo sapiens
VHFNRDGSLIVSSSYDGLCRIWDTASGQCLKTLIDDDNPPVSFVKFSPNGKYILAATLDNTLKLWDYSKGKCLKTYTGHKNEKYCIFANFSVTGGKWIVSGSEDNLVYIWNLQTKEIVQKLQGHTDVVISTACHPTENIIASAALENDKTIKLWKSDC

SEQ ID NO: 582 - protein, 270 aa, Homo sapiens [sequence omitted]

SEQ ID NO: 583 - protein, 187 aa, Homo sapiens
MATEEKKPETEAARAQPTPSSSATQSKPTPVKPNYALKFTLAGHTKAVSSVKFSPNGEWLASSYDDNPPVSFVKFSPNGKYILAATLDNTLKLWDYSKGKCLKTYTGHKNEKYCIFANFSVTGGKWIVSGSEDNLVYIWNLQTKEIVQKLQGHTDVVISTACHPTENIIASAALENDKTIKLWKSDC

SEQ ID NO: 584 - protein, 395 aa, Homo sapiens
MKDSVKLVILHHVDHYFPTCKCIMAFGISMMWLLLTTTCLICGTLNAGGFLDLENEVNPEVWMNTSEIIIYNGYPSEEYEVTTEDGYILLVNRIPYGRTHARSTADAGYDVWMGNSRGNTWSRRHKTLSETDEKFWAFSFDEMAKYDLPGVIDFIVNKTGQEKLYFIGHSLGTTIGFVAFSTMPELAQRIKMNFALGPTISFKYPTGIFTRFFLLPNSIIKAVFGTKGFFLEDKKTKIASTKICNNKILWLICSEFMSLWAGSNKKNMNQSRMDVYMSHAPTGSSVHNILHIKQLYHSDEFRAYDWGNDADNMKHYNQSHPPIYDLTAMKVPTAIWAGGHDVLVTPQDVARILPQIKSLHYFKLLPDWNHFDFVWGLDAPQRMYSEIIALMKAYS

SEQ ID NO: 585 - protein, 93 aa, Homo sapiens
MWQLLAAACWMLLLGSMYGYDKKGNNANPEANMNIHALFADNAYWLENYANGSLGFLLADAGYDVWMGNSRGNTWSRRHKTLSETDEKFWAFR

SEQ ID NO: 586 - protein, 398 aa, Homo sapiens
MWLLLTMASLISVLGTTHGLFGKLHPGSPEVTMNISQMITYWGYPNEEYEVVTEDGYILEVNRIPYGKKNSGNTGQRPVVFLQHGLLASATNWISNLPNNSLAFILADAGYDVWLGNSRGNTWARRNLYYSPDSVEFWAFSFDEMAKYDLPATIDFIVKKTGQKQLHYVGHSQGTTIGFIAFSTNPSLAKRIKTFYALAPVATVKYTKSLINKLRFVPQSLFKFIFGDKIFYPHNFFDQFLATEVCSREMLNLLCSNALFIICGFDSKNFNTSRLDVYLSHNPAGTSVQNMFHWTQAVKSGKFQAYDWGSPVQNRMHYDQSQPPYYNVTAMNVPIAVWNGGKDLLADPQDVGLLLPKLPNLIYHKEIPFYNHLDFIWAMDAPQEVYNDIVSMISEDKK

SEQ ID NO: 587 - protein, 2535 aa, Homo sapiens [sequence omitted]

SEQ ID NO: 588 - protein, 2353 aa, Homo sapiens [sequence omitted]

SEQ ID NO: 589 - protein, 2210 aa, Homo sapiens
MIVMNDQVLEPQNVDPSMVQMTFLDDVVHSLLKGENIGITSRRRSRANQNVNAVHSHYTRAQANSPRPAMNSQAAVPKQNTHQQQQQRSIRPNKRKGSDSSIPDEEKMKEEKYDYISRGENPKGKNKHLMNKRRKPEEDEKKLNMKRLRTDNVSDFSESSDSENSNKRIIDNSSEQKPENELKNKNTSKINGEEGKPHNNEKAGEETLKNSQPPWDQIQEDKKHEEAEKRKSVDTQLQEDMIIHSSEQSTVSDHNSNDLLPQECNMDKAHTMELLPKEKFVSRPPTPKCVIDITNDTNLEKVAQENSSTFGLQTLQKMDPNVSDSKHSIANAKFLETAKKDSDQSWVSDVVKVDLTQSSVTNASSGNDHLNMEKEKYVSYISPLSAVSVMEDKLHKRSPPPETIKSKLNTSVDTHKIKSSPSPEVVKPKITHSPDSVKSKATYVNSQATGERRLANKIEHELSRCSFHPIPTRSSTLETTKSPLIIDKNEHFTVYRDPALIGSETGANHISPFLSQHPFPLHSSSHRTCLNPGTHHPALTPAPHLLAGSSSQTPLPTINAHPLPSGPHHAVHHPHLLPTVLPGVPTASLLGGHPRLESAHASSLSHLALAHQQQQQLLQHQSPHLLGQAHPSASYNQLGLYPIIWQYPNGTHAYSGLGLPSSKWVHPENAVNAEASLRRNSPSPWLHQPTPVTSADGIGLLSHIPVRPSSAEPHRPLKITAHSSPPLTKTLVDHHKEELERKAFMEPLRSVASTSAKNDLDLNRSQTGKDCHLHRHFVDPVLNQLQRPPQETGERLNKYKEEHRRILQESIDVAPFTTKIKGLEGERENYSRVASSSSSPKSHIIKQDMDVERSVSDLYKMKHSVPQSLPQSNYFTTLSNSVVNEPPRSYPSKEVSNIYGDKQSNALAAAAANPQTLTSFITSLSKPPPLIKHQPESEGLVGKIPEHLPHQIASHSVTTFRNDCRSPTHLTVSSTNTLRSMPALHRAPVFHPPIHHSLERKEGSYSSLSPPTLTPVMPVNAGGKVQESQKPPTLIPEPKDSQANFKSSSEQSLTEMWRPNNNLSKEKTEWHVEKSSGKLQAAMASVIVRPSSSTKTDSMPAMQLASKDRVSERSSAGAHKTDCLKLAEAGETGRIILPNVNSDSVHTKSEKNFQAVSQGSVPSSVMSAVNTMCNTKTDVITSAADTTSVSSWGGSEVISSLSNTILASTSSECVSSKSVSQPVAQKQECKVSTTAPVTLASSKTGSVVQPSSGFSGTTDFIHLKKHKAALAAAQYKSSNASETEPNAIKNQTLSASLPLDSTVICSTINKANSVGNGQASQTSQPNYHTKLKKAWLTRHSEEDKNTNKMENSGNSVSEIIKPCSVNLIASTSSDIQNSVDSKIIVDKYVKDDKVNRRKAKRTYESGSESGDSDESESKSEQRTKRQPKPTYKKKQNDLQKRKGEIEEDLKPNGVLSRSAKERSKLKLQSNSNSCHLVNGVVRIDGFSSPDQYDDEAMSLWTHENFEDDELDIETSKYILDIIGDKFCQLVTSEKTALPRVKKDAKIAWKRAVRGVREMCDACEATLFNIHWVCQKCGFVVCLDCYKAKERKSSRDKELYAWMKCVKGQPHDHKHLMPTQIIPGSVLTDLLDAMHTLREKYGIKSHCHCTNKQNLQVGNFPTMNGVSQSQQQNTPPKSEKNGGSSPESDVGTDNKLTPPESQSPLHWLADLAEQKAREEKKENKELTLENQIKEEREQDNSESPNGRTSPLVSQNNEQGSTLRDLLTTTAGKLRVGSTDAGIAFAPVYSMGAPSSKSGRTMPNILDDIIASVVENKIPPSKTSKINVKPELKEEPEESIISAVDENNKLYSDIPHSWICEKHILWLKDYKNSSNWKLFKECWKQGQPAVVSGVHKKMNISLWKAESISLDFGDHQADLLNCKDSIISNANVKEFWDGFEEVSKRQKNKSGETVVLKLKDWPSGEDFKTMMPARYEDLLKSLPLPEYCNPEGKFNLASHLPGFFVRPDLGPRLCSAYGVVAAKDHDIGTTNLHIEVSDVVNILVYVGIAKGNGILSKAGILKKFEEEDLDDILRKRLKDSSEIPGALWHIYAGKDVDKIREFLQKISKEQGLEVLPEHDPIRDQSWYVNKKLRQRLLEEYGVRTCTLIQFLGDAIVLPAGALHQVQNFHSCIQVTEDFVSPEHLVESFHLTQELRLLKEEINYDDKLQSKKW

SEQ ID NO: 590 - protein, 315 aa, Homo sapiens
MCISRKKLEHRIKQPTVKLHGNKDSICKPCHMAQLASVCGSDGHTYSSVCKLEQQACLSSKQLAVRCEGPCPCPTEQAATSTADGKPETCTGQDLADLGDRLRDWFQLLHENSKQNGSASSVAGPASGLDKSLGASCKDSIGWMFSKLDTSADLFLDQTELAAINLDKYEVCIRPFFNSCDTYKDGRVSTAEWCFCFWREKPPCLAELERIQIQEAAKKKPGIFIPSCDEDGYYRKMQCDQSSGDCWCVDQLGLELTGTRTHGSPDCDDIVGFSGDFGSGVGWEDEEEKETEEAGEEAEEEEGEAGEADDGGYIW

SEQ ID NO: 591 - protein, 421 aa, Homo sapiens
MRAPGCGRLVLPLLLLAAAALAEGDAKGLKEGETPGNFMEDEQWLSSISQYSGKIKHWNRFRDDDYIKSWEDNQQGDEALDTTKDPCQKVKCSRHKVCIAQGYQRAMCISRKKLEHRIKQPTVKLHGNKDSICKPCHMAQLASVCGSDGHTYSSVCKLEQQACLSSKQLAVRCEGPCPCPTEQAATSTADGKPETCTGQDLADLGDRLRDWFQLLHENSKQNGSASSVAGPASGLDKSLGASCKDSIGWMFSKLDTSADLFLDQTELAAINLDKYEVCIRPFFNSCDTYKDGRVSTAEWCFCFWREKPPCLAELERIQIQEAAKKKPGIFIPSCDEDGYYRKMQCDQSSGDCWCVDQLGLELTGTRTHGSPDCDDIVGFSGDFGSGVGWEDEEEKETEEAGEEAEEEEGEAGEADDGGYIW

SEQ ID NO: 592 - protein, 421 aa, Homo sapiens; identical to SEQ ID NO: 591

SEQ ID NO: 593 - protein, 315 aa, Homo sapiens; identical to SEQ ID NO: 590

SEQ ID NO: 594 - protein, 424 aa, Homo sapiens
MRAPGCGRLVLPLLLLAAAALAEGDAKGLKEGETPGNFMEDEQWLSSISQYSGKIKHWNRFRDEVEDDYIKSWEDNQQGDEALDTTKDPCQKVKCSRHKVCIAQGYQRAMCISRKKLEHRIKQPTVKLHGNKDSICKPCHMAQLASVCGSDGHTYSSVCKLEQQACLSSKQLAVRCEGPCPCPTEQAATSTADGKPETCTGQDLADLGDRLRDWFQLLHENSKQNGSASSVAGPASGLDKSLGASCKDSIGWMFSKLDTSADLFLDQTELAAINLDKYEVCIRPFFNSCDTYKDGRVSTAEWCFCFWREKPPCLAELERIQIQEAAKKKPGIFIPSCDEDGYYRKMQCDQSSGDCWCVDQLGLELTGTRTHGSPDCDDIVGFSGDFGSGVGWEDEEEKETEEAGEEAEEEEGEAGEADDGGYIW

SEQ ID NO: 595 - protein, 1244 aa, Homo sapiens [sequence omitted]

SEQ ID NO: 596 - protein, 41 aa, Homo sapiens
MDLLLGKTSVTAIFSSQWDSLSENEASAKKKVEPTYREMIH

SEQ ID NO: 597 - protein, 996 aa, Homo sapiens
PGLLYLSSHGLWLITIAKCGILCIRDVYTLETFAWCRSHSHQGHGIQSMRISMDGQNILVNGRDDGTLVYLKWKRFGGHLASEILDYYQKLLISLSSAMDKENHYLSTTPKVSVDLGSDSEHTKQKASTDLSQDELVLTDVKKEIPWIQQKSQEAIKKEVNLFSKKRKEIKQGIKSLSKTILNMMEENDKLENIAKLDQQEFGLDLEELERLHDESQEEVAKMIKDVEMHNLAKSYLAELIKEECWNSMAVKGRALKCFHIPCVVENFPMKARTVEELKELERVLQQKKIEAECLKLRKEIVEAQSGVKLIKQRHEEDDEEEEEEDKTVKYSNLPNYLLGSLSTDFGVDTSLLSSQLELHSREEKINQIILLKDIIYKVKTVFNNEFDAAYKQKEFEIARVKERNVRIREIILDLELEEAVWQPEFEDCEKPERTLVVQDEEITAHKHIKPWHKAKELIVNHEKEHWLLIQDASTRLRALMDMMGGVLEVKKEDILRMVIPQPAFMAKPDAVWTEEERKQFKDYEKKVKELNEERDKYRKSLEAELKKLQNSIQESTQAFDEHLKRLFERRVKAEMVTNQEELKISNLAFSLLLDEELSSREKFLNNYLTRKQHEKVMDRSFKKEFSEIPGHQVDILYKLFKRRPRISKQKTHSETTSVVPFGELPGSGKLNKDAFAQLMKAMDELDNISNMPEGLDPLVWNHFCMTRRAKVENEQKVKQKAADLLEMATFLQKRVEEEEKVQQEIERVFHELILLQEEKVRFQLNLTIQILLKQGQVELENFQLVLEYSDAILINKNIIEDLNSVIRTQGQKKVASMMESKDVHKRILQIEWEHKKMEMEREDLNQKAWDIQMLFFSRDRQKYLNEPNYEALISIQIGIMEQTIAVLDKMHKKNVENCKKLLKKLGKFSNQKDIANYALSCNLREELVAVSERKDICNAMGSKLTCEKIVKERYENMMQQQKLTNISKQQAEQISILQTEVERLRMKTFPALVQM

SEQ ID NO: 598 - protein, 338 aa, Homo sapiens
MTETTVKTAAWFMANMQVSGGGPSISLVMKTPRVTKNEALWHPTLNLPLSPQGTVRTAVEFQVMTQTQSLSFLLGSSASLDCGFSMAPGLDLISVEWRLQHKGRGQLVYSWTAGQGQAVRKGATLEPAQLGMARDASLTLPGLTIQDEGTYICQITTSLYRAQQIIQLNIQASPKVRLSLANEALLPTLICDIAGYYPLDVVVTWTREELGGSPAQVSGASFSSLRQSVAGTYSISSSLTAEPGSAGATYTCQVTHISLEEPLGASTQVVPPERRTALGVIFASSLFLLALMFLGLQRRQAPTGLGLLQAERWETTSCADTQSSHLHEDRTARVSQPS

SEQ ID NO: 599 - protein, 468 aa, Homo sapiens
MGTQEGWCLLLCLALSGAAETKPHPAEGQWRAVDVVLDCFLAKDGAHRGALASSEDRARASLVLKQVPVLDDGSLEDFTDFQGGTLAQDDPPIIFEASVDLVQIPQAEALLHADCSGKEVTCEISRYFLQMTETTVKTAAWFMANMQVSGGGPSISLVMKTPRVTKNEALWHPTLNLPLSPQGTVRTAVEFQVMTQTQSLSFLLGSSASLDCGFSMAPGLDLISVEWRLQHKGRGQLVYSWTAGQGQAVRKGATLEPAQLGMARDASLTLPGLTIQDEGTYICQITTSLYRAQQIIQLNIQASPKVRLSLANEALLPTLICDIAGYYPLDVVVTWTREELGGSPAQVSGASFSSLRQSVAGTYSISSSLTAEPGSAGATYTCQVTHISLEEPLGASTQVVPPERRTALGVIFASSLFLLALMFLGLQRRQAPTGLGLLQAERWETTSCADTQSSHLHEDRTARVSQPS

SEQ ID NO: 600 - protein, 185 aa, Homo sapiens
MGTQEGWCLLLCLALSGAAETMDLVQIPQAEALLHADCSGKEVTCEISRYFLQMTETTVKTAAWFMANMQVSGGGPSISLVMKTPRVTKNEALWHPTLNLPLSPQGTVRTAVEFQVMTQTQSLSFLLGSSASLDCGFSMAPGLDLISVEWRLQHKGRGRGDLHLPDHHLSVPSSADHPAQHPSFP

SEQ ID NO: 601 - protein, 468 aa, Homo sapiens
MGTQEGWCLLLCLALSGAAETKPHPAEGQWRAVDVVLDCFLVKDGAHRGALASSEDRARASLVLKQVPVLDDGSLEDFTDFQGGTLAQDDPPIIFEASVDLVQIPQAEALLHADCSGKEVTCEISRYFLQMTETTVKTAAWFMANVQVSGGGPSISLVMKTPRVAKNEVLWHPTLNLPLSPQGTVRTAVEFQVMTQTQSLSFLLGSSASLDCGFSMAPGLDLISVEWRLQHKGRGQLVYSWTAGQGQAVRKGATLEPAQLGMARDASLTLPGLTIQDEGTYICQITTSLYRAQQIIQLNIQASPKVRLSLANEALLPTLICDIAGYYPLDVVVTWTREELGGSPAQVSGASFSSLRQSVAGTYSISSSLTAEPGSAGATYTCQVTHISLEEPLGASTQVVPPERRTALGVIFASSLFLLALMFLGLQRRQAPTGLGLLQAERWETTSCADTQSSHLHEDRTARVSQPS

SEQ ID NO: 602 - protein, 372 aa, Homo sapiens [sequence omitted]

SEQ ID NO: 603 - protein, 372 aa, Homo sapiens [sequence omitted]

SEQ ID NO: 604 - protein, 606 aa, Homo sapiens
MVRGARQPQQPRSRLAPRLTGTVEKPPRKRRSRTEFALKEIMSSGGAEDDIPQGERKTVTDFCYLLDKSKQLFNGLRDLPQYGQKQWQSYFGRTFDVYTKLWKFQQQHRQVLDNRYGLKRWQIGEIASKIGQLYYHYYLRTSETSYLNEAFSFYSAIRQRSYYSQVNKEDRPELVVKKLRYYARFIVVCLLLNKMDVVKDLVKELSDEIEDYTHRFNTEDQVEWNLVLQEVAAFIEADPVMVLNDDNTIVITSNRLAETGAPLLEQGMIVGQLSLADALIIGNCNNQVKFSELTVDMFRMLQALEREPMNLASQMNKPGMQESADKPTRRENPHKYLLYKPTFSQLYTFLAASFKELPANSVLLIYLSATGVFPTGRSDSEGPYDFGGVLTNSNRDIINGDAIHKRNQSHKEMHCLHPGDLYPFTRKPLFIIVDSSNSVAYKNFTNLFGQPLVCLLSPTAYPKALQDQSQRGSLFTLFLNNPLMAFLFVSGLSSMRRGLWEKCQEYLRKINRDIAQLLTHSRSIDQAFLQFFGDEFLRLLLTRFIFCSATMRMHKIFRETRNYPESYPQLPRDETVENPHLQKHILELASILDVRNVFFENTIDDY

SEQ ID NO: 605 - protein, 629 aa, Homo sapiens
MVRGARQPQQPRSRLAPRLTGTVEKPPRKRRSSIRGSGDSSHSQSQGERYQHFTEKTEFALKEIMSSGGAEDDIPQGERKTVTDFCYLLDKSKQLFNGLRDLPQYGQKQWQSYFGRTFDVYTKLWKFQQQHRQVLDNRYGLKRWQIGEIASKIGQLYYHYYLRTSETSYLNEAFSFYSAIRQRSYYSQVNKEDRPELVVKKLRYYARFIVVCLLLNKMDVVKDLVKELSDEIEDYTHRFNTEDQVEWNLVLQEVAAFIEADPVMVLNDDNTIVITSNRLAETGAPLLEQGMIVGQLSLADALIIGNCNNQVKFSELTVDMFRMLQALEREPMNLASQMNKPGMQESADKPTRRENPHKYLLYKPTFSQLYTFLAASFKELPANSVLLIYLSATGVFPTGRSDSEGPYDFGGVLTNSNRDIINGDAIHKRNQSHKEMHCLHPGDLYPFTRKPLFIIVDSSNSVAYKNFTNLFGQPLVCLLSPTAYPKALQDQSQRGSLFTLFLNNPLMAFLFVSGLSSMRRGLWEKCQEYLRKINRDIAQLLTHSRSIDQAFLQFFGDEFLRLLLTRFIFCSATMRMHKIFRETRNYPESYPQLPRDETVENPHLQKHILELASILDVRNVFFENTIDDY

SEQ ID NO: 606 - protein, 106 aa, Homo sapiens
MRLVQGEAVCCVPGPATSWRACAGTWSCPTWAAACVCDCTVATLAHTPLAHPSAPPVSISLGSGIQVGSKCEWAEAAQWAQSKTQAKVPLDWPGKRHPKDPIMLIC

SEQ ID NO: 607 - protein, 55 aa, Homo sapiens
LSLLHSWDYKQALPRPAVHFILHLAFFECKGIFLWVMLLLVTVHENFECSWSYLV

SEQ ID NO: 608 - protein, 117 aa, Homo sapiens [sequence omitted]

SEQ ID NO: 609 - protein, 370 aa, Homo sapiens [sequence omitted]

SEQ ID NO: 610 - protein, 356 aa, Homo sapiens
MLARAARGTGALLLRGSLLASGRAPRRASSGLPRNTVVLFVPQQEAWVVERMGRFHRILEPGLNILIPVLDRIRYVQSLKEIVINVPEQSAVTLDNVTLQIDGVLYLRIMDPYKASYGVEDPEYAVTQLAQTTMRSELGKLSLDKVFRERESLNASIVDAINQAADCWGIRCLRYEIKDIHVPPRVKESMQMQVEAERRKRATVLESEGTRESAINVAEGKKQAQILASEAEKAEQINQAAGEASAVLAKAKAKAEAIRILAAALTQHNGDAAASLTVAEQYVSAFSKLAKDSNTILLPSNPGDVTSMVAQAMGVYGALTKAPVPGTPDSLSSGSSRDVQGTDASLDEELDRVKMS

SEQ ID NO: 611 - protein, 356 aa, Homo sapiens; identical to SEQ ID NO: 610

SEQ ID NO: 612 - protein, 1356 aa, Homo sapiens
MKVTVCFGRTRVVVPCGDGHMKVFSLIQQAVTRYRKAIAKDPNYWIQVHRLEHGDGGILDLDDILCDVADDKDRLVAVFDEQDPHHGGDGTSASSTGTQSPEIFGSELGTNNVSAFQPYQATSEIEVTPSVLRANMPLHVRRSSDPALIGLSTSVSDSNFSSEEPSRKNPTRWSTTAGFLKQNTAGSPKTCDRKKDENYRSLPRDTSNWSNQFQRDNARSSLSASHPMVGKWLEKQEQDEDGTEEDNSRVEPVGHADTGLEHIPNFSLDDMVKLVEVPNDGGPLGIHVVPFSARGGRTLGLLVKRLEKGGKAEHENLFRENDCIVRINDGDLRNRRFEQAQHMFRQAMRTPIIWFHVVPAANKEQYEQLSQSEKNNYYSSRFSPDSQYIDNRSVNSAGLHTVQRAPRLNHPPEQIDSHSRLPHSAHPSGKPPSAPASAPQNVFSTTVSSGYNTKKIGKRLNIQLKKGTEGLGFSITSRDVTIGGSAPIYVKNILPRGAAIQDGRLKAGDRLIEVNGVDLVGKSQEEVVSLLRSTKMEGTVSLLVFRQEDAFHPRELNAEPSQMQIPKETKAEDEDIVLTPDGTREFLTFEVPLNDSGSAGLGVSVKGNRSKENHADLGIFVKSIINGGAASKDGRLRVNDQLIAVNGESLLGKTNQDAMETLRRSMSTEGNKRGMIQLIVARRISKCNELKSPGSPPGPELPIETALDDRERRISHSLYSGIEGLDESPSRNAALSRIMGESGKYQLSPTVNMPQDDTVIIEDDRLPVLPPHLSDQSSSSSHDDVGFVTADAGTWAKAAISDSADCSLSPDVDPVLAFQREGFGRQSMSEKRTKQFSDASQLDFVKTRKSKSMDLGIADETKLNTVDDQKAGSPSRDVGPSLGLKKSSSLESLQTAVAEVTLNGDIPFHRPRPRIIRGRGCNESFRAAIDKSYDKPAVDDDDEGMETLEEDTEESSRSGRESVSTASDQPSHSLERQMNGNQEKGDKTDRKKDKTGKEKKKDRDKEKDKMKAKKGMLKGLGDMFRFGKHRKDDKIEKTGKIKIQESFTSEEERIRMKQEQERIQAKTREFRERQARERDYAEIQDFHRTFGCDDELMYGGVSSYEGSMALNARPQSPREGHMMDALYAQVKKPRNSKPSPVDSNRSTPSNHDRIQRLRQEFQQAKQDEDVEDRRRTYSFEQPWPNARPATQSGRHSVSVEVQMQRQRQEERESSQQAQRQYSSLPRQSRKNASSVSQDSWEQNYSPGEGFQSAKENPRYSSYQGSRNGYLGGHGFNARVMLETQELLRQEQRRKEQQMKKQPPSEGPSNYDSYKKVQDPSYAPPKGPFRQDVPPSPSQVARLNRLQTPEKGRPFYS

SEQ ID NO: 613 - protein, 1000 aa, Homo sapiens
MKVTVCFGRTRVVVPCGDGHMKVFSLIQQAVTRYRKAIAKDPNYWIQVHRLEHGDGGILDLDDILCDVADDKDRLVAVFDEQDPHHGGDGTSASSTGTQSPEIFGSELGTNNVSAFQPYQATSEIEVTPSVLRANMPLHVRRSSDPALIGLSTSVSDSNFSSEEPSRKNPTRWSTTAGFLKQNTAGSPKTCDRKKDENYRSLPRDTSNWSNQFQRDNARSSLSASHPMVGKWLEKQEQDEDGTEEDNSRVEPVGHADTGLEHIPNFSLDDMVKLVEVPNDGGPLGIHVVPFSARGGRTLGLLVKRLEKGGKAEHENLFRENDCIVRINDGDLRNRRFEQAQHMFRQAMRTPIIWFHVVPAANKEQYEQLSQSEKNNYYSSRFSPDSQYIDNRSVNSAGLHTVQRAPRLNHPPEQIDSHSRLPHSAHPSGKPPSAPASAPQNVFSTTVSSGYNTKKIGKRLNIQLKKGTEGLGFSITSRDVTIGGSAPIYVKNILPRGAAIQDGRLKAGDRLIEVNGVDLVGKSQEEVVSLLRSTKMEGTVSLLVFRQEDAFHPRELNAEPSQMQIPKETKAEDEDIVLTPDGTREFLTFEVPLNDSGSAGLGVSVKGNRSKENHADLGIFVKSIINGGAASKDGRLRVNDQLIAVNGESLLGKTNQDAMETLRRSMSTEGNKRGMIQLIVARRISKCNELKSPGSPPGPELPIETALDDRERRISHSLYSGIEGLDESPSRNAALSRIMGKYQLSPTVNMPQDDTVIIEDDRLPVLPPHLSDQSSSSSHDDVGFVTADAGTWAKAAISDSADCSLSPDVDPVLAFQREGFGRQTDETKLNTVDDQKAGSPSRDVGPSLGLKKSSSLESLQTAVAEVTLNGDIPFHRPRPRIIRGRGCNESFRAAIDKSYDKPAVDDDDEGMETLEEDTEESSRSGRESVSTASDQPSHSLERQMNGNQEKGDKTDRKKDKTGKEKKKDRDKEKDKMKAKKGMLKGLGDMFSLAKLKPEKR

SEQ ID NO: 614 - protein, 540 aa, Homo sapiens
MPLFATNPFDQDVEKATSEMNTAEDWGLILDICDKVGQSRTGPKDCLRSIMRRVNHKDPHVAMQALTLLGACVSNCGKIFHLEVCSRDFASEVSNVLNKGHPKVCEKLKALMVEWTDEFKNDPQLSLISAMIKNLKEQGVTFPAIGSQAAEQAKASPALVAKDPGTVANKKEEEDLAKAIELSLKEQRQQSTTLSTLYPSTSSLLTNHQHEGRKVRAIYDFEAAEDNELTFKAGEIITVLDDSDPNWWKGETHQGIGLFPSNFVTADLTAEPEMIKTEKKTVQFSDDVQVETIEPEPEPAFIDEDKMDQLLQMLQSTDPSDDQPDLPELLHLEAMCHQMGPLIDEKLEDIDRKHSELSELNVKVMEALSLYTKLMNEDPMYSMYAKLQNQPYYMQSSGVSGSQVYAGPPPSGAYLVAGNAQMSHLQSYSLPPEQLSSLSQAVVPPSANPALPSQQTQAAYPNTMVSSVQGNTYPSQAPVYSPPPAATAAAATADVTLYQNAGPNMPQVPNYNLTSSTLPQPGGSQQPPQPQQPYSQKALL

SEQ ID NO: 615 - protein, 540 aa, Homo sapiens; identical to SEQ ID NO: 614

SEQ ID NO: 616 - protein, 623 aa, Homo sapiens
MPPKVTSELLRQLRQAMRNSEYVTEPIQAYIIPSGDAHQSEYIAPCDCRRAFVSGFDGSAGTAIITEEHAAMWTDGRYFLQAAKQMDSNWTLMKMGLKDTPTQEDWLVSVLPEGSRVGVDPLIIPTDYWKKMAKVLRSAGHHLIPVKENLVDKIWTDRPERPCKPLLTLGLDYTGISWKDKVADLRLKMAERNVMWFVVTALDEIAWLFNLRGSDVEHNPVFFSYAIIGLETIMLFIDGDRIDAPSVKEHLLLDLGLEAEYRIQVHPYKSILSELKALCADLSPREKVWVSDKASYAVSETIPKDHRCCMPYTPICIAKAVKNSAESEGMRRAHIKDAVALCELFNWLEKEVPKGGVTEISAADKAEEFRRQQADFVDLSFPTISSTGPNGAIIHYAPVPETNRTLSLDEVYLIDSGAQYKDGTTDVTRTMHFGTPTAYEKECFTYVLKGHIAVSAAVFPTGTKGHLLDSFARSALWDSGLDYLHGTGHGVGSFLNVHEGPCGISYKTFSDEPLEAGMIVTDEPGYYEDGAFGIRIENVVLVVPVKTKYNFNNRGSLTFEPLTLVPIQTKMIDVDSLTDKECDWLNNYHLTCRDVIGKELQKQGRQEALEWLIRETQPISKQH

SEQ ID NO: 617 - protein, 623 aa, Homo sapiens; identical to SEQ ID NO: 616

SEQ ID NO: 618 - protein, 666 aa, Homo sapiens
MAASRKPPRVRVNHQDFQLRNLRIIEPNEVTHSGDTGVETDGRMPPKVTSELLRQLRQAMRNSEYVTEPIQAYIIPSGDAHQSEYIAPCDCRRAFVSGFDGSAGTAIITEEHAAMWTDGRYFLQAAKQMDSNWTLMKMGLKDTPTQEDWLVSVLPEGSRVGVDPLIIPTDYWKKMAKVLRSAGHHLIPVKENLVDKIWTDRPERPCKPLLTLGLDYTGISWKDKVADLRLKMAERNVMWFVVTALDEIAWLFNLRGSDVEHNPVFFSYAIIGLETIMLFIDGDRIDAPSVKEHLLLDLGLEAEYRIQVHPYKSILSELKALCADLSPREKVWVSDKASYAVSETIPKDHRCCMPYTPICIAKAVKNSAESEGMRRAHIKDAVALCELFNWLEKEVPKGGVTEISAADKAEEFRRQQADFVDLSFPTISSTGPNGAIIHYAPVPETNRTLSLDEVYLIDSGAQYKDGTTDVTRTMHFGTPTAYEKECFTYVLKGHIAVSAAVFPTGTKGHLLDSFARSALWDSGLDYLHGTGHGVGSFLNVHEGPCGISYKTFSDEPLEAGMIVTDEPGYYEDGAFGIRIENVVLVVPVKTKYNFNNRGSLTFEPLTLVPIQTKMIDVDSLTDKECDWLNNYHLTCRDVIGKELQKQGRQEALEWLIRETQPISKQH

SEQ ID NO: 619 - protein, 623 aa, Homo sapiens; identical to SEQ ID NO: 616

SEQ ID NO: 620 - protein, 1235 aa, Homo sapiens
MSFFNFRKIFKLGSEKKKKQYEHVKRDLNPEDFWEIIGELGDGAFGKVYKAQNKETSVLAAAKVIDTKSEEELEDYMVEIDILASCDHPNIVKLLDAFYYENNLWILIEFCAGGAVDAVMLELERPLTESQIQVVCKQTLDALNYLHDNKIIHRDLKAGNILFTLDGDIKLADFGVSAKNTRTIQRRDSFIGTPYWMAPEVVMCETSKDRPYDYKADVWSLGITLIEMAEIEPPHHELNPMRVLLKIAKSEPPTLAQPSRWSSNFKDFLKKCLEKNVDARWTTSQLLQHPFVTVDSNKPIRELIAEAKAEVTEEVEDGKEEDEEEETENSLPIPASKRASSDLSIASSEEDKLSQNACILESVSEKTERSNSEDKLNSKILNEKPTTDEPEKAVEDINEHITDAQLEAMTELHDRTAVIKENEREKRPKLENLPDTEDQETVDINSVSEGKENNIMITLETNIEHNLKSEEEKDQEKQQMFENKLIKSEEIKDTILQTVDLVSQETGEKEANIQAVDSEVGLTKEDTQEKLGEDDKTQKDVISNTSDVIGTCEAADVAQKVDEDSAEDTQSNDGKEVVEVGQKLINKPMVGPEAGGTKEVPIKEIVEMNEIEEGKNKEQAINSSENIMDINEEPGTTEGEEITESSSTEEMEVRSVVADTDQKALGSEVQDASKVTTQIDKEKKEIPVSIKKEPEVTVVSQPTEPQPVLIPSININSDSGENKEEIGSLSKTETILPPESENPKENDNDSGTGSTADTSSIDLNLSISSFLSKTKDSGSISLQETRRQKKTLKKTRKFIVDGVEVSVTTSKIVTDSDSKTEELRFLRRQELRELRFLQKEEQRAQQQLNSKLQQQREQIFRRFEQEMMSKKRQYDQEIENLEKQQKQTIERLEQEHTNRLRDEAKRIKGEQEKELSKFQNMLKNRKKEVINEVEKAPKELRKELMKRRKEELAQSQHAQEQEFVQKQQQELDGSLKKIIQQQKAELANIERECLNNKQQLMRAREAAIWELEERHLQEKHQLLKQQLKDQYFMQRHQLLKRHEKETEQMQRYNQRLIEELKNRQTQERARLPKIQRSEAKTRMAMFKKSLRINSTATPDQDRDKIKQFAAQEEKRQKNERMAQHQKHENQMRDLQLQCEANVRELHQLQNEKCHLLVEHETQKLKELDEEHSQELKEWREKLRPRKKTLEEEFARKLQEQEVFFKMTGESECLNPSTQSRISKFYPIPSLHSTGS

SEQ ID NO: 621 - protein, 1204 aa, Homo sapiens
MSFFNFRKIFKLGSEKKKKQYEHVKRDLNPEDFWEIIGELGDGAFGKVYKAQNKETSVLAAAKVIDTKSEEELEDYMVEIDILASCDHPNIVKLLDAFYYENNLWILIEFCAGGAVDAVMLELERPLTESQIQVVCKQTLDALNYLHDNKIIHRDLKAGNILFTLDGDIKLADFGVSAKNTRTIQRRDSFIGTPYWMAPEVVMCETSKDRPYDYKADVWSLGITLIEMAEIEPPHHELNPMRVLLKIAKSEPPTLAQPSRWSSNFKDFLKKCLEKNVDARWTTSQLLQHPFVTVDSNKPIRELIAEAKAEVTEEVEDGKEEDEEEETENSLPIPASKRASSDLSIASSEEDKLSQNACILESVSEKTERSNSEDKLNSKILNEKPTTDEPEKAVEDINEHITDAQLEAMTELHDRTAVIKENEREKRPKLENLPDTEDQETVDINSVSEGKENNIMITLETNIEHNLKSEEEKDQEKQQMFENKLIKSEEIKDTILQTVDLVSQETGEKEANIQAVDSEVGLTKEDTQEKLGEDDKTQKDVISNTSDVIGTCEAADVAQKVDEDSAEDTQSNDGKEVVEVGQKLINKPMVGPEAGGTKEVPIKEIVEMNEIEEGKNKEQAINSSENIMDINEEPGTTEGEEITESSSTEEMEVRSVVADTDQKALGSEVQDASKVTTQIDKEKKEIPVSIKKEPEVTVVSQPTEPQPVLIPSININSDSGENKEEIGSLSKTETILPPESENPKENDNDSGTGSTADTSSIDLNLSISSFLSKTKDSGSISLQETRRQKKTLKKTRKFIVDGVEVSVTTSKIVTDSDSKTEELRFLRRQELRELRFLQKEEQRAQQQLNSKLQQQREQIFRRFEQEMMSKKRQYDQEIENLEKQQKQTIERLEQEHTNRLRDEAKRIKGEQEKELSKFQNMLKNRKKEEQEFVQKQQQELDGSLKKIIQQQKAELANIERECLNNKQQLMRAREAAIWELEERHLQEKHQLLKQQLKDQYFMQRHQLLKRHEKETEQMQRYNQRLIEELKNRQTQERARLPKIQRSEAKTRMAMFKKSLRINSTATPDQDRDKIKQFAAQEEKRQKNERMAQHQKHENQMRDLQLQCEANVRELHQLQNEKCHLLVEHETQKLKELDEEHSQELKEWREKLRPRKKTLEEEFARKLQEQEVFFKMTGESECLNPSTQSRISKFYPIPSLHSTGS

SEQ ID NO: 622 - protein, 1204 aa, Homo sapiens; identical to SEQ ID NO: 621

SEQ ID NO: 623 - protein, 1152 aa, Homo sapiens
MSFFSFRKIFKLGSEKKKKQYEHVKRDLNPEDFWEIIGELGDGAFGKVYKAQNKETSVLAAAKVIDTKSEEELEDYMVEIDILASCDHPNIVKLLDAFYYENNLWILIEFCAGGAVDAVMLELERPLTESQIQVVCKQTLDALNYLHDNKIIHRDLKAGNILFTLDGDIKLADFGVSAKNTRTIQRRDSFIGTPYWMAPEVVMCETSKDRPYDYKADVWSLGITLIEMAEIEPPHHELNPMRVLLKIAKSEPPTLAQPSRWSSNFKDFLKKCLEKNVDARWTTSQLLQHPFVTVDSNKPIRELIAEAKAEVTEEVEDGKEEDEEEETENSLPIPASKRASSDLSIASSEEDKLSQNACILESVSEKTERSNSEDKLNSKILNEKPTTDEPEKAVEDINEHITDAQLEAMTELHDRTAVIKENEREKRPKLENLPDTEDQETVDINSVSEGKENNIMITLETNIEHNLKSEEEKDQEKQQMFENKLIKSEEIKDTILQTVDLVSQETGEKEANIQAVDSEVGLTKEDTQEKLGEDDKTQKDVISNTSDVIGTCEAADVAQKVDEDSAEDTQSNDGKEVVEVGQKLINKPMVGPEAGGTKEVPIKEIVEMNEIEEGKNKEQAINSSENIMDINEEPGTTEGEEITESSSTEEMEVRSVVADTDQKALGSEVQDASKVTTQIDKEKKEIPVSIKKEPEVTVVSQPTEPQPVLIPSININSDSGENKEEIGSLSKTETILPPESENPKENDNDSGTGSTADTSSIDLNLSISSFLSKTKDSGSISLQETRRQKKTLKKTRKFIVDGVEVSVTTSKIVTDSDSKTEELRFLRRQELRELRFLQKEEQRAQQQLNSKLQQQREQIFRRFEQEMMSKKRQYDQEIENLEKQQKQTIERLEQEHTNRLRDEAKRIKGEQEKELSKFQNMLKNRKKEEQEFVQKQQQELDGSLKKIIQQQKAELANIERECLNNKQQLMRAREAAIWELEERHLQEKHQLLKQQLKDQYFMQRHQLLKRHEKETEQMQRYNQRLIEELKNRQTQERARLPKIQRSEAKTRMAMFKKSLRINSTATPDQDRDKIKQFAAQEEKRQKNERMAQHQKHENQMRDLQLQCEANVRELHQLQNEKCHLLVEHETQKLKELDEEHTRIKGVEREIET

SEQ ID NO: 624 - protein, 505 aa, Homo sapiens
MSYPGYPPPPGGYPPAAPGGGPWGGAAYPPPPSMPPIGLDNVATYAGQFNQDYLSGMAANMSGTFGGANMPNLYPGAPGAGYPPVPPGGFGQPPSAQQPVPPYGMYPPPGGNPPSRMPSYPPYPGAPVPGQPMPPPGQQPPGAYPGQPPVTYPGQPPVPLPGQQQPVPSYPGYPGSGTVTPAVPPTQFGSRGTITDAPGFDPLRDAEVLRKAMKGFGTDEQAIIDCLGSRSNKQRQQILLSFKTAYGKDLIKDLKSELSGNFEKTILALMKTPVLFDIYEIKEAIKGVGTDEACLIEILASRSNEHIRELNRAYKAEFKKTLEEAIRSDTSGHFQRLLISLSQGNRDESTNVDMSLAQRDAQELYAAGENRLGTDESKFNAVLCSRSRAHLVAVFNEYQRMTGRDIEKSICREMSGDLEEGMLAVVKCLKNTPAFFAERLNKAMRGAGTKDRTLIRIMVSRSETDLLDIRSEYKRMYGKSLYHDISGDTSGDYRKILLKICGGND

SEQ ID NO: 625 - protein, 236 aa, Homo sapiens
MKTPVLFDIYEIKEAIKGVGTDEACLIEILASRSNEHIRELNRAYKAEFKKTLEEAIRSDTSGHFQRLLISLSQGNRDESTNVDMSLAQRDAQELYAAGENRLGTDESKFNAVLCSRSRAHLVAVFNEYQRMTGRDIEKSICREMSGDLEEGMLAVVKCLKNTPAFFAERLNKAMRGAGTKDRTLIRIMVSRSETDLLDIRSEYKRMYGKSLYHDISGDTSGDYRKILLKICGGND

SEQ ID NO: 626 - protein, 505 aa, Homo sapiens; identical to SEQ ID NO: 624

SEQ ID NO: 627 - protein, 225 aa, Homo sapiens
MEKYLSLSGNHSSNKRSLEGLSAFRSLEELILDNNQLGDDLVLPGLPRLHTLTLNKNRITDLENLLDHLAEVTPALEYLSLLGNVACPNELVSLEKDEEDYKRYRCFVLYKLPNLKFLDAQKVTRQEREEALVRGVFMKVVKPKASSEDVASSPERHYTPLPSASRELTSHQDEVSFLSPRLECSGAFSAHCNLRLPGSSDSPVSASQVAGNTGMCHHAQLILYF

SEQ ID NO: 628 - protein, 198 aa, Homo sapiens
MEKYLSLSGNHSSNKRSLEGLSAFRSLEELILDNNQLGDDLVLPGLPRLHTLTLNKNRITDLENLLDHLAEVTPALEYLSLLGNVACPNELVSLEKDEEDYKRYRCFVLYKLPNLKFLDAQKVTRQEREEALVRGVFMKVVKPKASSEDVASSPERHYTPLPSASRELTSHQGVLGKCRYVYYGKNSEGNRFIRDDQL

SEQ ID NO: 629 - protein, 191 aa, Homo sapiens
MEKYLSLSGNHSSNKRSLEGLSAFRSLEELILDNNQLGDDLVLPGLPRLHTLTLNKNRITDLENLLDHLAEVTPALEYLSLLGNVACPNELVSLEKDEEDYKRYRCFVLYKLPNLKFLDAQKVTRQEREEALVRGVFMKVVKPKASSEDVASSPERHYTPLPSASRELTSHQDLNIPVLRIHSKLAVLCHC

SEQ ID NO: 630 - protein, 1649 aa, Homo sapiens [sequence omitted]

SEQ ID NO: 631 - protein, 674 aa, Homo sapiens
MRATHGSNSLPSSARLGSSSNLQFKAERIKIPSTPRYPRSVVGSERGSVSHSECSTPPQSPLNIDTLSSCSQSQTSASTLPRIAVNPASLGERRKDRPYVEEPRHVKVQKGSEPLGISIVSGEKGGIYVSKVTVGSIAHQAGLEYGDQLLEFNGINLRSATEQQARLIIGQQCDTITILAQYNPHVHQLSSHSRSSSHLDPAGTHSTLQGSGTTTPEHPSVIDPLMEQDEGPSTPPAKQSSSRIAGDANKKTLEPRVVFIKKSQLELGVHLCGGNLHGVFVAEVEDDSPAKGPDGLVPGDLILEYGSLDVRNKTVEEVYVEMLKPRDGVRLKVQYRPEEFTKAKGLPGDSFYIRALYDRLADVEQELSFKKDDILYVDDTLPQGTFGSWMAWQLDENAQKIQRGQIPSKYVMDQEFSRRLSMSEVKDDNSATKTLSAAARRSFFRRKHKHKRSGSKDGKDLLALDAFSSDSIPLFEDSVSLAYQRVQKVDCTALRPVLILGPLLDVVKEMLVNEAPGKFCRCPLEVMKASQQAIERGVKDCLFVDYKRRSGHFDVTTVASIKEITEKNRHCLLDIAPHAIERLHHMHIYPIVIFIHYKSAKHIKEQRDPIYLRDKVTQRHSKEQFEAAQKLEQEYSRYFTGVIQGGALSSICTQILAMVNQEQNKVLWIPACPL

SEQ ID NO: 632 - protein, 1809 aa, Homo sapiens
  VARIANT (1)...(1809): Xaa = Any Amino Acid
MPSDSESSSSLSSVGTTGKAPSPPPLLTDRQVNEKVENLSIQLRLMTRERNELRKRLAFATHGTAFDKRPYHRLNPDYERLKIQCVRAMSDLQSLQNQHTNALKRCEEVAKETDFYHTLHSRLLSDQTRLKDDVDMLRRENGQLLRERNLLQQSWEDMKRLHEEDQKEIGDLRAQQQQVLKHNGSSEILNKLYDTAMDKLEVVKKDYDALRKRYSEKVAIHNADLSRLEQLGEENQRLLKQTEMLTQQRDTAIQLQHQCALSLRRFEAIHHELNKATAQNKDLQWEMELLQSELTELRTTQVKTAKESEKYREERDAVYSEYKLIMSERDQVISELDKLQTEVELAESKLKSSTSEKKAANEEMEALRQIKDTVTMDAGRANKEVEILRKQCKALCQELKEALQEADVAKCRRDWAFQERDKIVAERDSIRTLCDNLRRERDRAVSELAEALRSLDDTRKQKNDVSRELKELKEQMESQLEKEARFRQLMAHSSHDSAIDTDSMEWETEVVEFERETXDIDLKALGFDMAEGVNEPCFPGDCGIFVTKVDKGSIADGRLRVNDWLLRINDVDLINKDKKQAIKALLNGEGAINMVVRRRKSLGGKVVTPLHINLSGQKDSGISLENGVYAAAVLPGSPAAKEGSLAVGDRIVAINGIALDNKSLNECESLLRSCQDSLTLSLLKVFPQSSSWSGQNIFENIKDSDKMLSFRAHGPEVQAHNKRNLIQHNNSTQTDIFYTDRLEDRKEPGPPGGSSSFLHKPFPGGPLQVCPQACPSASERSLSSFRSDASGDRGFGLVDVRGRRPLLPFETEVGPCGVGEASLDKADSEGSNSGGTWPKAMLSSTAVPEKLSVYKKPKQRKSIFDPNTFKRPQTPPKIDYLLPGPGPAHSPQPSKRAGPLTPPKPPRRSDSIKFQHRLETSSESEATLVGSSPSTSPPSALPPDVDPGEPMHASPPRKARVRIASSYYPEGDGDSSHLPAKKSCDEDLTSQKVDELGQKRRRPKSAPSFRPKLAPVVIPAQFLEEQKCVPASGELSPELQEWAPYSPGHSSRHSNPPLYPSRPSVGTVPRSLTPSTTVSSILRNPIYTVRSHRVGPCSSPPAARDAGPQGLHPSVQHQGRLSLDLSHRTCSDYSEMRATHGSNSLPSSARLGSSSNLQFKAERIKIPSTPRYPRSVVGSERGSVSHSECSTPPQSPLNIDTLSSCSQSQTSASTLPRIAVNPASLGERRKDRPYVEEPRHVKVQKGSEPLGISIVSGEKGGIYVSKVTVGSIAHQAGLEYGDQLLEFNGINLRSATEQQARLIIGQQCDTITILAQYNPHVHQLSSHSRSSSHLDPAGTHSTLQGSGTTTPEHPSVIDPLMEQDEGPSTPPAKQSSSRIAGDANKKTLEPRVVFIKKSQLELGVHLCGGNLHGVFVAEVEDDSPAKGPDGLVPGDLILEYGSLDVRNKTVEEVYVEMLKPRDGVRLKVQYRPEEFTKAKGLPGDSFYIRALYDRLADVEQELSFKKDDILYVDDTLPQGTFGSWMAWQLDENAQKIQRGQIPSKYVMDQEFSRRLSMSEVKDDNSATKTLSAAARRSFFRRKHKHKRSGSKDGKDLLALDAFSSDSIPLFEDSVSLAYQRVQKVDCTALRPVLILGPLLDVVKEMLVNEAPGKFCRCPLEVMKASQQAIERGVKDCLFVDYKRRSGHFDVTTVASIKEITEKNRHCLLDIAPHAIERLHHMHIYPIVIFIHYKSAKHIKEQRDPIYLRDKVTQRHSKEQFEAAQKLEQEYSRYFTGVIQGGALSSICTQILAMVNQEQNKVLWIPACPL

SEQ ID NO: 633 - protein, 1141 aa, Homo sapiens
MAVPGDAARVRDKPVHSGVSQAPTAGRDCHHRADPASPRDSGCRGCWGDLVLQPLRSSRKLSSALCAGSLSFLLALLVRLVRGEVGCDLEQCKEAAAAEEEEAAPGAEGGVFPGPRGGAPGGGARLSPWLQPSALLFSLLCAFFWMGLYLLRAGVRLPLAVALLAACCGGEALVQIGLGVGEDHLLSLPAAGVVLSCLAAATWLVLRLRLGVLMIALTSAVRTVSLISLERFKVAWRPYLAYLAGVLGILLARYVEQILPQSAEAAPREHLGSQLIAGTKEDIPVFKRRRRSSSVVSAEMSGCSSKSHRRTSLPCIPREQLMGHSEWDHKRGPRGSQSSGTSITVDIAVMGEAHGLITDLLADPSLPPNVCTSLRAVSNLLSTQLTFQAIHKPRVNPVTSLSENYTCSDSEESSEKDKLAIPKRLRRSLPPGLLRRVSSTWTTTTSATGLPTLEPAPVRRDRSTSIKLQEAPSSSPDSWNNPVMMTLTKSRSFTSSYAISAANHVKAKKQSRPGALAKISPLSSPCSSPLQGTPASSLVSKISAVQFPESADTTAKQSLGSHRALTYTQSAPDLSPQILTPPVICSSCGRPYSQGNPADEPLERSGVATRTPSRTDDTAQVTSDYETNNNSDSSDIVQNEDETECLREPLRKASACSTYAPETMMFLDKPILAPEPLVMDNLDSIMEQLNTWNFPIFDLVENIGRKCGRILSQVSYRLFEDMGLFEAFKIPIREFMNYFHALEIGYRDIPYHNRIHATDVLHAVWYLTTQPIPGLSTVINDHGSTSDSDSDSGFTHGHMGYVFSKTYNVTDDKYGCLSGNIPALELMALYVAAAMHDYDHPGRTNAFLVATSAPQAVLYNDRSVLENHHAAAAWNLFMSRPEYNFLINLDHVEFKHFRFLVIEAILATDLKKHFDFVAKFNGKVNDDVGIDWTNENDRLLVCQMCIKLADINGPAKCKELHLQWTDGIVNEFYEQGDEEASLGLPISPFMDRSAPQLANLQESFISHIVGPLCNSYDSAGLMPGKWVEDSDESGDTDDPEEEEEEAPAPNEEETCENNESPKKKTFKRRKIYCQITQHLLQNHKMWKKVIEEEQRLAGIENQSLDQTPQSHSSEQIQAIKEEEEEKGKPRGEEIPTQKPDQ

SEQ ID NO: 634 - protein, 1141 aa, Homo sapiens
MAVPGDAARVRNKPVHSGVSQAPTAGRDCHHRADPASPRDSGCRGCWGDLVLQPLRSSRKLSSALCAGCLSFLLALLVRLVRGEVGCDLEQCKEAAAAEEEEAAPGAEGAVFPGPRGGAPGGGARLSPWLQPSALLFSLLCAFFWMGLYLLRAGVRLPLAVALLAACCGGEALVQIGLGVGEDHLLSLPAAGVVLSCLAAATWLVLRLRLGVLMIALTSAVRTVSLISLERFKVAWRPYLAYLAGVLGILLARYVEQILPQSAEAAPREHLGSQLIAGTKEDIPVFKRRRRSSSVVSAEMSGCSSKSHRRTSLPCIPREQLMGHSEWDHKRGPRGSQSSGTSITVDIAVMGEATASLPTSWQTLLFHQTCATSLRAVSNLLSTQLTFQAIHKPRVNPVTSLSENYTCSDSEESSEKDKLAIPKRLRRSLPPGLLRRVSSTWTTTTSATGLPTLEPAPVRRDRSTSIKLQEAPSSSPDSWNNPVMMTLTKSRSFTSSYAISAANHVKAKKQSRPGALAKISPLSSPCSSPLQGTPASSLVSKISAVQFPESADTTAKQSLGSHRALTYTQSAPDLSPQILTPPVICSSCGRPYSQGNPADEPLERSGVATRTPSRTDDTAQVTSDYETNNNSDSSDIVQNEDETECLREPLRKASACSTYAPETMMFLDKPILAPEPLVMDNLDSIMEQLNTWNFPIFDLVENIGRKCGRILSQVSYRLFEDMGLFEAFKIPIREFMNYFHALEIGYRDIPYHNRIHATDVLHAVWYLTTQPIPGLSTVINDHGSTSDSDSDSGFTHGHMGYVFSKTYNVTDDKYGCLSGNIPALELMALYVAAAMHDYDHPGRTNAFLVATSAPQAVLYNDRSVLENHHAAAAWNLFMSRPEYNFLINLDHVEFKHFRFLVIEAILATDLKKHFDFVAKFNGKVNDDVGIDWTNENDRLLVCQMCIKLADINGPAKCKELHLQWTDGIVNEFYEQGDEEASLGLPISPFMDRSAPQLANLQESFISHIVGPLCNSYDSAGLMPGKWVEDSDESGDTDDPEEEEEEAPAPNEEETCENNESPKKKTFKRRKIYCQITQHLLQNHKMWKKVIEEEQRLAGIENQSLDQTPQSHSSEQIQAIKEEEEEKGKPRGEEIPTQKPDQ

SEQ ID NO: 635 - protein, 335 aa, Homo sapiens
MLGIWTLLPLVLTSVARLSSKSVNAQVTDINSKGLELRKTVTTVETQNLEGLHHDGQFCHKPCPPGERKARDCTVNGDEPDCVPCQEGKEYTDKAHFSSKCRRCRLCDEGHGLEVEINCTRTQNTKCRCKPNFFCNSTVCEHCDPCTKCEHGIIKECTLTSNTKCKEEGSRSNLGWLCLLLLPIPLIVWVKRKEVQKTCRKHRKENQGSHESPTLNPETVAINLSDVDLSKYITTIAGVMTLSQVKGFVRKNGVNEAKIDEIKNDNVQDTAEQKVQLLRNWHQLHGKKEAYDTLIKDLKKANLCTLAEKIQTIILKDITSDSENSNFRNEIQSLV

SEQ ID NO: 636 - protein, 334 aa, Homo sapiens [sequence omitted]

SEQ ID NO: 637 - protein, 149 aa, Homo sapiens
MLGIWTLLPLVLTSVARLSSKSVNAQVTDINSKGLELRKTVTTVETQNLEGLHHDGQFCHKPCPPGERKARDCTVNGDEPDCVPCQEGKEYTDKAHFSSKCRRCRLCDEGHDVNMESSRNAHSPATPSAKRKDPDLTWGGFVFFFCQFH

SEQ ID NO: 638 - protein, 201 aa, Homo sapiens [sequence omitted]

SEQ ID NO: 639 - protein, 103 aa, Homo sapiens
MLGIWTLLPLVLTSVARLSSKSVNAQVTDINSKGLELRKTVTTVETQNLEGLHHDGQFCHKPCPPDVNMESSRNAHSPATPSAKRKDPDLTWGGFVFFFCQFH

SEQ ID NO: 640 - protein, 313 aa, Homo sapiens [sequence omitted]

SEQ ID NO: 641 - protein, 149 aa, Homo sapiens; identical to SEQ ID NO: 637

SEQ ID NO: 642 - protein, 103 aa, Homo sapiens; identical to SEQ ID NO: 639

SEQ ID NO: 643 - protein, 289 aa, Homo sapiens
  VARIANT (1)...(289): Xaa = Any Amino Acid
MRISMDGQNILVNGRDDGTLVYLKWKRFGGHLASEILDYYQKLLISLSSAMDKENHYLSTTPKVSVDLGSDSEHTKQKASTDLSQDELVLTDVKKEIPWIQQKSQEAIKKEVNLFSKKRKEIKQGIKSLSKTILNMMEENDKLENIAKLDQQEFGLDLEELERLHDESQEEVAKMIKDVEMHNLAKSYLAELIKEECWNSMAVKGRALKCFHIPCVVENFPMKARTVEELKELERVLQQKKIEAECLKLRKEIVEAQSGVKLIKQRHEEDDEEEEEEDKTVKYSNLPNX

SEQ ID NO: 644 - protein, 1015 aa, Homo sapiens
MPRATALGALVSLLLLLPLPRGAGGLGERPDATADYSELDGEEGTEQQLEHYHDPCKAAVFWGDIALDEDDLKLFHIDKARDWTKQTVGATGHSTGGLEEQASESSPDTTAMDTGTKEAGKDGRENTTLLHSPGTLHAAAKTFSPRVRRATTSRTERIWPGGVIPYVIGGNFTGSQRAIFKQAMRHWEKHTCVTFIERTDEESFIVFSYRTCGCCSYVGRRGGGPQAISIGKNCDKFGIVAHELGHVVGFWHEHTRPDRDQHVTIIRENIQPGQEYNFLKMEAGEVSSLGETYDFDSIMHYARNTFSRGVFLDTILPRQDDNGVRPTIGQRVRLSQGDIAQARKLYKCPACGETLQDTTGNFSAPGFPNGYPSYSHCVWRISVTPGEKIVLNFTSMDLFKSRLCWYDYVEVRDGYWRKAPLLGRFCGDKIPEPLVSTDSRLWVEFRSSSNILGKGFFAAYEATCGGDMNKDAGQIQSPNYPDDYRPSKECVWRITVSEGFHVGLTFQAFEIERHDSCAYDYLEVRDGPTEESALIGHFCGYEKPEDVKSSSNRLWMKFVSDGSINKAGFAANFFKEVDECSWPDHGGCEHRCVNTLGSYKCACDPGYELAADKKMCEVACGGFITKLNGTITSPGWPKEYPTNKNCVWQVVAPAQYRISLQFEVFELEGNDVCKYDFVEVRSGLSPDAKLHGRFCGSETPEVITSQSNNMRVEFKSDNTVSKRGFRAHFFSDKDECAKDNGGCQHECVNTFGSYLCRCRNGYWLHENGHDCKEAGCAHKISSVEGTLASPNWPDKYPSRRECTWNISSTAGHRVKLTFNEFEIEQHQECAYDHLEMYDGPDSLAPILGRFCGSKKPDPTVASGSSMFLRFYSDASVQRKGFQAVHSTECGGRLKAEVQTKELYSHAQFGDNNYPSEARCDWVIVAEDGYGVELTFRTFEVEEEADCGYDYMEAYDGYDSSAPRLGRFCGSGPLEEIYSAGDSLMIRFRTDDTINKKGFHARYTSTKFQDALHMKK

SEQ ID NO: 645 - protein, 408 aa, Homo sapiens
MSKRDIVLTNVTVVQLLRQPCPVTRAPPPPEPKAEVEPQPQPEPTPVREEIKPPPPPLPPHPATPPPKMVSVARELTVGINGFGRIGRLVLRACMEKGVKVVAVNDPFIDPEYMVYMFKYDSTHGRYKGSVEFRNGQLVVDNHEISVYQCKEPKQIPWRAVGSPYVVESTGVYLSIQAASDHISAGAQRVVISAPSPDAPMFVMGVNENDYNPGSMNIVSNASCTTNCLAPLAKVIHERFGIVEGLMTTVHSYTATQKTVDGPSRKAWRDGRGAHQNIIPASTGAAKAVTKVIPELKGKLTGMAFRVPTPDVSVVDLTCRLAQPAPYSAIKEAVKAAAKGPMAGILAYTEDEVVSTDFLGDTHSSIFDAKAGIALNDNFVKLISWYDNEYGYSHRVVDLLRYMFSRDK

SEQ ID NO: 646 - protein, 417 aa, Homo sapiens
MSKRDIVLTNVTVVQLLRQPCPVTRAPPPPEPKAEVEPQPQPEPTPVREEIKPPPPPLPPHPATPPPKMVSVARELTVGINGFGRIGRLVLRACMEKGVKVVAVNDPFIDPEYMVYMFKYDSTHGRYKGSVEFRNGQLVVDNHEISVYQCKEPKQIPWRAVGSPYVVESTGVYLSIQAASDHISAGAQRVVISAPSPDAPMFVMGVNENDYNPGSMNIVSVRAHLGCFSNASCTTNCLAPLAKVIHERFGIVEGLMTTVHSYTATQKTVDGPSRKAWRDGRGAHQNIIPASTGAAKAVTKVIPELKGKLTGMAFRVPTPDVSVVDLTCRLAQPAPYSAIKEAVKAAAKGPMAGILAYTEDEVVSTDFLGDTHSSIFDAKAGIALNDNFVKLISWYDNEYGYSHRVVDLLRYMFSRDK

SEQ ID NO: 647 - protein, 894 aa, Homo sapiens
MESTLSASNMQDPSSSPLEKCLGSANGNGDLDSEEGSSLEETGFNWGEYLEETGASAAPHTSFKHVEISIQSNFQPGMKLEVANKNNPDTYWVATIITTCGQLLLLRYCGYGEDRRADFWCDVVIADLHPVGWCTQNNKVLMPPDAIKEKYTDWTEFLIRDLTGSRTAPANLLEGPLRGKGPIDLITVGSLIELQDSQNPFQYWIVSVIENVGGRLRLRYVGLEDTESYDQWLFYLDYRLRPVGWCQENKYRMDPPSEIYPLKMASEWKCTLEKSLIDAAKFPLPMEVFKDHADLRSHFFTVGMKLETVNMCEPFYISPASVTKVFNNHFFQVTIDDLRPEPSKLSMLCHADSLGILPVQWCLKNGVSLTPPKGYSGQDFDWADYHKQHGAQEAPPFCFRNTSFSRGFTKNMKLEAVNPRNPGELCVASVVSVKGRLMWLHLEGLQTPVPEVIVDVESMDIFPVGWCEANSYPLTAPHKTVSQKKRKIAVVQPEKQLPPTVPVKKIPHDLCLFPHLDTTGTVNGKYCCPQLFINHRCFSGPYLNKGRIAELPQSVGPGKCVLVLKEVLSMIINAAYKPGRVLRELQLVEDPHWNFQEETLKAKYRGKTYRAVVKIVRTSDQVANFCRRVCAKLECCPNLFSPVLISENCPENCSIHTKTKYTYYYGKRKKISKPPIGESNPDSGHPKPARRRKRRKSIFVQKKRRSSAVDFTAGSGEESEEEDADAMDDDTASEETGSELRDDQTDTSSAEVPSARPRRAVTLRSGSEPVRRPPPERTRRGRGAPAASSAEEGEKCPPTKPEGTEDTKQEEEERLVLESNPLEWTVTDVVRFIKLTDCAPLAKIFQEQDIDGQALLLLTLPTVQECMELKLGPAIKLCHQIERVKVAFYAQYAN

SEQ ID NO: 648 - protein, 1223 aa, Homo sapiens
MAPLRALLSYLLPLHCALCAAAGSRTPELHLSGKLSDYGVTVPCSTDFRGRFLSHVVSGPAAASAGSMVVDTPPTLPRHSSHLRVARSPLHPGGTLWPGRVGRHSLYFNVTVFGKELHLRLRPNRRLVVPGSSVEWQEDFRELFRQPLRQECVYTGGVTGMPGAAVAISNCDGLAGLIRTDSTDFFIEPLERGQQEKEASGRTHVVYRREAVQQEWAEPDGDLHNEAFGLGDLPNLLGLVGDQLGDTERKRRHAKPGSYSIEVLLVVDDSVVRFHGKEHVQNYVLTLMNIVDEIYHDESLGVHINIALVRLIMVGYRQSLSLIERGNPSRSLEQVCRWAHSQQRQDPSHAEHHDHVVFLTRQDFGPSGYAPVTGMCHPLRSCALNHEDGFSSAFVIAHETGHVLGMEHDGQGNGCADETSLGSVMAPLVQAAFHRFHWSRCSKLELSRYLPSYDCLLDDPFDPAWPQPPELPGINYSMDEQCRFDFGSGYQTCLAFRTFEPCKQLWCSHPDNPYFCKTKKGPPLDGTECAPGKWCFKGHCIWKSPEQTYGQDGGWSSWTKFGSCSRSCGGGVRSRSRSCNNPSPAYGGRLCLGPMFEYQVCNSEECPGTYEDFRAQQCAKRNSYYVHQNAKHSWVPYEPDDDAQKCELICQSADTGDVVFMNQVVHDGTRCSYRDPYSVCARGECVPVGCDKEVGSMKADDKCGVCGGDNSHCRTVKGTLGKASKQAGALKLVQIPAGARHIQIEALEKSPHRIVVKNQVTGSFILNPKGKEATSRTFTAMGLEWEDAVEDAKESLKTSGPLPEAIAILALPPTEGGPRSSLAYKYVIHEDLLPLIGSNNVLLEEMDTYEWALKSWAPCSKACGGGIQFTKYGCRRRRDHHMVQRHLCDHKKRPKPIRRRCNQHPCSQPVWVTEEWGACSRSCGKLGVQTRGIQCLLPLSNGTHKVMPAKACAGDRPEARRPCLRVPCPAQWRLGAWSQCSATCGEGIQQRQVVCRTNANSLGHCEGDRPDTVQVCSLPACGGNHQNSTVRADVWELGTPEGQWVPQSEPLHPINKISSTEPCTGDRSVFCQMEVLDRYCSIPGYHRLCCVSCIKKASGPNPGPDPGPTSLPPFSTPGSPLPGPQDPADAAEPPGKPTGSEDHQHGRATQLPGALDTSSPGTQHPFAPETPIPGASWSISPTTPGGLPWGWTQTPTPVPEDKGQPGEDLRHPGTSLPAASPVT

SEQ ID NO: 649 - protein, 270 aa, Homo sapiens
MHYYRYSNAKVSCWYKYLLFSYNIIFWLAGVVFLGVGLWAWSEKGVLSDLTKVTRMHGIDPVVLVLMVGVVMFTLGFAGCVGALRENICLLNFFCGTIVLIFFLELAVAVLAFLFQDWVRDRFREFFESNIKSYRDDIDLQNLIDSLQKANQCCGAYGPEDWDLNVYFNCSGASYSREKCGVPFSCCVPDPAQKVVNTQCGYDVRIQLKSKWDESIFTKGCIQALESWLPRNIYIVAGVFIAISLLQIFGIFLARTLISDIEAVKAGHHF

SEQ ID NO: 650 - protein, 253 aa, Homo sapiens
MHYYRYSNAKVSCWYKYLLFSYNIIFWGVLSDLTKVTRMHGIDPVVLVLMVGVVMFTLGFAGCVGALRENICLLNFFCGTIVLIFFLELAVAVLAFLFQDWVRDRFREFFESNIKSYRDDIDLQNLIDSLQKANQCCGAYGPEDWDLNVYFNCSGASYSREKCGVPFSCCVPDPAQKVVNTQCGYDVRIQLKSKWDESIFTKGCIQALESWLPRNIYIVAGVFIAISLLQIFGIFLARTLISDIEAVKAGHHF

SEQ ID NO: 651 - protein, 270 aa, Homo sapiens; identical to SEQ ID NO: 649

SEQ ID NO: 652 - protein, 253 aa, Homo sapiens; identical to SEQ ID NO: 650

SEQ ID NO: 653 - protein, 270 aa, Homo sapiens
MHYYRYSNAKVSCWYKYLLFSYNIIFWLAGVVFLGVGLWAWSEKGVLSDLTKVTRMHGIDPVVLVLMVGVVMFTLGFAGCVGALRENICLLNFFCGTIVLIFFLELAVAVLAFLFQDWVRDRFREFFESNIKSYRDDIDLQNVIDSLQKANQCCGAYGPEDWDLNVYFNCSGASYSREKCGVPFSCCVPDPAQKVVNTQCGYDVRIQLKSKWDESIFTKGCIQALESWLPRNIYIVAGVFIAISLLQIFGIFLARTLISDIEAVKAGRHF

SEQ ID NO: 654 - protein, 251 aa, Homo sapiens
MQDDREQVHLPSTSWMPRRPSCPLKEPSPQNGNITAQGPSIQPVHKAESSTDSSGPLEEAEEAPQLMRTKSDASCMSQRRPKCRAPGEAQRIRRHRFSINGHFYNHKTSVFTPAYGSVTNVRVNSTMTTLQVLTLLLNKFRVEDGPSEFALYIVHESGERTKLKDCEYPLISRILHGPCEKIARIFLMEADLGVEVPHEVAQYIKFEMPVLDSFVEKLKEEEEREIIKLTMKFQALRLTMLQRLEQLVEAK

SEQ ID NO: 655 - protein, 321 aa, Homo sapiens
MKEDCLPSSHVPISDSKSIQKSELLGLLKTYNCYHEGKSFQLRHREEEGTLIIEGLLNIAWGLRRPIRLQMQDDREQVHLPSTSWMPRRPSCPLKEPSPQNGNITAQGPSIQPVHKAESSTDSSGPLEEAEEAPQLMRTKSDASCMSQRRPKCRAPGEAQRIRRHRFSINGHFYNHKTSVFTPAYGSVTNVRVNSTMTTLQVLTLLLNKFRVEDGPSEFALYIVHESGERTKLKDCEYPLISRILHGPCEKIARIFLMEADLGVEVPHEVAQYIKFEMPVLDSFVEKLKEEEEREIIKLTMKFQALRLTMLQRLEQLVEAK

SEQ ID NO: 656 - protein, 321 aa, Homo sapiens; identical to SEQ ID NO: 655

SEQ ID NO: 657 - protein, 423 aa, Homo sapiens
MSVNGKKVLHMDRNPYYGGESASITPLEDLYKRFKIPGSPPESMGRGRDWNVDLIPKFLMANGQLVKMLLYTEVTRYLDFKVTEGSFVYKGGKIYKVPSTEAEALASSLMGLFEKRRFRKFLVYVANFDEKDPRTFEGIDPKKTTMRDVYKKFDLGQDVIDFTGHALALYRTDDYLDQPCYETINRIKLYSESLARYGKSPYLYPLYGLGELPQGFARLSAIYGGTYMLNKPIEEIIVQNGKVIGVKSEGEIARCKQLICDPSYVKDRVEKVGQVIRVICILSHPIKNTNDANSCQIIIPQNQVNRKSDIYVCMISFAHNVAAQGKYIAIVSTTVETKEPEKEIRPALELLEPIEQKFVSISDLLVPKDLGTESQIFISRTYDATTHFETTCDDIKNIYKRMTGSEFDFEEMKRKKNDIYGED

SEQ ID NO: 658 - protein, 445 aa, Homo sapiens
MNEEYDVIVLGTGLTECILSGIMSVNGKKVLHMDRNPYYGGESASITPLEDLYKRFKIPGSPPESMGRGRDWNVDLIPKFLMANGQLVKMLLYTEVTRYLDFKVTEGSFVYKGGKIYKVPSTEAEALASSLMGLFEKRRFRKFLVYVANFDEKDPRTFEGIDPKKTTMRDVYKKFDLGQDVIDFTGHALALYRTDDYLDQPCYETINRIKLYSESLARYGKSPYLYPLYGLGELPQGFARLSAIYGGTYMLNKPIEEIIVQNGKVIGVKSEGEIARCKQLICDPSYVKDRVEKVGQVIRVICILSHPIKNTNDANSCQIIIPQNQVNRKSDIYVCMISFAHNVAAQGKYIAIVSTTVETKEPEKEIRPALELLEPIEQKFVSISDLLVPKDLGTESQIFISRTYDATTHFETTCDDIKNIYKRMTGSEFDFEEMKRKKNDIYGED

SEQ ID NO: 659 - protein, 445 aa, Homo sapiens; identical to SEQ ID NO: 658

SEQ ID NO: 660 - protein, 1401 aa, Homo sapiens [sequence omitted]

SEQ ID NO: 661 - protein, 1401 aa, Homo sapiens [sequence omitted]

SEQ ID NO: 662 - protein, 116 aa, Homo sapiens
MSAPAQPPAEGTEGTAPGGGPPGPPPNMTSNRRLQQTQAQVEEVVDIIRVNVDKVLERDQKLSELDDRADALQAGASQFESSAAKLKRKYWWKNCKMMIMLGAICAIIVVVIVRRD

SEQ ID NO: 663 - protein, 118 aa, Homo sapiens
MSAPAQPPAEGTEGTAPGGGPPGPPPNMTSNRRLQQTQAQVEEVVDIIRVNVDKVLERDQKLSELDDRADALQAGASQFESSAAKLKRKYWWKNCKMMIMLGAICAIIVVVIVIYFFT

SEQ ID NO: 664 - protein, 128 aa, Homo sapiens
MYHPFPVVHCHPHSCPLPSVCSLNTLPHPPSSIPAQASPSPIPPFSLRSFALCPSTLEMLLVAQSKSLPEEQQLAPPPCLLFLYSQVPPKPQRVGGQGKGQGGEWLRRSTHEAAQTWEEKSIGAHGDF

SEQ ID NO: 665 - protein, 117 aa, Homo sapiens
MSAPAQPPAEGTEGTAPGGGPPGPPPNMTSNRRLQQTQAQVEEVVDIIRVNVDKVLERDQKLSELDDRADALQAGASQFESSAAKLKRKYWWKNCKMMIMLGAICAIIVVVIVSKYR

SEQ ID NO: 666 - protein, 490 aa, Homo sapiens
MSEVTKNSLEKILPQLKCHFTWNLFKEDSVSRDLEDRVCNQIEFLNTEFKATMYNLLAYIKHLDGNNEAALECLRQAEELIQQEHADQAEIRSLVTWGNYAWVYYHLGRLSDAQIYVDKVKQTCKKFSNPYSIEYSELDCEEGWTQLKCGRNERAKVCFEKALEEKPNNPEFSSGLAIAMYHLDNHPEKQFSTDVLKQAIELSPDNQYVKVLLGLKLQKMNKEAEGEQFVEEALEKSPCQTDVLRSAAKFYRRKGDLDKAIELFQRVLESTPNNGYLYHQIGCCYKAKVRQMQNTGESEASGNKEMIEALKQYAMDYSNKALEKGLNPLNAYSDLAEFLETECYQTPFNKEVPDAEKQQSHQRYCNLQKYNGKSEDTAVQHGLEGLSISKKSTDKEEIKDQPQNVSENLLPQNAPNYWYLQGLIHKQNGDLLQAAKCYEKELGRLLRDAPSGIGSIFLSASELEDGSEEMGQGAVSSSPRELLSNSEQLN

SEQ ID NO: 667 - protein, 490 aa, Homo sapiens; identical to SEQ ID NO: 666

SEQ ID NO: 668 - protein, 399 aa, Homo sapiens
MKMRFLGLVVCLVLWTLHSEGSGGKLTAVDPETNMNVSEIISYWGFPSEEYLVETEDGYILCLNRIPHGRKNHSDKGPKPVVFLQHGLLADSSNWVTNLANSSLGFILADAGFDVWMGNSRGNTWSRKHKTLSVSQDEFWAFSYDEMAKYDLPASINFILNKTGQEQVYYVGHSQGTTIGFIAFSQIPELAKRIKMFFALGPVASVAFCTSPMAKLGRLPDHLIKDLFGDKEFLPQSAFLKWLGTHVCTHVILKELCGNLCFLLCGFNERNLNMSRVDVYTTHSPAGTSVQNMLHWSQAVKFQKFQAFDWGSSAKNYFHYNQSYPPTYNVKDMLVPTAVWSGGHDWLADVYDVNILLTQITNLVFHESIPEWEHLDFIWGLDAPWRLYNKIINLMRKYQ

SEQ ID NO: 669 - protein, 399 aa, Homo sapiens; identical to SEQ ID NO: 668

SEQ ID NO: 670 - protein, 399 aa, Homo sapiens; identical to SEQ ID NO: 668

SEQ ID NO: 671 - protein, 456 aa, Homo sapiens
MDKLNKITVPASQKLRQLQKMVHDIKNNEGGIMNKIKKLKVKAPPSVPRRDYASESPADEEEQWSDDFDSDYENPDEHSDSEMYVMPAEENADDSYEPPPVEQETRPVHPALPFARGEYIDNRSSQRHSPPFSKTLPSKPSWPSEKARLTSTLPALTALQKPQVPPKPKGLLEDEADYVVPVEDNDENYIHPTESSSPPPEKAPMVNRSTKPNSSTPASPPGTASGRNSGAWETKSPPPAAPSPLPRAGKKPTTPLKTTPVASQQNASSVCEEKPIPAERHRGSSHRQEAVQSPVFPPAQKQIHQKPIPLPRFTEGGNPTVDGPLPSFSSNSTISEQEAGVLCKPWYAGACDRKSAEEALHRSNKDGSFLIRKSSGHDSKQPYTLVVFFNKRVYNIPVRFIEATKQYALGRKKNGEEYFGSVAEIIRNHQHSPLVLIDSQNNTKDSTRLKYAVKVS

SEQ ID NO: 672 - protein, 433 aa, Homo sapiens
MDKLNKITVPASQKLRQLQKMVHDIKNNEGGIMNKIKKLKVKAPPSVPRRDYASESPADEEEQWSDDFDSDYENPDEHSDSEMYVMPAEENADDSYEPPPVEQETRPVHPALPFARGEYIDNRSSQRHSPPFSKTLPSKPSWPSEKARLTSTLPALTALQKPQVPPKPKGLLEDEADYVVPVEDNDENYIHPTESSSPPPEKGRNSGAWETKSPPPAAPSPLPRAGKKPTTPLKTTPVASQQNASSVCEEKPIPAERHRGSSHRQEAVQSPVFPPAQKQIHQKPIPLPRFTEGGNPTVDGPLPSFSSNSTISEQEAGVLCKPWYAGACDRKSAEEALHRSNKDGSFLIRKSSGHDSKQPYTLVVFFNKRVYNIPVRFIEATKQYALGRKKNGEEYFGSVAEIIRNHQHSPLVLIDSQNNTKDSTRLKYAVKVS

SEQ ID NO: 673 - protein, 330 aa, Homo sapiens
MEHLGPHHLHPGHAEPISFGIDQILNSPDQGGCMGPASRLQDGEYGLGCLVGGAYTYGGGGSAAATGAGGAGAYGTGGPGGPGGPAGGGGACSMGPLTGSYNVNMALAGGPGPGGGGGSSGGAGALSAAGVIRVPAHRPLAGAVAHPQPLATGLPTVPSVPAMPGVNNLTGLTFPWMESNRRYTKDRFTGHPYQNRTPPKKKKPRTSFTRLQICELEKRFHRQKYLASAERAALAKALKMTDAQVKTWFQNRRTKWRRQTAEEREAERQQANRILLQLQQEAFQKSLAQPLPADPLCVHNSSLFALQNLQPWSDDSTKITSVTSVASACE

SEQ ID NO: 674 - protein, 284 aa, Homo sapiens
MWRGLALARAIGCAARGRGQWAVRAADCAQSGRHPGPAVVCGRRLISVLEQIRHFVMMPEINTNHLDKQQVQLLAEMCILIDENDNKIGAETKKNCHLNENIEKGLLHRAFSVFLFNTENKLLLQQRSDAKITFPGCFTNTCCSHPLSNPAELEESDALGVRRAAQRRLKAELGIPLEEVPPEEINYLTRIHYKAQSDGIWGEHEIDYILLVRKNVTLNPDPNEIKSYCYVSKEELKELLKKAASGEIKITPWFKIIAATFLFKWWDNLNHLNQFVDHEKIYRM

SEQ ID NO: 675 - protein, 228 aa, Homo sapiens
MMPEINTNHLDKQQVQLLAEMCILIDENDNKIGAETKKNCHLNENIEKGLLHRAFSVFLFNTENKLLLQQRSDAKITFPGCFTNTCCSHPLSNPAELEESDALGVRRAAQRRLKAELGIPLEEVPPEEINYLTRIHYKAQSDGIWGEHEIDYILLVRKNVTLNPDPNEIKSYCYVSKEELKELLKKAASGEIKITPWFKIIAATFLFKWWDNLNHLNQFVDHEKIYRM

SEQ ID NO: 676 - protein, 228 aa, Homo sapiens; identical to SEQ ID NO: 675

SEQ ID NO: 677 - protein, 360 aa, Homo sapiens [sequence omitted]

SEQ ID NO: 678 - protein, 327 aa, Homo sapiens [sequence omitted]

SEQ ID NO: 679 - protein, 333 aa, Homo sapiens
MDGTMEDSEAVQRATALIEQRLAQEEENEKLRGDTRQKLPMDLLVLEDEKHHGAQSAALQKVKGQERVRKTSLDLRREIIDVGGIQNLIELRKKRKQKKRDALAASHEPPPEPEEITGPVDEETFLKAAVEGKMKVIEKFLADGGSADTCDQFRRTALHRASLEGHMEILEKLLDNGATVDFQDRLDCTAMHWACRGGHLEVVKLLQSHGADTNVRDKLLSTPLHVAVRTGQVEIVEHFLSLGLEINARDREGDTALHDAVRLNRYKIIKLLLLHGADMMTKNLAGKTPTDLVQLWQADTRHALEHPEPGAEHNGLEGPNDSGRETPQPVPAQ

SEQ ID NO: 680 - protein, 1474 aa, Homo sapiens
MGKNKLLHPSLVLLLLVLLPTDASVSGKPQYMVLVPSLLHTETTEKGCVLLSYLNETVTVSASLESVRGNRSLFTDLEAENDVLHCVAFAVPKSSSNEEVMFLTVQVKGPTQEFKKRTTVMVKNEDSLVFVQTDKSIYKPGQTVKFRVVSMDENFHPLNELIPLVYIQDPKGNRIAQWQSFQLEGGLKQFSFPLSSEPFQGSYKVVVQKKSGGRTEHPFTVEEFVLPKFEVQVTVPKIITILEEEMNVSVCGLYTYGKPVPGHVTVSICRKYSDASDCHGEDSQAFCEKFSGQLNSHGCFYQQVKTKVFQLKRKEYEMKLHTEAQIQEEGTVVELTGRQSSEITRTITKLSFVKVDSHFRQGIPFFGQVRLVDGKGVPIPNKVIFIRGNEANYYSNATTDEHGLVQFSINTTNVMGTSLTVRVNYKDRSPCYGYQWVSEEHEEAHHTAYLVFSPSKSFVHLEPMSHELPCGHTQTVQAHYILNGGTLLGLKKLSFYYLIMAKGGIVRTGTHGLLVKQEDMKGHFSISIPVKSDIAPVARLLIYAVLPTGDVIGDSAKYDVENCLANKVDLSFSPSQSLPASHAHLRVTAAPQSVCALRAVDQSVLLMKPDAELSASSVYNLLPEKDLTGFPGPLNDQDDEDCINRHNVYINGITYTPVSSTNEKDMYSFLEDMGLKAFTNSKIRKPKMCPQLQQYEMHGPEGLRVGFYESDVMGRGHARLVHVEEPHTETVRKYFPETWIWDLVVVNSAGVAEVGVTVPDTITEWKAGAFCLSEDAGLGISSTASLRAFQPFFVELTMPYSVIRGEAFTLKATVLNYLPKCIRVSVQLEASPAFLAVPVEKEQAPHCICANGRQTVSWAVTPKSLGNVNFTVSAEALESQELCGTEVPSVPEHGRKDTVIKPLLVEPEGLEKETTFNSLLCPSGGEVSEELSLKLPPNVVEESARASVSVLGDILGSAMQNTQNLLQMPYGCGEQNMVLFAPNIYVLDYLNETQQLTPEIKSKAIGYLNTGYQRQLNYKHYDGSYSTFGERYGRNQGNTWLTAFVLKTFAQARAYIFIDEAHITQALIWLSQRQKDNGCFRSSGSLLNNAIKGGVEDEVTLSAYITIALLEIPLTVTHPVVRNALFCLESAWKTAQEGDHGSHVYTKALLAYAFALAGNQDKRKEVLKSLNEEAVKKDNSVHWERPQKPKAPVGHFYEPQAPSAEVEMTSYVLLAYLTAQPAPTSEDLTSATNIVKWITKQQNAQGGFSSTQDTVVALHALSKYGAATFTRTGKAAQVTIQSSGTFSSKFQVDNNNRLLLQQVSLPELPGEYSMKVTGEGCVYLQTSLKYNILPEKEEFPFALGVQTLPQTCDEPKAHTSFQISLSVSYTGSRSASNMAIVDVKMVSGFIPLKPTVKMLERSNHVSRTEVSSNHVLIYLDKVSNQTLSLFFTVLQDVPVRDLKPAIVKVYDYYETDEFAIAEYNAPCSKDLGNA

SEQ ID NO: 681 - protein, 1709 aa, Homo sapiens [sequence omitted]

SEQ ID NO: 682 - protein, 1018 aa, Homo sapiens
MAFNVFFLLYFGLRFIAANDKLWFWLEVNSVVDFFTVPPVFVSVYLNRSWLGLRFLRALRLIQFSEILQFLNILKTSNSIKLVNLLSIFISTWLTAAGFIHLVENSGDPWENFQNNQALTYWECVYLLMVTMSTVGYGDVYAKTTLGRLFMVFFILGGLAMFASYVPEIIELIGNRKKYGGSYSAVSGRKHIVVCGHITLESVSNFLKDFLHKDRDDVNVEIVFLHNISPNLELEALFKRHFTQVEFYQGSVLNPHDLARVKIESADACLILANKYCADPDAEDASNIMRVISIKNYHPKIRIITQMLQYHNKAHLLNIPSWNWKEGDDAICLAELKLGFIAQSCLAQGLSTMLANLFSMRSFIKIEEDTWQKYYLEGVSNEMYTEYLSSAFVGLSFPTVCELCFVKLKLLMIAIEYKSANRESRILINPGNHLKIQEGTLGFFIASDAKEVKRAFFYCKACHDDITDPKRIKKCGCKRPKMSIYKRMRRACCFDCGRSERDCSCMSGRVRGNVDTLERAFPLSSVSVNDCSTSFRAFEDEQPSTLSPKKKQRNGGMRNSPNTSPKLMRHDPLLIPGNDQIDNMDSNVKKYDSTGMFHWCAPKEIEKVILTRSEAAMTVLSGHVVVCIFGDVSSALIGLRNLVMPLRASNFHYHELKHIVFVGSIEYLKREWETLHNFPKVSILPGTPLSRADLRAVNINLCDMCVILSANQNNIDDTSLQDKECILASLNIKSMQFDDSIGVLQANSQGFTPPGMDRSSPDNSPVHGMLRQPSITTGVNIPIITELVNDTNVQFLDQDDDDDPDTELYLTQPFACGTAFAVSVLDSLMSATYFNDNILTLIRTLVTGGATPELEALIAEENALRGGYSTPQTLANRDRCRVAQLALLDGPFADLGDGGCYGDLFCKALKTYNMLCFGIYRLRDAHLSTPSQCTKRYVITNPPYEFELVPTDLIFCLMQFDHNAGQSRASLSHSSHSSQSSSKKSSSVHSIPSTANRQNRPKSRESRDKQKYVQEERL

SEQ ID NO: 683 - protein, 960 aa, Homo sapiens
MAFNVFFLLYFGLRFIAANDKLWFWLEVNSVVDFFTVPPVFVSVYLNRSWLGLRFLRALRLIQFSEILQFLNILKTSNSIKLVNLLSIFISTWLTAAGFIHLVENSGDPWENFQNNQALTYWECVYLLMVTMSTVGYGDVYAKTTLGRLFMVFFILGGLAMFASYVPEIIELIGNRKKYGGSYSAVSGRKHIVVCGHITLESVSNFLKDFLHKDRDDVNVEIVFLHNISPNLELEALFKRHFTQVEFYQGSVLNPHDLARVKIESADACLILANKYCADPDAEDASNIMRVISIKNYHPKIRIITQMLQYHNKAHLLNIPSWNWKEGDDAICLAELKLGFIAQSCLAQGLSTMLANLFSMRSFIKIEEDTWQKYYLEGVSNEMYTEYLSSAFVGLSFPTVCELCFVKLKLLMIAIEYKSANRESRILINPGNHLKIQEGTLGFFIASDAKEVKRAFFYCKACHDDITDPKRIKKCGCKRLEDEQPSTLSPKKKQRNGGMRNSPNTSPKLMRHDPLLIPGNDQIDNMDSNVKKYDSTGMFHWCAPKEIEKVILTRSEAAMTVLSGHVVVCIFGDVSSALIGLRNLVMPLRASNFHYHELKHIVFVGSIEYLKREWETLHNFPKVSILPGTPLSRADLRAVNINLCDMCVILSANQNNIDDTSLQDKECILASLNIKSMQFDDSIGVLQANSQGFTPPGMDRSSPDNSPVHGMLRQPSITTGVNIPIITELVNDTNVQFLDQDDDDDPDTELYLTQPFACGTAFAVSVLDSLMSATYFNDNILTLIRTLVTGGATPELEALIAEENALRGGYSTPQTLANRDRCRVAQLALLDGPFADLGDGGCYGDLFCKALKTYNMLCFGIYRLRDAHLSTPSQCTKRYVITNPPYEFELVPTDLIFCLMQFDHNAGQSRASLSHSSHSSQSSSKKSSSVHSIPSTANRQNRPKSRESRDKQKYVQEERL

SEQ ID NO: 684 - protein, 959 aa, Homo sapiens
MAFNVFFLLYFGLRFIAANDKLWFWLEVNSVVDFFTVPPVFVSVYLNRSWLGLRFLRALRLIQFSEILQFLNILKTSNSIKLVNLLSIFISTWLTAAGFIHLVENSGDPWENFQNNQALTYWECVYLLMVTMSTVGYGDVYAKTTLGRLFMVFFILGGLAMFASYVPEIIELIGNRKKYGGSYSAVSGRKHIVVCGHITLESVSNFLKDFLHKDRDDVNVEIVFLHNISPNLELEALFKRHFTQVEFYQGSVLNPHDLARVKIESADACLILANKYCADPDAEDASNIMRVISIKNYHPKIRIITQMLQYHNKAHLLNIPSWNWKEGDDAICLAELKLGFIAQSCLAQGLSTMLANLFSMRSFIKIEEDTWQKYYLEGVSNEMYTEYLSSAFVGLSFPTVCELCFVKLKLLMIAIEYKSANRESRILINPGNHLKIQEGTLGFFIASDAKEVKRAFFYCKACHDDITDPKRIKKCGCKRLEDEQPSTLSPKKKQRNGGMRNSPNTSPKLMRHDPLLIPGNDQIDNMDSNVKKYDSTGMFHWCAPKEIEKVILTRSEAAMTVLSGHVVVCIFGDVSSALIGLRNLVMPLRASNFHYHELKHIVFVGSIEYLKREWETLHNFPKVSILPGTPLSRADLRAVNINLCDMCVILSANQNNIDDTSLQDKECILASLNIKSMQFDDSIGVLQANSQGFTPPGMDRSSPDNSPVHGMLRQPSITTGVNIPIITELVNDTNVQFLDQDDDDDPDTELYLTQPFACGTAFAVSVLDSLMSATYFNDNILTLIRTLVTGGATPELEALIAEENALRGGYSTPQTLANRDRCRVAQLALLDGPFADLGDGGCYGDLFCKALKTYNMLCFGIYRLRDAHLSTPSQCTKRYVITNPPYEFELVPTDLIFCLMQFDHNAGQSRASLSHSSHSSQSSSKKSSSVHSIPSTANRQNRPKSRESRDKQKKEMVYR

SEQ ID NO: 685 - protein, 1178 aa, Homo sapiens
MANGGGGGGGSSGGGGGGGGSSLRMSSNIHANHLSLDASSSSSSSSSSSSSSSSSSSSSSVHEPKMDALIIPVTMEVPCDSRGQRMWWAFLASSMVTFFGGLFIILLWRTLKYLWTVCCHCGGKTKEAQKINNGSSQADGTLKPVDEKEEAVAAEVGWMTSVKDWAGVMISAQTLTGRVLVVLVFALSIGALVIYFIDSSNPIESCQNFYKDFTLQIDMAFNVFFLLYFGLRFIAANDKLWFWLEVNSVVDFFTVPPVFVSVYLNRSWLGLRFLRALRLIQFSEILQFLNILKTSNSIKLVNLLSIFISTWLTAAGFIHLVENSGDPWENFQNNQALTYWECVYLLMVTMSTVGYGDVYAKTTLGRLFMVFFILGGLAMFASYVPEIIELIGNRKKYGGSYSAVSGRKHIVVCGHITLESVSNFLKDFLHKDRDDVNVEIVFLHNISPNLELEALFKRHFTQVEFYQGSVLNPHDLARVKIESADACLILANKYCADPDAEDASNIMRVISIKNYHPKIRIITQMLQYHNKAHLLNIPSWNWKEGDDAICLAELKLGFIAQSCLAQGLSTMLANLFSMRSFIKIEEDTWQKYYLEGVSNEMYTEYLSSAFVGLSFPTVCELCFVKLKLLMIAIEYKSANRESRILINPGNHLKIQEGTLGFFIASDAKEVKRAFFYCKACHDDITDPKRIKKCGCKRLEDEQPSTLSPKKKQRNGGMRNSPNTSPKLMRHDPLLIPGNDQIDNMDSNVKKYDSTGMFHWCAPKEIEKVILTRSEAAMTVLSGHVVVCIFGDVSSALIGLRNLVMPLRASNFHYHELKHIVFVGSIEYLKREWETLHNFPKVSILPGTPLSRADLRAVNINLCDMCVILSANQNNIDDTSLQDKECILASLNIKSMQFDDSIGVLQANSQGFTPPGMDRSSPDNSPVHGMLRQPSITTGVNIPIITELVNDTNVQFLDQDDDDDPDTELYLTQPFACGTAFAVSVLDSLMSATYFNDNILTLIRTLVTGGATPELEALIAEENALRGGYSTPQTLANRDRCRVAQLALLDGPFADLGDGGCYGDLFCKALKTYNMLCFGIYRLRDAHLSTPSQCTKRYVITNPPYEFELVPTDLIFCLMQFDHNAGQSRASLSHSSHSSQSSSKKSSSVHSIPSTANRQNRPKSRESRDKQKYVQEERL

SEQ ID NO: 686 - protein, 1013 aa, Homo sapiens
MAFNVFFLLYFGLRFIAANDKLWFWLEVNSVVDFFTVPPVFVSVYLNRSWLGLRFLRALRLIQFSEILQFLNILKTSNSIKLVNLLSIFISTWLTAAGFIHLVENSGDPWENFQNNQALTYWECVYLLMVTMSTVGYGDVYAKTTLGRLFMVFFILGGLAMFASYVPEIIELIGNRKKYGGSYSAVSGRKHIVVCGHITLESVSNFLKDFLHKDRDDVNVEIVFLHNISPNLELEALFKRHFTQVEFYQGSVLNPHDLARVKIESADACLILANKYCADPDAEDASNIMRVISIKNYHPKIRIITQMLQYHNKAHLLNIPSWNWKEGDDAICLAELKLGFIAQSCLAQGLSTMLANLFSMRSFIKIEEDTWQKYYLEGVSNEMYTEYLSSAFVGLSFPTVCELCFVKLKLLMIAIEYKSANRESRILINPGNHLKIQEGTLGFFIASDAKEVKRAFFYCKACHDDITDPKRIKKCGCKRLEDEQPSTLSPKKKQRNGGMRNSPNTSPKLMRHDPLLIPGNDQIDNMDSNVKKYDSTGMFHWCAPKEIEKVILTRSEAAMTVLSGHVVVCIFGDVSSALIGLRNLVMPLRASNFHYHELKHIVFVGSIEYLKREWETLHNFPKVSILPGTPLSRADLRAVNINLCDMCVILSANQNNIDDTSLQDKECILASLNIKSMQFDDSIGVLQANSQGFTPPGMDRSSPDNSPVHGMLRQPSITTGVNIPIITELVNDTNVQFLDQDDDDDPDTELYLTQPFACGTAFAVSVLDSLMSATYFNDNILTLIRTLVTGGATPELEALIAEENALRGGYSTPQTLANRDRCRVAQLALLDGPFADLGDGGCYGDLFCKALKTYNMLCFGIYRLRDAHLSTPSQCTKRYVITNPPYEFELVPTDLIFCLMQFDHNAGQSRASLSHSSHSSQSSSKKSSSVHSIPSTANRQNRPKSRESRDKQNATRMNRMGQAEKKWFTDEPDNAYPRNIQIKPMSTHMANQINQYKSTSSLIPPIREVEDEC

SEQ ID NO: 687 - protein, 986 aa, Homo sapiens
MAFNVFFLLYFGLRFIAANDKLWFWLEVNSVVDFFTVPPVFVSVYLNRSWLGLRFLRALRLIQFSEILQFLNILKTSNSIKLVNLLSIFISTWLTAAGFIHLVENSGDPWENFQNNQALTYWECVYLLMVTMSTVGYGDVYAKTTLGRLFMVFFILGGLAMFASYVPEIIELIGNRKKYGGSYSAVSGRKHIVVCGHITLESVSNFLKDFLHKDRDDVNVEIVFLHNISPNLELEALFKRHFTQVEFYQGSVLNPHDLARVKIESADACLILANKYCADPDAEDASNIMRVISIKNYHPKIRIITQMLQYHNKAHLLNIPSWNWKEGDDAICLAELKLGFIAQSCLAQGLSTMLANLFSMRSFIKIEEDTWQKYYLEGVSNEMYTEYLSSAFVGLSFPTVCELCFVKLKLLMIAIEYKSANRESRILINPGNHLKIQEGTLGFFIASDAKEVKRAFFYCKACHDDITDPKRIKKCGCKRLEDEQPSTLSPKKKQRNGGMRNSPNTSPKLMRHDPLLIPGNDQIDNMDSNVKKYDSTGMFHWCAPKEIEKVILTRSEAAMTVLSGHVVVCIFGDVSSALIGLRNLVMPLRASNFHYHELKHIVFVGSIEYLKREWETLHNFPKVSILPGTPLSRADLRAVNINLCDMCVILSANQNNIDDTSLQDKECILASLNIKSMQFDDSIGVLQANSQGFTPPGMDRSSPDNSPVHGMLRQPSITTGVNIPIITELAKPGKLPLVSVNQEKNSGTHILMITELVNDTNVQFLDQDDDDDPDTELYLTQPFACGTAFAVSVLDSLMSATYFNDNILTLIRTLVTGGATPELEALIAEENALRGGYSTPQTLANRDRCRVAQLALLDGPFADLGDGGCYGDLFCKALKTYNMLCFGIYRLRDAHLSTPSQCTKRYVITNPPYEFELVPTDLIFCLMQFDHNAGQSRASLSHSSHSSQSSSKKSSSVHSIPSTANRQNRPKSRESRDKQKKEMVYR

SEQ ID NO: 688 - protein, 1207 aa, Homo sapiens
MANGGGGGGGSSGGGGGGGGSSLRMSSNIHANHLSLDASSSSSSSSSSSSSSSSSSSSSSVHEPKMDALIIPVTMEVPCDSRGQRMWWAFLASSMVTFFGGLFIILLWRTLKYLWTVCCHCGGKTKEAQKINNGSSQADGTLKPVDEKEEAVAAEVGWMTSVKDWAGVMISAQTLTGRVLVVLVFALSIGALVIYFIDSSNPIESCQNFYKDFTLQIDMAFNVFFLLYFGLRFIAANDKLWFWLEVNSVVDFFTVPPVFVSVYLNRSWLGLRFLRALRLIQFSEILQFLNILKTSNSIKLVNLLSIFISTWLTAAGFIHLVENSGDPWENFQNNQALTYWECVYLLMVTMSTVGYGDVYAKTTLGRLFMVFFILGGLAMFASYVPEIIELIGNRKKYGGSYSAVSGRKHIVVCGHITLESVSNFLKDFLHKDRDDVNVEIVFLHNISPNLELEALFKRHFTQVEFYQGSVLNPHDLARVKIESADACLILANKYCADPDAEDASNIMRVISIKNYHPKIRIITQMLQYHNKAHLLNIPSWNWKEGDDAICLAELKLGFIAQSCLAQGLSTMLANLFSMRSFIKIEEDTWQKYYLEGVSNEMYTEYLSSAFVGLSFPTVCELCFVKLKLLMIAIEYKSANRESRILINPGNHLKIQEGTLGFFIASDAKEVKRAFFYCKACHDDITDPKRIKKCGCKRLKVAARSRYSKDPFEFKKETPNSRLVTEPVEDEQPSTLSPKKKQRNGGMRNSPNTSPKLMRHDPLLIPGNDQIDNMDSNVKKYDSTGMFHWCAPKEIEKVILTRSEAAMTVLSGHVVVCIFGDVSSALIGLRNLVMPLRASNFHYHELKHIVFVGSIEYLKREWETLHNFPKVSILPGTPLSRADLRAVNINLCDMCVILSANQNNIDDTSLQDKECILASLNIKSMQFDDSIGVLQANSQGFTPPGMDRSSPDNSPVHGMLRQPSITTGVNIPIITELVNDTNVQFLDQDDDDDPDTELYLTQPFACGTAFAVSVLDSLMSATYFNDNILTLIRTLVTGGATPELEALIAEENALRGGYSTPQTLANRDRCRVAQLALLDGPFADLGDGGCYGDLFCKALKTYNMLCFGIYRLRDAHLSTPSQCTKRYVITNPPYEFELVPTDLIFCLMQFDHNAGQSRASLSHSSHSSQSSSKKSSSVHSIPSTANRQNRPKSRESRDKQKYVQEERL

SEQ ID NO: 689 - protein, 1017 aa, Homo sapiens
MAFNVFFLLYFGLRFIAANDKLWFWLEVNSVVDFFTVPPVFVSVYLNRSWLGLRFLRALRLIQFSEILQFLNILKTSNSIKLVNLLSIFISTWLTAAGFIHLVENSGDPWENFQNNQALTYWECVYLLMVTMSTVGYGDVYAKTTLGRLFMVFFILGGLAMFASYVPEIIELIGNRKKYGGSYSAVSGRKHIVVCGHITLESVSNFLKDFLHKDRDDVNVEIVFLHNISPNLELEALFKRHFTQVEFYQGSVLNPHDLARVKIESADACLILANKYCADPDAEDASNIMRVISIKNYHPKIRIITQMLQYHNKAHLLNIPSWNWKEGDDAICLAELKLGFIAQSCLAQGLSTMLANLFSMRSFIKIEEDTWQKYYLEGVSNEMYTEYLSSAFVGLSFPTVCELCFVKLKLLMIAIEYKSANRESRILINPGNHLKIQEGTLGFFIASDAKEVKRAFFYCKACHDDITDPKRIKKCGCKRPKMSIYKRMRRACCFDCGRSERDCSCMSGRVRGNVDTLERAFPLSSVSVNDCSTSFRAFEDEQPSTLSPKKKQRNGGMRNSPNTSPKLMRHDPLLIPGNDQIDNMDSNVKKYDSTGMFHWCAPKEIEKVILTRSEAAMTVLSGHVVVCIFGDVSSALIGLRNLVMPLRASNFHYHELKHIVFVGSIEYLKREWETLHNFPKVSILPGTPLSRADLRAVNINLCDMCVILSANQNNIDDTSLQDKECILASLNIKSMQFDDSIGVLQANSQGFTPPGMDRSSPDNSPVHGMLRQPSITTGVNIPIITELVNDTNVQFLDQDDDDDPDTELYLTQPFACGTAFAVSVLDSLMSATYFNDNILTLIRTLVTGGATPELEALIAEENALRGGYSTPQTLANRDRCRVAQLALLDGPFADLGDGGCYGDLFCKALKTYNMLCFGIYRLRDAHLSTPSQCTKRYVITNPPYEFELVPTDLIFCLMQFDHNAGQSRASLSHSSHSSQSSSKKSSSVHSIPSTANRQNRPKSRESRDKQKKEMVYR

SEQ ID NO: 690 - protein, 1236 aa, Homo sapiens
MANGGGGGGGSSGGGGGGGGSSLRMSSNIHANHLSLDASSSSSSSSSSSSSSSSSSSSSSVHEPKMDALIIPVTMEVPCDSRGQRMWWAFLASSMVTFFGGLFIILLWRTLKYLWTVCCHCGGKTKEAQKINNGSSQADGTLKPVDEKEEAVAAEVGWMTSVKDWAGVMISAQTLTGRVLVVLVFALSIGALVIYFIDSSNPIESCQNFYKDFTLQIDMAFNVFFLLYFGLRFIAANDKLWFWLEVNSVVDFFTVPPVFVSVYLNRSWLGLRFLRALRLIQFSEILQFLNILKTSNSIKLVNLLSIFISTWLTAAGFIHLVENSGDPWENFQNNQALTYWECVYLLMVTMSTVGYGDVYAKTTLGRLFMVFFILGGLAMFASYVPEIIELIGNRKKYGGSYSAVSGRKHIVVCGHITLESVSNFLKDFLHKDRDDVNVEIVFLHNISPNLELEALFKRHFTQVEFYQGSVLNPHDLARVKIESADACLILANKYCADPDAEDASNIMRVISIKNYHPKIRIITQMLQYHNKAHLLNIPSWNWKEGDDAICLAELKLGFIAQSCLAQGLSTMLANLFSMRSFIKIEEDTWQKYYLEGVSNEMYTEYLSSAFVGLSFPTVCELCFVKLKLLMIAIEYKSANRESRILINPGNHLKIQEGTLGFFIASDAKEVKRAFFYCKACHDDITDPKRIKKCGCKRPKMSIYKRMRRACCFDCGRSERDCSCMSGRVRGNVDTLERAFPLSSVSVNDCSTSFRAFEDEQPSTLSPKKKQRNGGMRNSPNTSPKLMRHDPLLIPGNDQIDNMDSNVKKYDSTGMFHWCAPKEIEKVILTRSEAAMTVLSGHVVVCIFGDVSSALIGLRNLVMPLRASNFHYHELKHIVFVGSIEYLKREWETLHNFPKVSILPGTPLSRADLRAVNINLCDMCVILSANQNNIDDTSLQDKECILASLNIKSMQFDDSIGVLQANSQGFTPPGMDRSSPDNSPVHGMLRQPSITTGVNIPIITELVNDTNVQFLDQDDDDDPDTELYLTQPFACGTAFAVSVLDSLMSATYFNDNILTLIRTLVTGGATPELEALIAEENALRGGYSTPQTLANRDRCRVAQLALLDGPFADLGDGGCYGDLFCKALKTYNMLCFGIYRLRDAHLSTPSQCTKRYVITNPPYEFELVPTDLIFCLMQFDHNAGQSRASLSHSSHSSQSSSKKSSSVHSIPSTANRQNRPKSRESRDKQKYVQEERL

SEQ ID NO: 691 - protein, 268 aa, Homo sapiens
MAVFADLDLRAGSDLKALRGLVETAAHLGYSVVAINHIVDFKEKKQEIEKPVAVSELFTTLPIVQGKSRPIKILTRLTIIVSDPSHCNVLRATSSRARLYDVVAVFPKTEKLFHIACTHLDVDLVCITVTEKLPFYFKRPPINVAIDRGLAFELVYSPAIKDSTMRRYTISSALNLMQICKGKNVIISSAAERPLEIRGPYDVANLGLLFGLSESDAKAAVSTNCRAALLHGETRKTAFGIISTVKKPRPSEGDEDCLPASKKAKCEG

SEQ ID NO: 692 - protein, 207 aa, Homo sapiens [sequence omitted]

SEQ ID NO: 693 - protein, 199 aa, Homo sapiens
MGGRKRERKAAVEEDTSLSESEGPRQPDGDEEESTALSINEEMQRMLNQLREYDFEDDCDSLTWEETEETLLLWEDFSGYAMAAAEAQGEQEDSLEKVIKDTESLFKTREKEYQETIDQIELELATAKNDMNRHLHEYMEMCSMKRGLDVQMETCRRLITQSGDRKSPAFTAVPLSDPPPPPSEAEDSDRDVSSDSSMR

SEQ ID NO: 694 - protein, 259 aa, Homo sapiens
MNPLFGPNLFLLQQEQQGLAGPLGDSLGGDHFAGGGDLPPAPLSPAGPAAYSPPGPGPAPPAAMALRNDLGSNINVLKTLNLRFRCFLAKVHELERRNRLLEKQLQQALEEGKQGRRGLGRRDQAVQTGFVSPIRPLGLQLGARPAAVCSPSARVLGSPARSPAAPPSYWFMLLPHSHPLCPASRSRPFSSCTRPRLCSLCTCLPLRSHPWGGGSGSARLPSRRTPPCRRVRGPASPMGMRRRAQPSASTRRCSACSTS

SEQ ID NO: 695 - protein, 559 aa, Homo sapiens
MNPLFGPNLFLLQQEQQGLAGPLGDSLGGDHFAGGGDLPPAPLSPAGPAAYSPPGPGPAPPAAMALRNDLGSNINVLKTLNLRFRCFLAKVHELERRNRLLEKQLQQALEEGKQGRRGLGRRDQAVQTGFVSPIRPLGLQLGARPAAVCSPSARVLGSPARSPAGPLAPSAASLSSSSTSTSTTYSSSARFMPGTIWSFSHARRLGPGLEPTLVQGPGLSWVHPDGVGVQIDTITPEIRALYNVLAKVKRERDEYKRRWEEEYTVRIQLQDRVNELQEEAQEADACQEELALKVEQLKAELVVFKGLMSNNLSELDTKIQEKAMKVDMDICRRIDITAKLCDVAQQRNCEDMIQMFQVPSMGGRKRERKAAVEEDTSLSESEGPRQPDGDEEESTALSINEEMQRMLNQLREYDFEDDCDSLTWEETEETLLLWEDFSGYAMAAAEAQGEQEDSLEKVIKDTESLFKTREKEYQETIDQIELELATAKNDMNRHLHEYMEMCSMKRGLDVQMETCRRLITQSGDRKSPAFTAVPLSDPPPPPSEAEDSDRDVSSDSSMR

SEQ ID NO: 696 - protein, 199 aa, Homo sapiens; identical to SEQ ID NO: 693

SEQ ID NO: 697 - protein, 264 aa, Homo sapiens
MNPLFGPNLFLLQQEQQGLAGPLGDSLGGDHFAGGGDLPPAPLSPAGPAAYSPPGPGPAPPAAMALRNDLGSNINVLKTLNLRFRCFLAKVHELERRNRLLEKQLQQALEEGKQGRRGLGRRDQAVQTGFVSPIRPLGLQLGARPAAVCSPSARVLGSPARSPAGPLAPSAASLSSSSTSTSTTYSSSARFMPGTIWSFSHARRLGPGLEPTLVQGPGLSWVHPDGVGVQIDTITPEIRALYNVLAKVKRERDEYKRRCFYRVK

SEQ ID NO: 698 - protein, 259 aa, Homo sapiens; identical to SEQ ID NO: 694

SEQ ID NO: 699 - protein, 1115 aa, Homo sapiens
MSWFSGLLVPKVDERKTAWGERNGQKRSRRRGTRAGGFCTPRYMSCLRDAEPPSPTPAGPPRCPWQDDAFIRRGGPGKGKELGLRAVALGFEDTEVTTTAGGTAEVAPDAVPRSGRSCWRRLVQVFQSKQFRSAKLERLYQRYFFQMNQSSLTLLMAVLVLLTAVLLAFHAAPARPQPAYVALLACAAALFVGLMVVCNRHSFRQDSMWVVSYVVLGILAAVQVGGALAADPRSPSAGLWCPVFFVYIAYTLLPIRMRAAVLSGLGLSTLHLILAWQLNRGDAFLWKQLGANVLLFLCTNVIGICTHYPAEVSQRQAFQETRGYIQARLHLQHENRQQERLLLSVLPQHVAMEMKEDINTKKEDMMFHKIYIQKHDNVSILFADIEGFTSLASQCTAQELVMTLNELFARFDKLAAENHCLRIKILGDCYYCVSGLPEARADHAHCCVEMGVDMIEAISLVREVTGVNVNMRVGIHSGRVHCGVLGLRKWQFDVWSNDVTLANHMEAGGRAGRIHITRATLQYLNGDYEVEPGRGGERNAYLKEQHIETFLILGASQKRKEEKAMLAKLQRTRANSMEGLMPRWVPDRAFSRTKDSKAFRQMGIDDSSKDNRGTQDALNPEDEVDEFLSRAIDARSIDQLRKDHVRRFLLTFQREDLEKKYSRKVDPRFGAYVACALLVFCFICFIQLLIFPHSTLMLGIYASIFLLLLITVLICAVYSCGSLFPKALQRLSRSIVRSRAHSTAVGIFSVLLVFTSAIANMYFIGNMLLSLLASSVFLHISSIGKLAMIFVLGLIYLVLLLLGPPATIFDNYDLLLGVHGLASSNETFDGLDCPAAGRVALKYMTPVILLVFALALYLHAQQVESTARLDFLWKLQATGEKEEMEELQAYNRRLLHNILPKDVAAHFLARERRNDELYYQSCECVAVMFASIANFSEFYVELEANNEGVECLRLLNEIIADFDEIISEERFRQLEKIKTIGSTYMAASGLNASTYDQVGRSHITALADYAMRLMEQMKHINEHSFNNFQMKIGLNMGPVVAGVIGARKPQYDIWGNTVNVSSRMDSTGVPDRIQVTTDLYQVLAAKGYQLECRGVVKVKGKGEMTTYFLNGGPSS

SEQ ID NO: 700 - protein, 1168 aa, Homo sapiens
MSWFSGLLVPKVDERKTAWGERNGQKRSRRRGTRAGGFCTPRYMSCLRDAEPPSPTPAGPPRCPWQDDAFIRRGGPGKGKELGLRAVALGFEDTEVTTTAGGTAEVAPDAVPRSGRSCWRRLVQVFQSKQFRSAKLERLYQRYFFQMNQSSLTLLMAVLVLLTAVLLAFHAAPARPQPAYVALLACAAALFVGLMVVCNRHSFRQDSMWVVSYVVLGILAAVQVGGALAADPRSPSAGLWCPVFFVYIAYTLLPIRMRAAVLSGLGLSTLHLILAWQLNRGDAFLWKQLGANVLLFLCTNVIGICTHYPAEVSQRQAFQETRGYIQARLHLQHENRQQERLLLSVLPQHVAMEMKEDINTKKEDMMFHKIYIQKHDNVSILFADIEGFTSLASQCTAQELVMTLNELFARFDKLAAENHCLRIKILGDCYYCVSGLPEARADHAHCCVEMGVDMIEAISLVREVTGVNVNMRVGIHSGRVHCGVLGLRKWQFDVWSNDVTLANHMEAGGRAGRIHITRATLQYLNGDYEVEPGRGGERNAYLKEQHIETFLILGASQKRKEEKAMLAKLQRTRANSMEGLMPRWVPDRAFSRTKDSKAFRQMGIDDSSKDNRGTQDALNPEDEVDEFLSRAIDARSIDQLRKDHVRRFLLTFQREDLEKKYSRKVDPRFGAYVACALLVFCFICFIQLLIFPHSTLMLGIYASIFLLLLITVLICAVYSCGSLFPKALQRLSRSIVRSRAHSTAVGIFSVLLVFTSAIANMFTCNHTPIRSCAARMLNLTPADITACHLQQLNYSLGLDAPLCEGTMPTCSFPEYFIGNMLLSLLASSVFLHISSIGKLAMIFVLGLIYLVLLLLGPPATIFDNYDLLLGVHGLASSNETFDGLDCPAAGRVALKYMTPVILLVFALALYLHAQQVESTARLDFLWKLQATGEKEEMEELQAYNRRLLHNILPKDVAAHFLARERRNDELYYQSCECVAVMFASIANFSEFYVELEANNEGVECLRLLNEIIADFDEIISEERFRQLEKIKTIGSTYMAASGLNASTYDQVGRSHITALADYAMRLMEQMKHINEHSFNNFQMKIGLNMGPVVAGVIGARKPQYDIWGNTVNVSSRMDSTGVPDRIQVTTDLYQVLAAKGYQLECRGVVKVKGKGEMTTYFLNGGPSS

SEQ ID NO: 701 - protein, 864 aa, Homo sapiens
MSREEEIITLQQFLRFGETKSIVELMAIQEKEGQAVAVPSSKTDSDIRTFIESNNRTRSPSLLAHLENSNPSSIHHFENIPNSLAFLLPFQYINPVSAPLLGLPPNGLLLEQPGLRLREPSLSTQNEYNESSESEVSPTPYKNDQTPNRNALTSITNVEPKTEPACVSPIQNSAPVSDLTKTEHPKSSFRIHRMRRMGSASRKGRVFCNACGKTFYDKGTLKIHYNAVHLKIKHRCTIEGCNMVFSSLRSRNRHSANPNPRLHMPMLRNNRDKDLIRATSGAATPVIASTKSNLALTSPGRPPMGFTTPPLDPVLQNPLPSQLVFSGLKTVQPVPPFYRSLLTPGEMVSPPTSLPTSPIIPTSGTIEQHPPPPSEPVVPAVMMATHEPSADLAPKKKPRKSSMPVKIEKEIIDTADEFDDEDDDPNDGGAVVNDMSHDNHCHSQEEMSPGMSVKDFSKHNRTRCISRTEIRRADSMTSEDQEPERDYENESESSEPKLGEESMEGDEHIHSEVSEKVLMNSERPDENHSEPSHQDVIKVKEEFTDPTYDMFYMSQYGLYNGGGASMAALHESFTSSLNYGSPQKFSPEGDLCSSPDPKICYVCKKSFKSSYSVKLHYRNVHLKEMHVCTVAGCNAAFPSRRSRDRHSANINLHRKLLTKELDDMGLDSSQPSLSKDLRDEFLVKIYGAQHPMGLDVREDASSPAGTEDSHLNGYGRGMAEDYMVLDLSTTSSLQSSSSIHSSRESDAGSDEGILLDDIDGASDSGESAHKAEAPALPGSLGAEVSGSLMFSSLSGSNGGIMCNICHKMYSNKGTLRVHYKTVHLREMHKCKVPGCNMMFSSVRSRNRHSQNPNLHKNIPFTSVD

SEQ ID NO: 702 - protein, 864 aa, Homo sapiens; identical to SEQ ID NO: 701

SEQ ID NO: 703 - protein, 483 aa, Homo sapiens
MMATHEPSADLAPKKKPRKSSMPVKIEKEIIDTADEFDDEDDDPNDGGAVVNDMSHDNHCHSQEEMSPGMSVKDFSKHNRTRCISRTEIRRADSMTSEDQEPERDYENESESSEPKLGEESMEGDEHIHSEVSEKVLMNSERPDENHSEPSHQDVIKVKEEFTDPTYDMFYMSQYGLYNGGGASMAALHESFTSSLNYGSPQKFSPEGDLCSSPDPKICYVCKKSFKSSYSVKLHYRNVHLKEMHVCTVAGCNAAFPSRRSRDRHSANINLHRKLLTKELDDMGLDSSQPSLSKDLRDEFLVKIYGAQHPMGLDVREDASSPAGTEDSHLNGYGRGMAEDYMVLDLSTTSSLQSSSSIHSSRESDAGSDEGILLDDIDGASDSGESAHKAEAPALPGSLGAEVSGSLMFSSLSGSNGGIMCNICHKMYSNKGTLRVHYKTVHLREMHKCKVPGCNMMFSSVRSRNRHSQNPNLHKNIPFTSVD

SEQ ID NO: 704 - protein, 494 aa, Homo sapiens
MVSKLSQLQTELLAALLESGLSKEALIQALGEPGPYLLAGEGPLDKGESCGGGRGELAELPNGLGETRGSEDETDDDGEDFTPPILKELENLSPEEAAHQKAVVETLLQEDPWRVAKMVKSYLQQHNIPQREVVDTTGLNQSHLSQHLNKGTPMKTQKRAALYTWYVRKQREVAQQFTHAGQGGLIEEPTGDELPTKKGRRNRFKWGPASQQILFQAYERQKNPSKEERETLVEECNRAECIQRGVSPSQAQGLGSNLVTEVRVYNWFANRRKEEAFRHKLAMDTYSGPPPGPGPGPALPAHSSPGLPPPALSPSKVHGVRYGQPATSETAEVPSSSGGPLVTVSTPLHQVSPTGLEPSHSLLSTEAKLVSAAGGPLPPVSTLTALHSLEQTSPGLNQQPQNLIMASLPGVMTIGPGEPASLGPTFTNTGASTLVIGKLVGMGGHLGGRLMGQPQNPGAGRATGTHSFIHSFIQHVFIQCLLWTSHCATSVIPG

SEQ ID NO: 705 - protein, 542 aa, Homo sapiens
MVSKLSQLQTELLAALLESGLSKEALIQALGEPGPYLLAGEGPLDKGESCGGGRGELAELPNGLGETRGSEDETDDDGEDFTPPILKELENLSPEEAAHQKAVVETLLQEDPWRVAKMVKSYLQQHNIPQREVVDTTGLNQSHLSQHLNKGTPMKTQKRAALYTWYVRKQREVAQQFTHAGQGGLIEEPTGDELPTKKGRRNRFKWGPASQQILFQAYERQKNPSKEERETLVEECNRAECIQRGVSPSQAQGLGSNLVTEVRVYNWFANRRKEEAFRHKLAMDTYSGPPPGPGPGPALPAHSSPGLPPPALSPSKVHGVRYGQPATSETAEVPSSSGGPLVTVSTPLHQVSPTGLEPSHSLLSTEAKLVSAAGGPLPPVSTLTALHSLEQTSPGLNQQPQNLIMASLPGVMTIGPGEPASLGPTFTNTGASTLVIGLASTQAQSVPVINSMGSSLTTLQPVQFSQPLHPSYQQPLMPPVQSHVTQSPFMATMAQLQSPHGERPVPHTAGDDDRGWLSMDAGERGAWQALQSACVSGTSVFP

SEQ ID NO: 706 - protein, 631 aa, Homo sapiens
MVSKLSQLQTELLAALLESGLSKEALIQALGEPGPYLLAGEGPLDKGESCGGGRGELAELPNGLGETRGSEDETDDDGEDFTPPILKELENLSPEEAAHQKAVVETLLQEDPWRVAKMVKSYLQQHNIPQREVVDTTGLNQSHLSQHLNKGTPMKTQKRAALYTWYVRKQREVAQQFTHAGQGGLIEEPTGDELPTKKGRRNRFKWGPASQQILFQAYERQKNPSKEERETLVEECNRAECIQRGVSPSQAQGLGSNLVTEVRVYNWFANRRKEEAFRHKLAMDTYSGPPPGPGPGPALPAHSSPGLPPPALSPSKVHGVRYGQPATSETAEVPSSSGGPLVTVSTPLHQVSPTGLEPSHSLLSTEAKLVSAAGGPLPPVSTLTALHSLEQTSPGLNQQPQNLIMASLPGVMTIGPGEPASLGPTFTNTGASTLVIGLASTQAQSVPVINSMGSSLTTLQPVQFSQPLHPSYQQPLMPPVQSHVTQSPFMATMAQLQSPHALYSHKPEVAQYTHTGLLPQTMLITDTTNLSALASLTPTKQVFTSDTEASSESGLHTPASQATTLHVPSQDPAGIQHLQPAHRLSASPTVSSSSLVLYQSSDSSNGQSHLLPSNHSVIETFISTQMASSSQ

SEQ ID NO: 707 - protein, 262 aa, Homo sapiens
MAAPSGTVSDSESSNSSSDAEELERCREAAMPAWGLEQRPHVAGKPRAGAANSQLSTSQPSLRHKVNEHEQDGNELQTTPEFRAHVAKKLGALLDSFITISEAAKEPAKAKVQKVALEDDGFRLFFTSVPGGREKEESPQPRRKRQPSSSSEDSDEEWRRCREAAVSASDILQESAIHSPGTVEKEAKKKRKLKKKAKKVASVDSAVAATTPTSMATVQKQKSGELNGDQVSLGTKKKKKAKKASETSPFPPAKSATAIPAN

SEQ ID NO: 708 - protein, 396 aa, Homo sapiens [sequence omitted]

SEQ ID NO: 709 - protein, 359 aa, Homo sapiens
MSYRRELEKYRDLDEDEILGALTEEELRTLENELDELDPDNALLPAGLRQKDQTTKAPTGPFKREELLDHLEKQAKEFKDREDLVPYTGEKRGKVWVPKQKPLDPVLESVTLEPELEEALANASDAELCDIAAILGMHTLMSNQQYYQALSSSSIMNKEGLNSVIKPTQYKPVPDEEPNSTDVEETLERIKNNDPKLEEVNLNNIRNIPIPTLKAYAEALKENSYVKKFSIVGTRSNDPVAYALAEMLKENKVLKTLNVESNFISGAGILRLVEALPYNTSLVEMKIDNQSQPLGNKVEMEIVSMLEKNATLLKFGYHFTQQGPRLRASNAMMNNNDLVRKRRLADLTGPIIPKCRSGV

SEQ ID NO: 710 - protein, 359 aa, Homo sapiens; identical to SEQ ID NO: 709

SEQ ID NO: 711 - protein, 189 aa, Homo sapiens
MLGMIKNSLFGSVETWPWQVLSKGDKEEVAYEERACEGGKFATVEVTDKPVDEALREAMPKVAKYAGGTNDKGIGMGMTVPISFAVFPNEDGSLQKKLKVWFRIPNQFQSDPPAPSDKSVKIEEREGITVYSMQFGGYAKEADYVAQATRLRAALEGTATYRGDIYFCTGYDPPMKPYGRRNEIWLLKT

SEQ ID NO: 712 - protein, 189 aa, Homo sapiens; identical to SEQ ID NO: 711

SEQ ID NO: 713 - protein, 636 aa, Homo sapiens
MRMDAGEVTLVNHNSVFKTHLLPQTGFPEDQLSLSDQQILSSRQGHLDRSFTCSTRSAAYNPSYYSDNPSSDSFLGSGDLRTFGQSANGQWRNSTPSSSSSLQKSRNSRSLYLETRKTSSGLSNSFAGKSNHHCHVSAYEKSFPIKPVPSPSWSGSCRRSLLSPKKTQRRHVSTAEETVQEEEREIYRQLLQMVTGKQFTIAKPTTHFPLHLSRCLSSSKNTLKDSLFKNGNSCASQIIGSDTSSSGSASILTNQEQLSHSVYSLSSYTPDVAFGSKDSGTLHHPHHHHSVPHQPDNLAASNTQSEGSDSVILLKVKDSQTPTPSSTFFQAELWIKELTSVYDSRARERLRQIEEQKALALQLQNQRLQEREHSVHDSVELHLRVPLEKEIPVTVVQETQKKGHKLTDSEDEFPEITEEMEKEIKNVFRNGNQDEVLSEAFRLTITRKDIQTLNHLNWLNDEIINFYMNMLMERSKEKGLPSVHAFNTFFFTKLKTAGYQAVKRWTKKVDVFSVDILLVPIHLGVHWCLAVVDFRKKNITYYDSMGGINNEACRILLQYLKQESIDKKRKEFDTNGWQLFSKKSQIPQQMNGSDCGMFACKYADCITKDRPINFTQQHMPYFRKRMVWEILHRKLL

SEQ ID NO: 714 - protein, 675 aa, Homo sapiens
MKIPLTATICLPGSSPPGLCIFAKVSDVKRLEMDDIADRMRMDAGEVTLVNHNSVFKTHLLPQTGFPEDQLSLSDQQILSSRQGHLDRSFTCSTRSAAYNPSYYSDNPSSDSFLGSGDLRTFGQSANGQWRNSTPSSSSSLQKSRNSRSLYLETRKTSSGLSNSFAGKSNHHCHVSAYEKSFPIKPVPSPSWSGSCRRSLLSPKKTQRRHVSTAEETVQEEEREIYRQLLQMVTGKQFTIAKPTTHFPLHLSRCLSSSKNTLKDSLFKNGNSCASQIIGSDTSSSGSASILTNQEQLSHSVYSLSSYTPDVAFGSKDSGTLHHPHHHHSVPHQPDNLAASNTQSEGSDSVILLKVKDSQTPTPSSTFFQAELWIKELTSVYDSRARERLRQIEEQKALALQLQNQRLQEREHSVHDSVELHLRVPLEKEIPVTVVQETQKKGHKLTDSEDEFPEITEEMEKEIKNVFRNGNQDEVLSEAFRLTITRKDIQTLNHLNWLNDEIINFYMNMLMERSKEKGLPSVHAFNTFFFTKLKTAGYQAVKRWTKKVDVFSVDILLVPIHLGVHWCLAVVDFRKKNITYYDSMGGINNEACRILLQYLKQESIDKKRKEFDTNGWQLFSKKSQIPQQMNGSDCGMFACKYADCITKDRPINFTQQHMPYFRKRMVWEILHRKLL

SEQ ID NO: 715 - protein, 676 aa, Homo sapiens
MKIPLTATICLPGSSPPGLCIFAKVSDVKRLEMDDIADRMRMDAGEVTLVNHNSVFKTHLLPQTGFPEDQLSLSDQQILSSRQGHLDRSFTCSTRSAAYNPSYYSDNPSSDSFLGSGDLRTFGQSANGQWRNSTPSSSSSLQKSRNSRSLYLETRKTSSGLSNSFAGKSNHHCHVSAYEKSFPIKPVPSPSWSGSCRRSLLSPKKTQRRHVSTAEETVQEEEREIYRQLLQMVTGKQFTIAKPTTHFPLHLSRCLSSSKNTLKDSLFKNGNSCASQIIGSDTSSSGSASILTNQEQLSHSVYSLSSYTPDVAFGSKDSGTLHHPHHHHSVPHQPDNLAASNTQSEGSDSVILLKVKDSQTPTPSSTFFQAELWIKELTSVYDSRARERLRQIEEQKALALQLQNQRLQEREHSVHDSVELHLRVPLEKEIPVTVVQETQKKGHKLTDSEDEFPEITEEMEKEIKNVFRNGNQDEVLSEAFRLTITRKDIQTLNHLNWLNDEIINFYMNMLMERSKEKGLPSVHAFNTFFFTKLKTAGYQAVKRWTKKVDVFSVDILLVPIHLGVHWCLAVVDFRKKNITYYDSMGGINNEACRILLQYLKQESIDKKRKEFDTNGWQLFSKKSQEIPQQMNGSDCGMFACKYADCITKDRPINFTQQHMPYFRKRMVWEILHRKLL

SEQ ID NO: 716 - protein, 643 aa, Homo sapiens
MDDIADRMRMDAGEVTLVNHNSVFKTHLLPQTGFPEDQLSLSDQQILSSRQGHLDRSFTCSTRSAAYNPSYYSDNPSSDSFLGSGDLRTFGQSANGQWRNSTPSSSSSLQKSRNSRSLYLETRKTSSGLSNSFAGKSNHHCHVSAYEKSFPIKPVPSPSWSGSCRRSLLSPKKTQRRHVSTAEETVQEEEREIYRQLLQMVTGKQFTIAKPTTHFPLHLSRCLSSSKNTLKDSLFKNGNSCASQIIGSDTSSSGSASILTNQEQLSHSVYSLSSYTPDVAFGSKDSGTLHHPHHHHSVPHQPDNLAASNTQSEGSDSVILLKVKDSQTPTPSSTFFQAELWIKELTSVYDSRARERLRQIEEQKALALQLQNQRLQEREHSVHDSVELHLRVPLEKEIPVTVVQETQKKGHKLTDSEDEFPEITEEMEKEIKNVFRNGNQDEVLSEAFRLTITRKDIQTLNHLNWLNDEIINFYMNMLMERSKEKGLPSVHAFNTFFFTKLKTAGYQAVKRWTKKVDVFSVDILLVPIHLGVHWCLAVVDFRKKNITYYDSMGGINNEACRILLQYLKQESIDKKRKEFDTNGWQLFSKKSQIPQQMNGSDCGMFACKYADCITKDRPINFTQQHMPYFRKRMVWEILHRKLL

SEQ ID NO: 717 - protein, 780 aa, Homo sapiens
MTHEEHHAAKTLGIGKAIAVLTSGGDAQGMNAAVRAVVRVGIFTGARVFFVHEGYQGLVDGGDHIKEATWESVSMMLQLGGTVIGSARCKDFREREGRLRAAYNLVKRGITNLCVIGGDGSLTGADTFRSEWSDLLSDLQKAGKITDEEATKSSYLNIVGLVGSIDNDFCGTDMTIGTDSALHRIMEIVDAITTTAQSHQRTFVLEVMGRHCGYLALVTSLSCGADWVFIPECPPDDDWEEHLCRRLSETRTRGSRLNIIIVAEGAIDKNGKPITSEDIKNLVVKRLGYDTRVTVLGHVQRGGTPSAFDRILGSRMGVEAVMALLEGTPDTPACVVSLSGNQAVRLPLMECVQVTKDVTKAMDEKKFDEALKLRGRSFMNNWEVYKLLAHVRPPVSKSGSHTVAVMNVGAPAAGMNAAVRSTVRIGLIQGNRVLVVHDGFEGLAKGQIEEAGWSYVGGWTGQGGSKLGTKRTLPKKSFEQISANITKFNIQGLVIIGGFEAYTGGLELMEGRKQFDELCIPFVVIPATVSNNVPGSDFSVGADTALNTICTTCDRIKQSAAGTKRRVFIIETMGGYCGYLATMAGLAAGADAAYIFEEPFTIRDLQANVEHLVQKMKTTVKRGLVLRNEKCNENYTTDFIFNLYSEEGKGIFDSRKNVLGHMQQGGSPTPFDRNFATKMGAKAMNWMSGKIKESYRNGRIFANTPDSGCVLGMRKRALVFQPVAELKDQTDFEHRIPKEQWWLKLRPILKILAKYEIDLDTSDHAHLEHITRKRSGEAAV

SEQ ID NO: 718 - protein, 780 aa, Homo sapiens; identical to SEQ ID NO: 717

SEQ ID NO: 719 - protein, 749 aa, Homo sapiens
MTHEEHHAAKTLGIGKAIAVLTSGGDAQGMNAAVRAVVRVGIFTGARVFFVHEGYQGLVDGGDHIKEATWESVSMMLQLGGTVIGSARCKDFREREGRLRAAYNLVKRGITNLCVIGGDGSLTGADTFRSEWSDLLSDLQKAGKITDEEATKSSYLNIVGLVGSIDNDFCGTDMTIGTDSALHRIMEIVDAITTTAQSHQRTFVLEVMGRHCGYLALVTSLSCGADWVFIPECPPDDDWEEHLCRRLSETRTRGSRLNIIIVAEGAIDKNGKPITSEDIKNGSRMGVEAVMALLEGTPDTPACVVSLSGNQAVRLPLMECVQVTKDVTKAMDEKKFDEALKLRGRSFMNNWEVYKLLAHVRPPVSKSGSHTVAVMNVGAPAAGMNAAVRSTVRIGLIQGNRVLVVHDGFEGLAKGQIEEAGWSYVGGWTGQGGSKLGTKRTLPKKSFEQISANITKFNIQGLVIIGGFEAYTGGLELMEGRKQFDELCIPFVVIPATVSNNVPGSDFSVGADTALNTICTTCDRIKQSAAGTKRRVFIIETMGGYCGYLATMAGLAAGADAAYIFEEPFTIRDLQANVEHLVQKMKTTVKRGLVLRNEKCNENYTTDFIFNLYSEEGKGIFDSRKNVLGHMQQGGSPTPFDRNFATKMGAKAMNWMSGKIKESYRNGRIFANTPDSGCVLGMRKRALVFQPVAELKDQTDFEHRIPKEQWWLKLRPILKILAKYEIDLDTSDHAHLEHITRKRSGEAAV

SEQ ID NO: 720 - protein, 780 aa, Homo sapiens; identical to SEQ ID NO: 717

SEQ ID NO: 721 - protein, 780 aa, Homo sapiens; identical to SEQ ID NO: 717

SEQ ID NO: 722 - protein, 439 aa, Homo sapiens
MADVINVSVNLEAFSQAISAIQALRSSVSRVFDCLKDGMRNKETLEGREKAFIAHFQDNLHSVNRDLNELERLSNLVGKPSENHPLHNSGLLSLDPVQDKTPLYSQLLQAYKWSNKVHGIRVTCVFGVLVHGSISEYPRVEQQPPGTLVENYLAKVLQTAFASCDTPQIPEGRFCPCMRPALFPDFSTSSGYAGFPDALYSLARVGKGNVHMINWEETEAPGGWQQLCLVLGSPYAGTDAEHDKLQYHAGLASGLLNQQSLKRSANQMGVSAKRRPKAQPTTLVLPPQYVDDVISRIDRMFPEMSIHLSRPNGTSAMLLVTLGKVLKVIVVMRSLFIDRTIVKGYNENVYTEDGKLDIWSKSNYQVFQKVTDHATTALLHYQLPQMPDVVVRSFMTWLRSYIKLFQAPCQRCGKFLQDGLPPTWRDFRTLEAFHDTCRQ

SEQ ID NO: 723 - protein, 311 aa, Homo sapiens
MADVINVSVNLEAFSQAISAIQALRSSVSRVFDCLKDGMRNKETLEGREKAFIAHFQDNLHSVNRDLNELERLSNLVGKPSENHPLHNSGLLSLDPVQDKTPLYSQLLQAYKWSNKLQYHAGLASGLLNQQSLKRSANQMGVSAKRRPKAQPTTLVLPPQYVDDVISRIDRMFPEMSIHLSRPNGTSAMLLVTLGKVLKVIVVMRSLFIDRTIVKGYNENVYTEDGKLDIWSKSNYQVFQKVTDHATTALLHYQLPQMPDVVVRSFMTWLRSYIKLFQAPCQRCGKFLQDGLPPTWRDFRTLEAFHDTCRQ

SEQ ID NO: 724 - protein, 312 aa, Homo sapiens
MADVINVSVNLEAFSQAISAIQALRSSVSRVFDCLKDGMRNKETLEGREKAFIAHFQDNLHSVNRDLNELERLSNLVGKPSENHPLHNSGLLSLDPVQDKTPLYSQLLQAYKWSNKLQYHAGLASGLLNQQSLKRSANQMGVSAKRRPKAQPTTLVLPPQYVDDVISRIDRMFPEMSIHLSRPNGTSAMLLVVTLGKVLKVIVVMRSLFIDRTIVKGYNENVYTEDGKLDIWSKSNYQVFQKVTDHATTALLHYQLPQMPDVVVRSFMTWLRSYIKLFQAPCQRCGKFLQDGLPPTWRDFRTLEAFHDTCRQ

SEQ ID NO: 725 - protein, 311 aa, Homo sapiens; identical to SEQ ID NO: 723

SEQ ID NO: 726 - protein, 790 aa, Homo sapiens
MSRRRHSDENDGGQPHKRRKTSDANETEDHLESLICKVGEKSACSLESNLEGLAGVLEADLPNYKSKILRLLCTVARLLPEKLTIYTTLVGLLNARNYNFGGEFVEAMIRQLKESLKANNYNEAVYLVRFLSDLVNCHVIAAPSMVAMFENFVSVTQEEDVPQVRRDWYVYAFLSSLPWVGKELYEKKDAEMDRIFANTESYLKRRQKTHVPMLQVWTADKPHPQEEYLDCLWAQIQKLKKDRWQERHILRPYLAFDSILCEALQHNLPPFTPPPHTEDSVYPMPRVIFRMFDYTDDPEGPVMPGSHSVERFVIEENLHCIIKSHWKERKTCAAQLVSYPGKNKIPLNYHIVEVIFAELFQLPAPPHIDVMYTTLLIELCKLQPGSLPQVLAQATEMLYMRLDTMNTTCVDRFINWFSHHLSNFQFRWSWEDWSDCLSQDPESPKPKFVREVLEKCMRLSYHQRILDIVPPTFSALCPANPTCIYKYGDESSNSLPGHSVALCLAVAFKSKATNDEIFSILKDVPNPNQDDDDDEGFSFNPLKIEVFVQTLLHLAAKSFSHSFSALAKFHEVFKTLAESDEGKLHVLRVMFEVWRNHPQMIAVLVDKMIRTQIVDCAAVANWIFSSELSRDFTRLFVWEILHSTIRKMNKHVLKIQKELEEAKEKLARQHKRRSDDDDRSSDRKDGVLEEQIERLQEKVESAQSEQKNLFLVIFQRFIMILTEHLVRCETDGTSVLTPWYKNCIERLQQIFLQHHQIIQQYMVTLENLLFTAELDPHILAVFQQFCALQA

SEQ ID NO: 727 - protein, 790 aa, Homo sapiens; identical to SEQ ID NO: 726

SEQ ID NO: 728 - protein, 723 aa, Homo sapiens
MQKIYESSARLLPEKLTIYTTLVGLLNARNYNFGGEFVEAMIRQLKESLKANNYNEAVYLVRFLSDLVNCHVIAAPSMVAMFENFVSVTQEEDVPQVRRDWYVYAFLSSLPWVGKELYEKKDAEMDRIFANTESYLKRRQKTHVPMLQVWTADKPHPQEEYLDCLWAQIQKLKKDRWQERHILRPYLAFDSILCEALQHNLPPFTPPPHTEDSVYPMPRVIFRMFDYTDDPEGPVMPGSHSVERFVIEENLHCIIKSHWKERKTCAAQLVSYPGKNKIPLNYHIVEVIFAELFQLPAPPHIDVMYTTLLIELCKLQPGSLPQVLAQATEMLYMRLDTMNTTCVDRFINWFSHHLSNFQFRWSWEDWSDCLSQDPESPKPKFVREVLEKCMRLSYHQRILDIVPPTFSALCPANPTCIYKYGDESSNSLPGHSVALCLAVAFKSKATNDEIFSILKDVPNPNQDDDDDEGFSFNPLKIEVFVQTLLHLAAKSFSHSFSALAKFHEVFKTLAESDEGKLHVLRVMFEVWRNHPQMIAVLVDKMIRTQIVDCAAVANWIFSSELSRDFTRLFVWEILHSTIRKMNKHVLKIQKELEEAKEKLARQHKRRSDDDDRSSDRKDGVLEEQIERLQEKVESAQSEQKNLFLVIFQRFIMILTEHLVRCETDGTSVLTPWYKNCIERLQQIFLQHHQIIQQYMVTLENLLFTAELDPHILAVFQQFCALQA

SEQ ID NO: 729 - protein, 167 aa, Homo sapiens
MDLCLADSSVSAPAPHRQGIHLSPGEFHKEVEKFLSQANQEQSDTILLDCRNFYESKIGRFQGCLAPDIRKFSYFPSYVDKNLELFREKRVLMYCTGGIRCERGSAYLKAKGVCKEVFQLKGGIHKYLEEFPDGFYKGKLFVFDERYALSYNSDVVSGRSAQAQSPN

SEQ ID NO: 730 - protein, 383 aa, Homo sapiens
MQPPPRAASACRLLLSPAFRSMSFRGHAESAAALATQSPRAAVVVRLKAGRAGGRSSLRLRSGRSSGASQWFPGGLSMVFPAALAPTPGDFRSLVTSRASFSTQIRGGGIGSRAAFALFVKTKEVPTKRSFECKEKLWKCCQQLFTDQTSIHRHVATQHADEIYHQTASILKQLAVTLSTSKSLSSADEKNPLKECLPHSHDVSAWLPDISCFNPDELISGQGSEEGEVLLYYCYHDLEDPQWICAWQTALCQHLHLTGKIRIAAEGINGTVGGSKLATRLYVEVMLSFPLFKDDLCKDDFKTSKGGAHCFPELRVGVFEEIVPMGISPKKISYKKPGIHLSPGEFHKEVEKFLSQANQEQSDTILLDCRNFYESKIVSKSQN

SEQ ID NO: 731 - protein, 290 aa, Homo sapiens
MLSFPLFKDDLCKDDFKTSKGGAHCFPELRVGVFEEIVPMGISPKKISYKKPGIHLSPGEFHKEVEKFLSQANQEQSDTILLDCRNFYESKIGRFQGCLAPDIRKFSYFPSYVDKNLELFREKRVLMYCTGGIRCERGSAYLKAKGVCKEVFQLKGGIHKYLEEFPDGFYKGKLFVFDERYALSYNSDVVSECSYCGARWDQYKLCSTPQCRQLVLTCPACQGQGFTACCVTCQDKGSRKVSGPMQDSFKEECECTARRPRIPRELLQHVRQPVSPEPGPDADEDGPVLM

SEQ ID NO: 732 - protein, 489 aa, Homo sapiens
MSLINPSSSLKAELDGSTKKKYSFAKKKAFALFVKTKEVPTKRSFECKEKLWKCCQQLFTDQTSIHRHVATQHADEIYHQTASILKQLAVTLSTSKSLSSADEKNPLKECLPHSHDVSAWLPDISCFNPDELISGQGSEEGEVLLYYCYHDLEDPQWICAWQTALCQHLHLTGKIRIAAEGINGTVGGSKLATRLYVEVMLSFPLFKDDLCKDDFKTSKGGAHCFPELRVGVFEEIVPMGISPKKISYKKPGIHLSPGEFHKEVEKFLSQANQEQSDTILLDCRNFYESKIGRFQGCLAPDIRKFSYFPSYVDKNLELFREKRVLMYCTGGIRCERGSAYLKAKGVCKEVFQLKGGIHKYLEEFPDGFYKGKLFVFDERYALSYNSDVVSECSYCGARWDQYKLCSTPQCRQLVLTCPACQGQGFTACCVTCQDKGSRKVSGPMQDSFKEECECTARRPRIPRELLQHVRQPVSPEPGPDADEDGPVLM

SEQ ID NO: 733 - protein, 474 aa, Homo sapiens
MKTKCICELCSCGRHHCPHLPTKIYDETEKPCLLSEYTENYPFYHSYLPRESFKPRREYQKGSIPMEGLTTSRRDFGPHKVAPVKVHQYDQFVPSEENMDLLTTYKKDYNPYPVCRVDPIKPRDSKYPCSDKMECLPTYKADYLPWNQPRREPLRLEHKYQPASVRFDNRTTHQDDYPIKGLVKTISCKPLAMPKLCNIPLEDVTNYKMSYVAHPVEKRFVHEAEKFRPCEIPFESLTTQKQSYRGLMGEPAKSLKPLARPPGLDMPFCNTTEFRDKYQAWPMPRMFSKAPITYVPPEDRMDLLTTVQAHYTCPKGAPAQSCRPALQIKKCGRFEGSSTTKDDYKQWSSMRTEPVKPVPQLDLPTEPLDCLTTTRAHYVPHLPINTKSCKPHWSGPRGNVPVESQTTYTISFTPKEMGRCLASYPEPPGYTFEEVDALGHRIYKPVSQAGSQQSSHLSVDDSENPNQRELEVLA

SEQ ID NO: 734 - protein, 363 aa, Homo sapiens
MAQPGSGCKATTRCLEGTAPPAMAQSDAEALAGALDKDEGQASPCTPSTPSVCSPPSAASSVPSAGKNICSSCGLEILDRYLLKVNNLIWHVRCLECSVCRTSLRQQNSCYIKNKEIFCKMDYFSRFGTKCARCGRQIYASDWVRRARGNAYHLACFACFSCKRQLSTGEEFGLVEEKVLCRIHYDTMIENLKRAAENGNGLTLEGAVPSEQDSQPKPAKRARTSFTAEQLQVMQAQFAQDNNPDAQTLQKLADMTGLSRRVIQVWFQNCRARHKKHTPQHPVPPSGAPPSRLPSALSDDIHYTPFSSPERARMVTLHGYIESQVQCGQVHCRLPYTAPPVHLKADMDGPLSNRGEKVILFQY

SEQ ID NO: 735 - protein, 348 aa, Homo sapiens
MAQPGSGCKATTRCLEGTAPPAMAQSDAEALAGALDKDEGQASPCTPSTPSVCSPPSAASSVPSAGKNICSSCGLEILDRYLLKVNNLIWHVRCLECSVCRTSLRQQNSCYIKNKEIFCKMDYFSRFGTKCARCGRQIYASDWVRRARGNAYHLACFACFSCKRQLSTGEEFGLVEEKVLCRIHYDTMIENLKRAAENGNGLTLEGAVPSEQDSQPKPAKRARTSFTAEQLQVMQAQFAQDNNPDAQTLQKLADMTGLSRRVIQVWFQNCRARHKKHTPQHPVPPSGAPPSRLPSALSDDIHYTPFSSPERARMVTLHGYIESHPFSVLTLPALPHLPVGAPQLPLSR

SEQ ID NO: 736 - protein, 363 aa, Homo sapiens; identical to SEQ ID NO: 734

SEQ ID NO: 737 - protein, 363 aa, Homo sapiens; identical to SEQ ID NO: 734

SEQ ID NO: 738 - protein, 317 aa, Homo sapiens
MERKVDVTSRAVMEIMTKTIEYLQPNPASRAKLSMINTMSKIRGQEKGPGYPQAEALLAEAMLKFGRELGDDCNFGPALGEVGEAMRELSEVKDSLDIEVKQNFIDPLQNLHDKDLREIQHHLKKLEGRRLDFDYKKKRQGKIPDEELRQALEKFDESKEIAESSMFNLLEMDIEQVSQLSALVQAQLEYHKQAVQILQQVTVRLEERIRQASSQPRREYQPKPRMSLEFPTGDSTQPNGGLSHTGTPKPSGVQMDQPCCRALYDFEPENEGELGFKEGDIITLTNQIDENWYEGMLHGHSGFFPINYVEILVALPH

SEQ ID NO: 739 - protein, 317 aa, Homo sapiens; identical to SEQ ID NO: 738

SEQ ID NO: 740 - protein, 283 aa, Homo sapiens
MINTMSKIRGQEKGPGYPQAEALLAEAMLKFGRELGDDCNFGPALGEVGEAMRELSEVKDSLDIEVKQNFIDPLQNLHDKDLREIQHHLKKLEGRRLDFDYKKKRQGKIPDEELRQALEKFDESKEIAESSMFNLLEMDIEQVSQLSALVQAQLEYHKQAVQILQQVTVRLEERIRQASSQPRREYQPKPRMSLEFPTGDSTQPNGGLSHTGTPKPSGVQMDQPCCRALYDFEPENEGELGFKEGDIITLTNQIDENWYEGMLHGHSGFFPINYVEILVALPH

SEQ ID NO: 741 - protein, 352 aa, Homo sapiens
MSVAGLKKQFHKATQKVSEKVGGAEGTKLDDDFKEMERKVDVTSRAVMEIMTKTIEYLQPNPASRAKLSMINTMSKIRGQEKGPGYPQAEALLAEAMLKFGRELGDDCNFGPALGEVGEAMRELSEVKDSLDIEVKQNFIDPLQNLHDKDLREIQHHLKKLEGRRLDFDYKKKRQGKIPDEELRQALEKFDESKEIAESSMFNLLEMDIEQVSQLSALVQAQLEYHKQAVQILQQVTVRLEERIRQASSQPRREYQPKPRMSLEFPTGDSTQPNGGLSHTGTPKPSGVQMDQPCCRALYDFEPENEGELGFKEGDIITLTNQIDENWYEGMLHGHSGFFPINYVEILVALPH

SEQ ID NO: 742 - protein, 1335 aa, Homo sapiens
MAEAELHKERLQAIAEKRKRQTEIEGKRQQLDEQILLLQHSKSKVLREKWLLQGIPAGTAEEEEARRRQSEEDEFRVKQLEDNIQRLEQEIQTLESEESQISAKEQIILEKLKETEKSFKDFQKGFSSTDGDAVNYISSQLPDLPILCSRTAEPSPGQDGTSRAAAVYAMEINVEKDKQTGETKILSTSTIGPEGVHQKGVKVYDDGTKVVYEVRSGGTVVENGVHKLSTKDVEELIQKAGQSSLGGGHVSERTVIADGSLSHPKEHMLCKEAKLEMVHKSRKDHSSGNPGQQAQAPSAAGPEANLDQPVTMIFMGYQNIEDEEETKKVLGYDETIKAELVLIDEDDEKSLREKTVTDVSTIDGNAAELVSGRPVSDTTEPSSPEGKEESLATEPAPGVGWENVLLKEGESASNATETSGPDMTIKKPPQLSEDDIWLKSEGDNYSATLLEPAASSLSPDHKNMEIEVSVAECKSVPGITSTPHPMDHPSAFYSPPHNGLLTDHHESLDNDVAREIRYLDEVLEANCCDSAVDGTYNGTSSPEPGAVVLVGGLSPPVHEATQPEPTERTASRQAPPHIELSNSSPDPMAEAERTNGHSPSQPRDALGDSLQVPVSPSSTTSSRCSSRDGEFTLTTLKKEAKFELRAFHEDKKPSKLFEDDEHEKEQYCIRKVRPSEEMLELEKERRELIRSQAVKKNPGIAAKWWNPPQEKTIEEQLDEEHLESHKKYKERKERRAQQEQLLLQKQLQQQQQQPPSQLCTAPASSHERASMIDKAKEDIVTEQIDFSAARKQFQLMENSRQAVAKGQSTPRLFSIKPFYRPLGSVNSDKPLTNPRPPSVGGPPEDSGASAAKGQKSPGALETPSAAGSQGNTASQGKEGPYSEPSKRGPLSKLWAEDGEFTSARAVLTVVKDDDHGILDQFSRSVNVSLTQEELDSGLDELSVRSQDTTVLETLSNDFSMDNISDSGASNETTNALQENSLADFSLPQTPQTDNPSEGRGEGVSKSFSDHGFYSPSSTLGDSPLVDDPLEYQAGLLVQNAIQQAIAEQVDKAVSKTSRDGAEQQGPEATVEEAEAAAFGSEKPQSMFEPPQVSSPVQEKRDVLPKILPAEDRALRERGPPQPLPAVQPSGPINMEETRPEGSYFSKYSEAAELRSTASLLATQESDVMVGPFKLRSRKQRTLSMIEEEIRAAQEREEELKRQRQVLQSTQSPRTKNAPSLPSRTCYKTAPGKIEKVKPPPSPTTEGPSLQPDLAPEEAAGTQRPKNLMQTLMEDYETHKSKRRERMDDSSYTSKLLSCKVTSEVLEATRVNRRKSALALRWEAGIYANQEEEDNE

SEQ ID NO: 743 - protein, 1337 aa, Homo sapiens [sequence omitted]

SEQ ID NO: 744 - protein, 1092 aa, Homo sapiens [sequence omitted]

SEQ ID NO: 745 - protein, 1103 aa, Homo sapiens
MAEAELHKERLQAIAEKRKRQTEIEGKRQQLDEQILLLQHSKSKVLREKWLLQGIPAGTAEEEEARRRQSEEDEFRVKQLEDNIQRLEQEIQTLESEESQISAKEQIILEKLKETEKSFKDFQKGFSSTDGDAVNYISSQLPDLPILCSRTAEPSPGQDGTSRAAGVGWENVLLKEGESASNATETSGPDMTIKKPPQLSEDDIWLKSEGDNYSATLLEPAASSLSPDHKNMEIEVSVAECKSVPGITSTPHPMDHPSAFYSPPHNGLLTDHHESLDNDVAREIRYLDEVLEANCCDSAVDGTYNGTSSPEPGAVVLVGGLSPPVHEATQPEPTERTASRQAPPHIELSNSSPDPMAEAERTNGHSPSQPRDALGDSLQVPVSPSSTTSSRCSSRDGEFTLTTLKKEAKFELRAFHEDKKPSKLFEDDEHEKEQYCIRKVRPSEEMLELEKERRELIRSQAVKKNPGIAAKWWNPPQEKTIEEQLDEEHLESHKKYKERKERRAQQEQLLLQKQLQQQQQQPPSQLCTAPASSHERASMIDKAKEDIVTEQIDFSAARKQFQLMENSRQAVAKGQSTPRLFSIKPFYRPLGSVNSDKPLTNPRPPSVGGPPEDSGASAAKGQKSPGALETPSAAGSQGNTASQGKEGPYSEPSKRGPLSKLWAEDGEFTSARAVLTVVKDDDHGILDQFSRSVNVSLTQEELDSGLDELSVRSQDTTVLETLSNDFSMDNISDSGASNETTNALQENSLADFSLPQTPQTDNPSEGRGEGVSKSFSDHGFYSPSSTLGDSPLVDDPLEYQAGLLVQNAIQQAIAEQVDKAVSKTSRDGAEQQGPEATVEEAEAAAFGSEKPQSMFEPPQVSSPVQEKRDVLPKILPAEDRALRERGPPQPLPAVQPSGPINMEETRPEGSYFSKYSEAAELRSTASLLATQESDVMVGPFKLRSRKQRTLSMIEEEIRAAQEREEELKRQRQVLQSTQSPRTKNAPSLPSRTCYKTAPGKIEKVKPPPSPTTEGPSLQPDLAPEEAAGTQRPKNLMQTLMEDYETHKSKRRERMDDSSYTSKLLSCKVTSEVLEATRVNRRKSALALRWEAGIYANQEEEDNE

SEQ ID NO: 746 - protein, 411 aa, Homo sapiens
MAEAELHKERLQAIAEKRKRQTEIEGKRQQLDEQILLLQHSKSKVLREKWLLQGIPAGTAEEEEARRRQSEEDEFRVKQLEDNIQRLEQEIQTLESEESQISAKEQIILEKLKETEKSFKDFQKGFSSTDGDAVNYISSQLPDLPILCSRTAEPSPGQDGTSRAAAVYAMEINVEKDKQTGETKILSTSTIGPEGVHQKGVKVYDDGTKVVYEVRSGGTVVENGVHKLSTKDVEELIQKAGQSSLGGGHVSERTVIADGSLSHPKEHMLCKEAKLEMVHKSRKDHSSGNPGQQAQAPSAAGPEANLDQPVTMIFMGYQNIEDEEETKKVLGYDETIKAELVLIDEDDEKSLREKTVTDVSTIDGNAAELVSGRPVSDTTEPSSPEGKEESLATEPAPGTQKKKRCQCCVVM

SEQ ID NO: 747 - protein, 1337 aa, Homo sapiens [sequence omitted]

SEQ ID NO: 748 - protein, 923 aa, Homo sapiens
MQYLTLTFVYSLFQKPPQLSEDDIWLKSEGDNYSATLLEPAASSLSPDHKNMEIEVSVAECKSVPGITSTPHPMDHPSAFYSPPHNGLLTDHHESLDNDVAREIRYLDEVLEANCCDSAVDGTYNGTSSPEPGAVVLVGGLSPPVHEATQPEPTERTASRQAPPHIELSNSSPDPMAEAERTNGHSPSQPRDALGDSLQVPVSPSSTTSSRCSSRDGEFTLTTLKKEAKFELRAFHEDKKPSKLFEDDEHEKEQYCIRKVRPSEEMLELEKERRELIRSQAVKKNPGIAAKWWNPPQEKTIEEQLDEEHLESHKKYKERKERRAQQEQLLLQKQLQQQQQQPPSQLCTAPASSHERASMIDKAKEDIVTEQIDFSAARKQFQLMENSRQAVAKGQSTPRLFSIKPFYRPLGSVNSDKPLTNPRPPSVGGPPEDSGASAAKGQKSPGALETPSAAGSQGNTASQGKEGPYSEPSKRGPLSKLWAEDGEFTSARAVLTVVKDDDHGILDQFSRSVNVSLTQEELDSGLDELSVRSQDTTVLETLSNDFSMDNISDSGASNETTNALQENSLADFSLPQTPQTDNPSEGRGEGVSKSFSDHGFYSPSSTLGDSPLVDDPLEYQAGLLVQNAIQQAIAEQVDKAVSKTSRDGAEQQGPEATVEEAEAAAFGSEKPQSMFEPPQVSSPVQEKRDVLPKILPAEDRALRERGPPQPLPAVQPSGPINMEETRPEGSYFSKYSEAAELRSTASLLATQESDVMVGPFKLRSRKQRTLSMIEEEIRAAQEREEELKRQRQVLQSTQSPRTKNAPSLPSRTCYKTAPGKIEKVKPPPSPTTEGPSLQPDLAPEEAAGTQRPKNLMQTLMEDYETHKSKRRERMDDSSYTSKLLSCKVTSEVLEATRVNRRKSALALRWEAGIYANQEEEDNE

SEQ ID NO: 749 - protein, 923 aa, Homo sapiens; identical to SEQ ID NO: 748

SEQ ID NO: 750 - protein, 413 aa, Homo sapiens
MEMAEAELHKERLQAIAEKRKRQTEIEGKRQQLDEQILLLQHSKSKVLREKWLLQGIPAGTAEEEEARRRQSEEDEFRVKQLEDNIQRLEQEIQTLESEESQISAKEQIILEKLKETEKSFKDFQKGFSSTDGDAVNYISSQLPDLPILCSRTAEPSPGQDGTSRAAAVYAMEINVEKDKQTGETKILSTSTIGPEGVHQKGVKVYDDGTKVVYEVRSGGTVVENGVHKLSTKDVEELIQKAGQSSLGGGHVSERTVIADGSLSHPKEHMLCKEAKLEMVHKSRKDHSSGNPGQQAQAPSAAGPEANLDQPVTMIFMGYQNIEDEEETKKVLGYDETIKAELVLIDEDDEKSLREKTVTDVSTIDGNAAELVSGRPVSDTTEPSSPEGKEESLATEPAPGTQKKKRCQCCVVM

SEQ ID NO: 751 - protein, 1332 aa, Homo sapiens
MRNLKLFRTLEFRDIQGPGNPQCFSLRTEQGTVLIGSEHGLIEVDPVSREVKNEVSLVAEGFLPEDGSGRIVGVQDLLDQESVCVATASGDVILCSLSTQQLECVGSVASGISVMSWSPDQELVLLATGQQTLIMMTKDFEPILEQQIHQDDFGESKFITVGWGRKETQFHGSEGRQAAFQMQMHESALPWDDHRPQVTWRGDGQFFAVSVVCPETGARKVRVWNREFALQSTSEPVAGLGPALAWKPSGSLIASTQDKPNQQDIVFFEKNGLLHGHFTLPFLKDEVKVNDLLWNADSSVLAVWLEDLQREESSIPKTCVQLWTVGNYHWYLKQSLSFSTCGKSKIVSLMWDPVTPYRLHVLCQGWHYLAYDWHWTTDRSVGDNSSDLSNVAVIDGNRVLVTVFRQTVVPPPMCTYQLLFPHPVNQVTFLAHPQKSNDLAVLDASNQISVYKCGDCPSADPTVKLGAVGGSGFKVCLRTPHLEKRYKIQFENNEDQDVNPLKLGLLTWIEEDVFLAVSHSEFSPRSVIHHLTAASSEMDEEHGQLNVSSSAAVDGVIISLCCNSKTKSVVLQLADGQIFKYLWESPSLAIKPWKNSGGFPVRFPYPCTQTELAMIGEEECVLGLTDRCRFFINDIEVASNITSFAVYDEFLLLTTHSHTCQCFCLRDASFKTLQAGLSSNHVSHGEVLRKVERGSRIVTVVPQDTKLVLQMPRGNLEVVHHRALVLAQIRKWLDKLMFKEAFECMRKLRINLNLIYDHNPKVFLGNVETFIKQIDSVNHINLFFTELKEEDVTKTMYPAPVTSSVYLSRDPDGNKIDLVCDAMRAVMESINPHKYCLSILTSHVKKTTPELEIVLQKVHELQGNAPSDPDAVSAEEALKYLLHLVDVNELYDHSLGTYDFDLVLMVAEKSQKDPKEYLPFLNTLKKMETNYQRFTIDKYLKRYEKAIGHLSKCGPEYFPECLNLIKDKNLYNEALKLYSPSSQQYQDISIAYGEHLMQEHMYEPAGLMFARCGAHEKALSAFLTCGNWKQALCVAAQLNFTKDQLVGLGRTLAGKLVEQRKHIDAAMVLEECAQDYEEAVLLLLEGAAWEEALRLVYKYNRLDIIETNVKPSILEAQKNYMAFLDSQTATFSRHKKRLLVVRELKEQAQQAGLDDEVPHGQESDLFSETSSVVSGSEMSGKYSHSNSRISARSSKNRRKAERKKHSLKEGSPLEDLALLEALSEVVQNTENLKDEVYHILKVLFLFEFDEQGRELQKAFEDTLQLMERSLPEIWTLTYQQNSATPVLGPNSTANSIMASYQQQKTSVPVLDAELFIPPKINRRTQWKLSLLD

SEQ ID NO: 752 - protein, 908 aa, Homo sapiens
MATSGAATPALRDPSASSAQPGLGVLFRRTARVVRTRAALRSAALQRFPLEGASILGGLVPSEREREPRTETRAQFGADSGCGLWELTLGSRLRVAGEARPDAPLFGGPQLYLSRGNHFIMRNLKLFRTLEFRDIQGPGNPQCFSLRTEQGTVLIGSEHGLIEVDPVSREVKNEVSLVAEGFLPEDGSGRIVGVQDLLDQESVCVATASGDVILCSLSTQQLECVGSVASGISVMSWSPDQELVLLATGQQTLIMMTKDFEPILEQQIHQDDFGESKFITVGWGRKETQFHGSEGRQAAFQMQMHESALPWDDHRPQVTWRGDGQFFAVSVVCPETGARKVRVWNREFALQSTSEPVAGLGPALAWKPSGSLIASTQDKPNQQDIVFFEKNGLLHGHFTLPFLKDEVKVNDLLWNADSSVLAVWLEDLQREESSIPKTCVQLWTVGNYHWYLKQSLSFSTCGKSKIVSLMWDPVTPYRLHVLCQGWHYLAYDWHWTTDRSVGDNSSDLSNVAVIDGNRVLVTVFRQTVVPPPMCTYQLLFPHPVNQVTFLAHPQKSNDLAVLDASNQISVYKCGDCPSADPTVKLGAVGGSGFKVCLRTPHLEKRYKIQFENNEDQDVNPLKLGLLTWIEEDVFLAVSHSEFSPRSVIHHLTAASSEMDEEHGQLNVSSSAAVDGVIISLCCNSKTKSVVLQLADGQIFKYLWESPSLAIKPWKNSGGFPVRFPYPCTQTELAMIGEEECVLGLTDRCRFFINDIEVASNITSFAVYDEFLLLTTHSHTCQCFCLRDASFKTLQAGLSSNHVSHGEVLRKVERGSRIVTVVPQDTKLVLQMPRGNLEVVHHRALVLAQIRKWLDKLMFKEAFECMRKLRINLNLIYDHNPKVFLGNVETFIKQIDSVNHINLFFTELK

SEQ ID NO: 753 - protein, 1452 aa, Homo sapiens
MATSGAATPALRDPSASSAQPGLGVLFRRTARVVRTRAALRSAALQRFPLEGASILGGLVPSEREREPRTETRAQFGADSGCGLWELTLGSRLRVAGEARPDAPLFGGPQLYLSRGNHFIMRNLKLFRTLEFRDIQGPGNPQCFSLRTEQGTVLIGSEHGLIEVDPVSREVKNEVSLVAEGFLPEDGSGRIVGVQDLLDQESVCVATASGDVILCSLSTQQLECVGSVASGISVMSWSPDQELVLLATGQQTLIMMTKDFEPILEQQIHQDDFGESKFITVGWGRKETQFHGSEGRQAAFQMQMHESALPWDDHRPQVTWRGDGQFFAVSVVCPETGARKVRVWNREFALQSTSEPVAGLGPALAWKPSGSLIASTQDKPNQQDIVFFEKNGLLHGHFTLPFLKDEVKVNDLLWNADSSVLAVWLEDLQREESSIPKTCVQLWTVGNYHWYLKQSLSFSTCGKSKIVSLMWDPVTPYRLHVLCQGWHYLAYDWHWTTDRSVGDNSSDLSNVAVIDGNRVLVTVFRQTVVPPPMCTYQLLFPHPVNQVTFLAHPQKSNDLAVLDASNQISVYKCGDCPSADPTVKLGAVGGSGFKVCLRTPHLEKRYKIQFENNEDQDVNPLKLGLLTWIEEDVFLAVSHSEFSPRSVIHHLTAASSEMDEEHGQLNVSSSAAVDGVIISLCCNSKTKSVVLQLADGQIFKYLWESPSLAIKPWKNSGGFPVRFPYPCTQTELAMIGEEECVLGLTDRCRFFINDIEVASNITSFAVYDEFLLLTTHSHTCQCFCLRDASFKTLQAGLSSNHVSHGEVLRKVERGSRIVTVVPQDTKLVLQMPRGNLEVVHHRALVLAQIRKWLDKLMFKEAFECMRKLRINLNLIYDHNPKVFLGNVETFIKQIDSVNHINLFFTELKEEDVTKTMYPAPVTSSVYLSRDPDGNKIDLVCDAMRAVMESINPHKYCLSILTSHVKKTTPELEIVLQKVHELQGNAPSDPDAVSAEEALKYLLHLVDVNELYDHSLGTYDFDLVLMVAEKSQKDPKEYLPFLNTLKKMETNYQRFTIDKYLKRYEKAIGHLSKCGPEYFPECLNLIKDKNLYNEALKLYSPSSQQYQDISIAYGEHLMQEHMYEPAGLMFARCGAHEKALSAFLTCGNWKQALCVAAQLNFTKDQLVGLGRTLAGKLVEQRKHIDAAMVLEECAQDYEEAVLLLLEGAAWEEALRLVYKYNRLDIIETNVKPSILEAQKNYMAFLDSQTATFSRHKKRLLVVRELKEQAQQAGLDDEVPHGQESDLFSETSSVVSGSEMSGKYSHSNSRISARSSKNRRKAERKKHSLKEGSPLEDLALLEALSEVVQNTENLKDEVYHILKVLFLFEFDEQGRELQKAFEDTLQLMERSLPEIWTLTYQQNSATPVLGPNSTANSIMASYQQQKTSVPVLDAELFIPPKINRRTQWKLSLLD

SEQ ID NO: 754 - protein, 1308 aa, Homo sapiens
MRNLKLFRTLEFRDIQGPGNPQCFSLRTEQGTVLIGSEHGLIEVDPVSREVKNEVSLVAEGFLPEDGSGRIVGVQDLLDQESVCVATASGDVILCSLSTQQLECVGSVASGISVMSWSPDQELVLLATGQQTLIMMTKDFEPILEQQIHQDDFGESKFITVGWGRKETQFHGSEGRQAAFQMQMHESALPWDDHRPQVTWRGDGQFFAVSVVCPETGARKVRVWNREFALQSTSEPVAGLGPALAWKPSGSLIASTQDKPNQQDIVFFEKNGLLHGHFTLPFLKDEVKVNDLLWNADSSVLAVWLEDLQREESSIPKTCVQLWTVGNYHWYLKQSLSFSTCGKSKIVSLMWDPVTPYRLHVLCQGWHYLAYDWHWTTDRSVGDNSSDLSNVAVIDGNRVLVTVFRQTVVPPPMCTYQLLFPHPVNQVTFLAHPQKSNDLAVLDASNQISVYKCGDCPSADPTVKLGAVGGSGFKVCLRTPHLEKRYKIQFENNEDQDVNPLKLGLLTWIEEDVFLAVSHSEFSPRSVIHHLTAASSEMDEEHGQLNVSSSAAVDGVIISLCCNSKTKSVVLQLADGQIFKYLWESPSLAIKPWKNSGGFPVRFPYPCTQTELAMIGEEECVLGLTDRCRFFINDIEVASNITSFAVYDEFLLLTTHSHTCQCFCLRDASFKTLQAGLSSNHVSHGEVLRKVERGSRIVTVVPQDTKLVLQMPRGNLEVVHHRALVLAQIRKWLDKLMFKEAFECMRKLRINLNLIYDHNPKVFLGNVETFIKQIDSVNHINLFFTELKEEDVTKTMYPAPVTSSVYLSRDPDGNKIDLVCDAMRAVMESINPHKYCLSILTSHVKKTTPELEIVLQKVHELQGNAPSDPDAVSAEEALKYLLHLVDVNELYDHSLGTYDFDLVLMVAEKSQKDPKEYLPFLNTLKKMETNYQRFTIDKYLKRYEKAIGHLSKCGPEYFPECLNLIKDKNLYNEALKLYSPSSQQYQDISIAYGEHLMQEHMYEPAGLMFARCGAHEKALSAFLTCGNWKQALCVAAQLNFTKDQLVGLGRTLAEAVLLLLEGAAWEEALRLVYKYNRLDIIETNVKPSILEAQKNYMAFLDSQTATFSRHKKRLLVVRELKEQAQQAGLDDEVPHGQESDLFSETSSVVSGSEMSGKYSHSNSRISARSSKNRRKAERKKHSLKEGSPLEDLALLEALSEVVQNTENLKDEVYHILKVLFLFEFDEQGRELQKAFEDTLQLMERSLPEIWTLTYQQNSATPVLGPNSTANSIMASYQQQKTSVPVLDAELFIPPKINRRTQWKLSLLD

SEQ ID NO: 755 - protein, 1413 aa, Homo sapiens
MATSGAATPALRDPSASSAQPGLGVLFRRTARVVRTRAALRSAALQRFPLEGASILGGLVPSEREREPRTETRAQFGADSGCGLWELTLGSRLRVAGEARPDAPLFGGPQLYLSRGNHFIMRNLKLFRTLEFRDIQGPGNPQCFSLRTEQGTVLIGSEHGLIEVDPVSREVKNEVSLVAEGFLPEDGSGRIVGVQDLLDQESVCVATASGDVILCSLSTQQLECVGSVASGISVMSWSPDQELVLLATGQQTLIMMTKDFEPILEQQIHQDDFGESKFITVGWGRKETQFHGSEGRQAAFQMQMHESALPWDDHRPQVTWRGDGQFFAVSVVCPETGARKVRVWNREFALQSTSEPVAGLGPALAWKPSGSLIASTQDKPNQQDIVFFEKNGLLHGHFTLPFLKDEVKVNDLLWNADSSVLAVWLEDLQREESSIPKTCVQLWTVGNYHWYLKQSLSFSTCGKSKIVSLMWDPVTPYRLHVLCQGWHYLAYDWHWTTDRSVGDNSSDLSNVAVIDGNRVLVTVFRQTVVPPPMCTYQLLFPHPVNQVTFLAHPQKSNDLAVLDASNQISVYKCGDCPSADPTVKLGAVGGSGFKVCLRTPHLEKRYKIQFENNEDQDVNPLKLGLLTWIEEDVFLAVSHSEFSPRSVIHHLTAASSEMDEEHGQLNVSSSAAVDGVIISLCCNSKTKSVVLQLADGQIFKYLWESPSLAIKPWKNSGGFPVRFPYPCTQTELAMIGEEECVLGLTDRCRFFINDIEVASNITSFAVYDEFLLLTTHSHTCQCFCLRDASFKTLQAGLSSNHVSHGEVLRKVERGSRIVTVVPQDTKLVLQMPRGNLEVVHHRALVLAQIRKWLDKEEDVTKTMYPAPVTSSVYLSRDPDGNKIDLVCDAMRAVMESINPHKYCLSILTSHVKKTTPELEIVLQKVHELQGNAPSDPDAVSAEEALKYLLHLVDVNELYDHSLGTYDFDLVLMVAEKSQKDPKEYLPFLNTLKKMETNYQRFTIDKYLKRYEKAIGHLSKCGPEYFPECLNLIKDKNLYNEALKLYSPSSQQYQDISIAYGEHLMQEHMYEPAGLMFARCGAHEKALSAFLTCGNWKQALCVAAQLNFTKDQLVGLGRTLAGKLVEQRKHIDAAMVLEECAQDYEEAVLLLLEGAAWEEALRLVYKYNRLDIIETNVKPSILEGEGSILDRIPHLEEAQKNYMAFLDSQTATFSRHKKRLLVVRELKEQAQQAGLDDEVPHGQESDLFSETSSVVSGSEMSGKYSHSNSRISARSSKNRRKAERKKHSLKEGSPLEDLALLEALSEVVQNTENLKDEVYHILKVLFLFEFDEQGRELQKAFEDTLQLMERSLPEIWTLTYQQNSATPVLGPNSTANSIMASYQQQKTSVPVLDAELFIPPKINRRTQWKLSLLD

SEQ ID NO: 756 - protein, 1115 aa, Homo sapiens [sequence omitted]

SEQ ID NO: 757 - protein, 747 aa, Homo sapiens
MWGFLKRPVVVTADINLSLVALTGMGLLSRLWRLTYPRAVVFDEVYYGQYISFYMKQIFFLDDSGPPFGHMVLALGGYLGGFDGNFLWNRIGAEYSSNVPVWSLRLLPALAGALSVPMAYQIVLELHFSHCAAMGAALLMLIENALITQSRLMLLESVLIFFNLLAVLSYLKFFNCQKHSPFSLSWWFWLTLTGVACSCAVGIKYMGVFTYVLVLGVAAVHAWHLLGDQTLSNVGADVQCCMRPACMGQMRMSQGVCVFCHLLARAVALLVIPVVLYLLFFYVHLILVFRSGPHDQIMSSAFQASLEGGLARITQGQPLEVAFGSQVTLRNVFGKPVPCWLHSHQDTYPMIYENGRGSSHQQQVTCYPFKDVNNWWIVKDPRRHQLVVSSPPRPVRHGDMVQLVHGMTTRSLNTHDVAAPLSPHSQEVSCYIDYNISMPAQNLWRLEIVNRGSDTDVWKTILSEVRFVHVNTSAVLKLSGAHLPDWGYRQLEIVGEKLSRGYHGSTVWNVEEHRYGASQEQRERERELHSPAQVDVSRNLSFMARFSELQWRMLALRSDDSEHKYSSSPLEWVTLDTNIAYWLHPRTSAQIHLLGNIVIWVSGSLALAIYALLSLWYLLRRRRNVHDLPQDAWLRWVLAGALCAGGWAVNYLPFFLMEKTLFLYHYLPALTFQILLLPVVLQHISDHLCRSQLQRSIFSALVVAWYSSACHVSNTLRPLTYGDKSLSPHELKALRWKDSWDILIRKH

SEQ ID NO: 758 - protein, 747 aa, Homo sapiens; identical to SEQ ID NO: 757

SEQ ID NO: 759 - protein, 747 aa, Homo sapiens; identical to SEQ ID NO: 757

SEQ ID NO: 760 - protein, 725 aa, Homo sapiens
MWGFLKRPVVVTADINLSLVALTGMGLLSRLWRLTYPRAVVFDEVYYGQYISFYMKQIFFLDDSGPPFGHMVLALGGYLGGFDGNFLWNRIGAEYSSNVPVWSLRLLPALAGALSVPMAYQIVLELHFSHCAAMGAALLMLIENALITQSRLMLLESVLIFFNLLAVLSYLKFFNCQKHSPFSLSWWFWLTLTGVACSCAVGIKYMGVFTYVLVLGVAAVHAWHLLGDQTLSNVCVFCHLLARAVALLVIPVVLYLLFFYVHLILVFRSGPHDQIMSSAFQASLEGGLARITQGQPLEVAFGSQVTLRNVFGKPVPCWLHSHQDTYPMIYENGRGSSHQQQVTCYPFKDVNNWWIVKDPRRHQLVVSSPPRPVRHGDMVQLVHGMTTRSLNTHDVAAPLSPHSQEVSCYIDYNISMPAQNLWRLEIVNRGSDTDVWKTILSEVRFVHVNTSAVLKLSGAHLPDWGYRQLEIVGEKLSRGYHGSTVWNVEEHRYGASQEQRERERELHSPAQVDVSRNLSFMARFSELQWRMLALRSDDSEHKYSSSPLEWVTLDTNIAYWLHPRTSAQIHLLGNIVIWVSGSLALAIYALLSLWYLLRRRRNVHDLPQDAWLRWVLAGALCAGGWAVNYLPFFLMEKTLFLYHYLPALTFQILLLPVVLQHISDHLCRSQLQRSIFSALVVAWYSSACHVSNTLRPLTYGDKSLSPHELKALRWKDSWDILIRKH

SEQ ID NO: 761 - protein, 450 aa, Homo sapiens
MSSAFQASLEGGLARITQGQPLEVAFGSQVTLRNVFGKPVPCWLHSHQDTYPMIYENGRGSSHQQQVTCYPFKDVNNWWIVKDPRRHQLVVSSPPRPVRHGDMVQLVHGMTTRSLNTHDVAAPLSPHSQEVSCYIDYNISMPAQNLWRLEIVNRGSDTDVWKTILSEVRFVHVNTSAVLKLSGAHLPDWGYRQLEIVGEKLSRGYHGSTVWNVEEHRYGASQEQRERERELHSPAQVDVSRNLSFMARFSELQWRMLALRSDDSEHKYSSSPLEWVTLDTNIAYWLHPRTSAQIHLLGNIVIWVSGSLALAIYALLSLWYLLRRRRNVHDLPQDAWLRWVLAGALCAGGWAVNYLPFFLMEKTLFLYHYLPALTFQILLLPVVLQHISDHLCRSQLQRSIFSALVVAWYSSACHVSNTLRPLTYGDKSLSPHELKALRWKDSWDILIRKH

SEQ ID NO: 762 - protein, 747 aa, Homo sapiens; identical to SEQ ID NO: 757

SEQ ID NO: 763 - protein, 693 aa, Homo sapiens
MKQIFFLDDSGPPFGHMVLALGGYLGGFDGNFLWNRIGAEYSSNVPVWSLRLLPALAGALSVPMAYQIVLELHFSHCAAMGAALLMLIENALITQSRLMLLESVLIFFNLLAVLSYLKFFNCQKHSPFSLSWWFWLTLTGVACSCAVGIKYMGVFTYVLVLGVAAVHAWHLLGDQTLSNVGADVQCCMRPACMGQMRMSQGVCVFCHLLARAVALLVIPVVLYLLFFYVHLILVFRSGPHDQIMSSAFQASLEGGLARITQGQPLEVAFGSQVTLRNVFGKPVPCWLHSHQDTYPMIYENGRGSSHQQQVTCYPFKDVNNWWIVKDPRRHQLVVSSPPRPVRHGDMVQLVHGMTTRSLNTHDVAAPLSPHSQEVSCYIDYNISMPAQNLWRLEIVNRGSDTDVWKTILSEVRFVHVNTSAVLKLSGAHLPDWGYRQLEIVGEKLSRGYHGSTVWNVEEHRYGASQEQRERERELHSPAQVDVSRNLSFMARFSELQWRMLALRSDDSEHKYSSSPLEWVTLDTNIAYWLHPRTSAQIHLLGNIVIWVSGSLALAIYALLSLWYLLRRRRNVHDLPQDAWLRWVLAGALCAGGWAVNYLPFFLMEKTLFLYHYLPALTFQILLLPVVLQHISDHLCRSQLQRSIFSALVVAWYSSACHVSNTLRPLTYGDKSLSPHELKALRWKDSWDILIRKH

SEQ ID NO: 764 - protein, 348 aa, Homo sapiens
MVQLVHGMTTRSLNTHDVAAPLSPHSQEVSCYIDYNISMPAQNLWRLEIVNRGSDTDVWKTILSEVRFVHVNTSAVLKLSGAHLPDWGYRQLEIVGEKLSRGYHGSTVWNVEEHRYGASQEQRERERELHSPAQVDVSRNLSFMARFSELQWRMLALRSDDSEHKYSSSPLEWVTLDTNIAYWLHPRTSAQIHLLGNIVIWVSGSLALAIYALLSLWYLLRRRRNVHDLPQDAWLRWVLAGALCAGGWAVNYLPFFLMEKTLFLYHYLPALTFQILLLPVVLQHISDHLCRSQLQRSIFSALVVAWYSSACHVSNTLRPLTYGDKSLSPHELKALRWKDSWDILIRKH

SEQ ID NO: 765 - protein, 277 aa, Homo sapiens
MASAGGEDCESPAPEADRPHQRPFLIGVSGGTASGKSTVCEKIMELLGQNEVEQRQRKVVILSQDRFYKVLTAEQKAKALKGQYNFDHPDAFDNDLMHRTLKNIVEGKTVEVPTYDFVTHSRLPETTVVYPADVVLFEGILVFYSQEIRDMFHLRLFVDTDSDVRLSRRVLRDVRRGRDLEQILTQYTTFVKPAFEEFCLPTKKYADVIIPRGVDNMVAINLIVQHIQDILNGDICKWHRGGSNGRSYKRTFSEPGDHPGMLTSGKRSHLESSSRPH

SEQ ID NO: 766 - protein, 201 aa, Homo sapiens
MASAGGEDCESPAPEADRPHQRPFLIGVSGGTASGKSTVCEKIMELLGQNEVEQRQRKVVILSQDRFYKVLTAEQKAKALKGQYNFDHPDAFDNDLMHRTLKNIVEGKTVEVPTYDFVTHSRLPETTVVYPADVVLFEGILVFYSQEIRDMFHLRLFVDTDSDVRLSRRDKEVCRCDHPARSGQYGCHQPDRAAHPGHSEW

SEQ ID NO: 767 - protein, 1487 aa, Homo sapiens
MVKLDIHTLAHHLKQERLYVNSEKQLIQRLNADVLKTAEKLYRTAWIAKQQRINLDRLIITSAEASPAECCQHAKILEDTQFVDGYKQLGFQETAYGEFLSRLRENPRLIASSLVAGEKLNQENTQSVIYTVFTSLYGNCIMQEDESYLLQVLRYLIEFELKESDNPRRLLRRGTCAFSILFKLFSEGLFSAKLFLTATLHEPIMQLLVEDEDHLETDPNKLIERFSPSQQEKLFGEKGSDRFRQKVQEMVESNEAKLVALVNKFIGYLKQNTYCFPHSLRWIVSQMYKTLSCVDRLEVGEVRAMCTDLLLACFICPAVVNPEQYGIISDAPINEVARFNLMQVGRLLQQLAMTGSEEGDPRTKSSLGKFDKSCVAAFLDVVIGGRAVETPPLSSVNLLEGLSRTVVYITYSQLITLVNFMKSVMSGDQLREDRMALDNLLANLPPAKPGKSSSLEMTPYNTPQLSPATTPANKKNRLPIATRSRSRTNMLMDLHMDHEGSSQETIQEVQPEEVLVISLGTGPQLTPGMMSENEVLNMQLSDGGQGDVPVDENKLHGKPDKTLRFSLCSDNLEGISEGPSNRSNSVSSLDLEGESVSELGAGPSGSNGVEALQLLEHEQATTQDNLDDKLRKFEIRDMMGLTDDRDISETVSETWSTDVLGSDFDPNIDEDRLQEIAGAAAENMLGSLLCLPGSGSVLLDPCTGSTISETTSEAWSVEVLPSDSEAPDLKQEERLQELESCSGLGSTSDDTDVREVSSRPSTPGLSVVSGISATSEDIPNKIEDLRSECSSDFGGKDSVTSPDMDEITHDFLYILQPKQHFQHIEAEADMRIQLSSSAHQLTSPPSQSESLLAMFDPLSSHEGASAVVRPKVHYARPSHPPPDPPILEGAVGGNEARLPNFGSHVLTPAEMEAFKQRHSYPERLVRSRSSDIVSSVRRPMSDPSWNRRPGNEERELPPAAAIGATSLVAAPHSSSSSPSKDSSRGETEERKDSDDEKSDRNRPWWRKRFVSAMPKAPIPFRKKEKQEKDKDDLGPDRFSTLTDDPSPRLSAQAQVAEDILDKYRNAIKRTSPSDGAMANYESTEVMGDGESAHDSPRDEALQNISADDLPDSASQAAHPQDSAFSYRDAKKKLRLALCSADSVAFPVLTHSTRNGLPDHTDPEDNEIVCFLKVQIAEAINLQDKNLMAQLQETMRCVCRFDNRTCRKLLASIAEDYRKRAPYIAYLTRCRQGLQTTQAHLERLLQRVLRDKEVANRYFTTVCVRLLLESKEKKIREFIQDFQKLTAADDKTAQVEDFLQFLYGAMAQDVIWQNASEEQLQDAQLAIERSVMNRIFKLAFYPNQDGDILRDQVLHEHIQRLSKVVTANHRALQIPEVYLREAPWPSAQSEIRTISAYKTPRDKVQCILRMCSTIMNLLSLANEDSVPGADDFVPVLVFVLIKANPPCLLSTVQYISSFYASCLSGEESYWWMQFTAAVEFIKTIDDRK

SEQ ID NO: 768 - protein, 1460 aa, Homo sapiens
MVKLDIHTLAHHLKQERLYVNSEKQLIQRLNADVLKTAEKLYRTAWIAKQQRINLDRLIITSAEASPAECCQHAKILEDTQFVDGYKQLGFQETAYGEFLSRLRENPRLIASSLVAGEKLNQENTQSVIYTVFTSLYGNCIMQEDESYLLQVLRYLIEFELKESDNPRRLLRRGTCAFSILFKLFSEGLFSAKLFLTATLHEPIMQLLVEDEDHLETDPNKLIERFSPSQQEKLFGEKGSDRFRQKVQEMVESNEAKLVALVNKFIGYLKQNTYCFPHSLRWIVSQMYKTLSCVDRLEVGEVRAMCTDLLLACFICPAVVNPEQYGIISDAPINEVARFNLMQVGRLLQQLAMTGSEEGDPRTKSSLGKFDKSCVAAFLDVVIGGRAVETPPLSSVNLLEGLSRTVVYITYSQLITLVNFMKSVMSGDQLREDRMALDNLLANLPPAKPGKSSSLEMTPYNTPQLSPATTPANKKNRLPIATRSRSRTNMLMDLHMDHEGSSQETIQEVQPEEVLVISLGTGPQLTPGMMSENEVLNMQLSDGGQGDVPVDENKLHGKPDKTLRFSLCSDNLEGISEGPSNRSNSVSSLDLEGESVSELGAGPSGSNGVEALQLLEHEQATTQDNLDDKLRKFEIRDMMGLTDDRDISETVSETWSTDVLGSDFDPNIDEDRLQEIAGAAAENMLGSLLCLPGSGSVLLDPCTGSTISETTSEAWSVEVLPSDSEAPDLKQEERLQELESCSGLGSTSDDTDVREVSSRPSTPGLSVVSGISATSEDIPNKIEDLRSECSSDFGGKDSVTSPDMDEITHGAHQLTSPPSQSESLLAMFDPLSSHEGASAVVRPKVHYARPSHPPPDPPILEGAVGGNEARLPNFGSHVLTPAEMEAFKQRHSYPERLVRSRSSDIVSSVRRPMSDPSWNRRPGNEERELPPAAAIGATSLVAAPHSSSSSPSKDSSRGETEERKDSDDEKSDRNRPWWRKRFVSAMPKAPIPFRKKEKQEKDKDDLGPDRFSTLTDDPSPRLSAQAQVAEDILDKYRNAIKRTSPSDGAMANYESTEVMGDGESAHDSPRDEALQNISADDLPDSASQAAHPQDSAFSYRDAKKKLRLALCSADSVAFPVLTHSTRNGLPDHTDPEDNEIVCFLKVQIAEAINLQDKNLMAQLQETMRCVCRFDNRTCRKLLASIAEDYRKRAPYIAYLTRCRQGLQTTQAHLERLLQRVLRDKEVANRYFTTVCVRLLLESKEKKIREFIQDFQKLTAADDKTAQVEDFLQFLYGAMAQDVIWQNASEEQLQDAQLAIERSVMNRIFKLAFYPNQDGDILRDQVLHEHIQRLSKVVTANHRALQIPEVYLREAPWPSAQSEIRTISAYKTPRDKVQCILRMCSTIMNLLSLANEDSVPGADDFVPVLVFVLIKANPPCLLSTVQYISSFYASCLSGEESYWWMQFTAAVEFIKTIDDRK

SEQ ID NO: 769 - protein, 1487 aa, Homo sapiens; identical to SEQ ID NO: 767

SEQ ID NO: 770 - protein, 1433 aa, Homo sapiens
MVKLDIHTLAHHLKQERLYVNSEKQLIQRLNADVLKTAEKLYRTAWIAKQQRINLDRLIITSAEASPAECCQHAKILEDTQFVDGYKQLGFQETAYGEFLSRLRENPRLIASSLVAGEKLNQENTQSVIYTVFTSLYGNCIMQEDESYLLQVLRYLIEFELKESDNPRRLLRRGTCAFSILFKLFSEGLFSAKLFLTATLHEPIMQLLVEDEDHLETDPNKLIERFSPSQQEKLFGEKGSDRFRQKVQEMVESNEAKLVALVNKFIGYLKQNTYCFPHSLRWIVSQMYKTLSCVDRLEVGEVRAMCTDLLLACFICPAVVNPEQYGIISDAPINEVARFNLMQVGRLLQQLAMTGSEEGDPRTKSSLGKFDKSCVAAFLDVVIGGRAVETPPLSSVNLLEGLSRTVVYITYSQLITLVNFMKSVMSGDQLREDRMALDNLLANLPPAKPGKSSSLEMTPYNTPQLSPATTPANKKNRLPIATRSRSRTNMLMDLHMDHEGSSQETIQEVQPEEVLVISLGTGPQLTPGMMSENEVLNMQLSDGGQGDVPVDENKLHGKPDKTLRFSLCSDNLEGISEGPSNRSNSVSSLDLEGESVSELGAGPSGSNGVEALQLLEHEQATTQDNLDDKLRKFEIRDMMGLTDDRDISETVSETWSTDVLGSDFDPNIDEDRLQEIAGAAAENMLGSLLCLPGSGSVLLDPCTGSTISETTSEAWSVEVLPSDSEAPDLKQEERLQELESCSGLGSTSDDTDVREVSSRPSTPGLSVVSGISATSEDIPNKIEDLRSECSSDFGGKDSVTSPDMDEITHGAHQLTSPPSQSESLLAMFDPLSSHEGASAVVRPKVHYARPSHPPPDPPILEGAVGGNEARLPNFGSHVLTPAEMEAFKQRHSYPERLVRSRSSDIVSSVRRPMSDPSWNRRPGNEERELPPAAAIGATSLVAAPHSSSSSPSKDSSRGETEERKDSDDEKSDRNRPWWRKRFVSAMPKDDPSPRLSAQAQVAEDILDKYRNAIKRTSPSDGAMANYESTEVMGDGESAHDSPRDEALQNISADDLPDSASQAAHPQDSAFSYRDAKKKLRLALCSADSVAFPVLTHSTRNGLPDHTDPEDNEIVCFLKVQIAEAINLQDKNLMAQLQETMRCVCRFDNRTCRKLLASIAEDYRKRAPYIAYLTRCRQGLQTTQAHLERLLQRVLRDKEVANRYFTTVCVRLLLESKEKKIREFIQDFQKLTAADDKTAQVEDFLQFLYGAMAQDVIWQNASEEQLQDAQLAIERSVMNRIFKLAFYPNQDGDILRDQVLHEHIQRLSKVVTANHRALQIPEVYLREAPWPSAQSEIRTISAYKTPRDKVQCILRMCSTIMNLLSLANEDSVPGADDFVPVLVFVLIKANPPCLLSTVQYISSFYASCLSGEESYWWMQFTAAVEFIKTIDDRK

SEQ ID NO: 771 - protein, 1433 aa, Homo sapiens; identical to SEQ ID NO: 770

SEQ ID NO: 772 - protein, 1434 aa, Homo sapiens
MVKLDIHTLAHHLKQERLYVNSEKQLIQRLNADVLKTAEKLYRTAWIAKQQRINLDRLIITSAEASPAECCQHAKILEDTQFVDGYKQLGFQETAYGEFLSRLRENPRLIASSLVAGEKLNQENTQSVIYTVFTSLYGNCIMQEDESYLLQVLRYLIEFELKESDNPRRLLRRGTCAFSILFKLFSEGLFSAKLFLTATLHEPIMQLLVEDEDHLETDPNKLIERFSPSQQEKLFGEKGSDRFRQKVQEMVESNEAKLVALVNKFIGYLKQNTYCFPHSLRWIVSQMYKTLSCVDRLEVGEVRAMCTDLLLACFICPAVVNPEQYGIISDAPINEVARFNLMQVGRLLQQLAMTGSEEGDPRTKSSLGKFDKSCVAAFLDVVIGGRAVETPPLSSVNLLEGLSRTVVYITYSQLITLVNFMKSVMSGDQLREDRMALDNLLANLPPAKPGKSSSLEMTPYNTPQLSPATTPANKKNRLPIATRSRSRTNMLMDLHMDHEGSSQETIQEVQPEEVLVISLGTGPQLTPGMMSENEVLNMQLSDGGQGDVPVDENKLHGKPDKTLRFSLCSDNLEGISEGPSNRSNSVSSLDLEGESVSELGAGPSGSNGVEALQLLEHEQATTQDNLDDKLRKFEIRDMMGLTDDRDISETVSETWSTDVLGSDFDPNIDEDRLQEIAGAAAENMLGSLLCLPGSGSVLLDPCTGSTISETTSEAWSVEVLPSDSEAPDLKQEERLQELESCSGLGSTSDDTDVREVSSRPSTPGLSVVSGISATSEDIPNKIEDLRSECSSDFGGKDSVTSPDMDEITHGASAVVRPKVHYARPSHPPPDPPILEGAVGGNEARLPNFGSHVLTPAEMEAFKQRHSYPERLVRSRSSDIVSSVRRPMSDPSWNRRPGNEERELPPAAAIGATSLVAAPHSSSSSPSKDSSRGETEERKDSDDEKSDRNRPWWRKRFVSAMPKAPIPFRKKEKQEKDKDDLGPDRFSTLTDDPSPRLSAQAQVAEDILDKYRNAIKRTSPSDGAMANYESTEVMGDGESAHDSPRDEALQNISADDLPDSASQAAHPQDSAFSYRDAKKKLRLALCSADSVAFPVLTHSTRNGLPDHTDPEDNEIVCFLKVQIAEAINLQDKNLMAQLQETMRCVCRFDNRTCRKLLASIAEDYRKRAPYIAYLTRCRQGLQTTQAHLERLLQRVLRDKEVANRYFTTVCVRLLLESKEKKIREFIQDFQKLTAADDKTAQVEDFLQFLYGAMAQDVIWQNASEEQLQDAQLAIERSVMNRIFKLAFYPNQDGDILRDQVLHEHIQRLSKVVTANHRALQIPEVYLREAPWPSAQSEIRTISAYKTPRDKVQCILRMCSTIMNLLSLANEDSVPGADDFVPVLVFVLIKANPPCLLSTVQYISSFYASCLSGEESYWWMQFTAAVEFIKTIDDRK

SEQ ID NO: 773 - protein, 1487 aa, Homo sapiens; identical to SEQ ID NO: 767

SEQ ID NO: 774 - protein, 1460 aa, Homo sapiens; identical to SEQ ID NO: 768

SEQ ID NO: 775 - protein, 2201 aa, Homo sapiens [sequence omitted]

SEQ ID NO: 776 - protein, 2201 aa, Homo sapiens [sequence omitted]

SEQ ID NO: 777 - protein, 2201 aa, Homo sapiens [sequence omitted]

SEQ ID NO: 778 - protein, 1000 aa, Homo sapiens [sequence omitted]

SEQ ID NO: 779 - protein, 1000 aa, Homo sapiens [sequence omitted]

SEQ ID NO: 780 - protein, 1388 aa, Homo sapiens
MAPRRNNGQCWCLLMLLSVSTPLPAVTQTRGATETASQGHLDLTQLIGVPLPSSVSFVTGYGGFPAYSFGPGANVGRPARTLIPSTFFRDFAISVVVKPSSTRGGVLFAITDAFQKVIYLGLRLSGVEDGHQRIILYYTEPGSHVSQEAAAFSVPVMTHRWNRFAMIVQGEEVTLLVNCEEHSRIPFQRSSQALAFESSAGIFMGNAGATGLERFTGSLQQLTVHPDPRTPEELCDPEESSASGETSGLQEADGVAEILEAVTYTQASPKEAKVEPINTPPTPSSPFEDMELSGEPVPEGTLETTNMSIIQHSSPKQGSGEILNDTLEGVHSVDGDPITDSGSGAGAFLDIAEEKNLAATAAGLAEVPISTAGEAEASSVPTGGPTLSMSTENPEEGVTPGPDNEERLAATAAGEAEALASMPGEVEASGVAPGELDLSMSAQSLGEEATVGPSSEDSLTTAAAATEVSLSTFEDEEASGVPTDGLAPLTATMAPERAVTSGPGDEEDLAAATTEEPLITAGGEESGSPPPDGPPLPLPTVAPERWITPAQREHVGMKGQAGPKGEKGDAGEELPGPPEPSGPVGPTAGAEAEGSGLGWGSDVGSGSGDLVGSEQLLRGPPGPPGPPGLPGIPGKPGTDVFMGPPGSPGEDGPAGEPGPPGPEGQPGVDGATGLPGMKGEKGARGPNGSVGEKGDPGNRGLPGPPGKKGQAGPPGVMGPPGPPGPPGPPGPGCTMGLGFEDTEGSGSTQLLNEPKLSRPTAAIGLKGEKGDRGPKGERGMDGASIVGPPGPRGPPGHIKVLSNSLINITHGFMNFSDIPELVGPPGPDGLPGLPGFPGPRGPKGDTGLPGFPGLKGEQGEKGEPGAILTEDIPLERLMGKKGEPGMHGAPGPMGPKGPPGHKGEFGLPGRPGRPGLNGLKGTKGDPGVIMQGPPGLPGPPGPPGPPGAVINIKGAIFPIPVRPHCKMPVDTAHPGSPELITFHGVKGEKGSWGLPGSKGEKGDQGAQGPPGPPLDLAYLRHFLNNLKGENGDKGFKGEKGEKGDINGSFLMSGPPGLPGNPGPAGQKGETVVGPQGPPGAPGLPGPPGFGRPGDPGPPGPPGPPGPPAILGAAVALPGPPGPPGQPGLPGSRNLVTAFSNMDDMLQKAHLVIEGTFIYLRDSTEFFIRVRDGWKKLQLGELIPIPADSPPPPALSSNPHQLLPPPNPISSANYEKPALHLAALNMPFSGDIRADFQCFKQARAAGLLSTYRAFLSSHLQDLSTIVRKAERYSLPIVNLKGQVLFNNWDSIFSGHGGQFNMHIPIYSFDGRDIMTDPSWPQKVIWHGSSPHGVRLVDNYCEAWRTADTAVTGLASPLSTGKILDQKAYSCANRLIVLCIENSFMTDARK

SEQ ID NO: 781 - protein, 1374 aa, Homo sapiens [sequence omitted]

SEQ ID NO: 782 - protein, 826 aa, Homo sapiens [sequence omitted]

SEQ ID NO: 783 - protein, 1388 aa, Homo sapiens; identical to SEQ ID NO: 780

SEQ ID NO: 784 - protein, 481 aa, Homo sapiens [sequence omitted]

SEQ ID NO: 785 - protein, 1676 aa, Homo sapiens
MGLLGILCFLIFLGKTWGQEQTYVISAPKIFRVGASENIVIQVYGYTEAFDATISIKSYPDKKFSYSSGHVHLSSENKFQNSAILTIQPKQLPGGQNPVSYVYLEVVSKHFSKSKRMPITYDNGFLFIHTDKPVYTPDQSVKVRVYSLNDDLKPAKRETVLTFIDPEGSEVDMVEEIDHIGIISFPDFKIPSNPRYGMWTIKAKYKEDFSTTGTAYFEVKEYVLPHFSVSIEPEYNFIGYKNFKNFEITIKARYFYNKVVTEADVYITFGIREDLKDDQKEMMQTAMQNTMLINGIAQVTFDSETAVKELSYYSLEDLNNKYLYIAVTVIESTGGFSEEAEIPGIKYVLSPYKLNLVATPLFLKPGIPYPIKVQVKDSLDQLVGGVPVTLNAQTIDVNQETSDLDPSKSVTRVDDGVASFVLNLPSGVTVLEFNVKTDAPDLPEENQAREGYRAIAYSSLSQSYLYIDWTDNHKALLVGEHLNIIVTPKSPYIDKITHYNYLILSKGKIIHFGTREKFSDASYQSINIPVTQNMVPSSRLLVYYIVTGEQTAELVSDSVWLNIEEKCGNQLQVHLSPDADAYSPGQTVSLNMATGMDSWVALAAVDSAVYGVQRGAKKPLERVFQFLEKSDLGCGAGGGLNNANVFHLAGLTFLTNANADDSQENDEPCKEILRPRRTLQKKIEEIAAKYKHSVVKKCCYDGACVNNDETCEQRAARISLGPRCIKAFTECCVVASQLRANISHKDMQLGRLHMKTLLPVSKPEIRSYFPESWLWEVHLVPRRKQLQFALPDSLTTWEIQGIGISNTGICVADTVKAKVFKDVFLEMNIPYSVVRGEQIQLKGTVYNYRTSGMQFCVKMSAVEGICTSESPVIDHQGTKSSKCVRQKVEGSSSHLVTFTVLPLEIGLHNINFSLETWFGKEILVKTLRVVPEGVKRESYSGVTLDPRGIYGTISRRKEFPYRIPLDLVPKTEIKRILSVKGLLVGEILSAVLSQEGINILTHLPKGSAEAELMSVVPVFYVFHYLETGNHWNIFHSDPLIEKQKLKKKLKEGMLSIMSYRNADYSYSVWKGGSASTWLTAFALRVLGQVNKYVEQNQNSICNSLLWLVENYQLDNGSFKENSQYQPIKLQGTLPVEARENSLYLTAFTVIGIRKAFDICPLVKIDTALIKADNFLLENTLPAQSTFTLAISAYALSLGDKTHPQFRSIVSALKREALVKGNPPIYRFWKDNLQHKDSSVPNTGTARMVETTAYALLTSLNLKDINYVNPVIKWLSEEQRYGGGFYSTQDTINAIEGLTEYSLLVKQLRLSMDIDVSYKHKGALHNYKMTDKNFLGRPVEVLLNDDLIVSTGFGSGLATVHVTTVVHKTSTSEEVCSFYLKIDTQDIEASHYRGYGNSDYKRIVACASYKPSREESSSGSSHAVMDISLPTGISANEEDLKALVEGVDQLFTDYQIKDGHVILQLNSIPSSDFLCVRFRIFELFEVGFLSPATFTVYEYHRPDKQCTMFYSTSNIKIQKVCEGAACKCVEADCGQMQEELDLTISAETRKQTACKPEIAYAYKVSITSITVENVFVKYKATLLDIYKTGEAVAEKDSEITFIKKVTCTNAELVKGRQYLIMGKEALQIKYNFSFRYIYPLDSLTWIEYWPRDTTCSSCQAFLANLDEFAEDIFLNGC

SEQ ID NO: 786 - protein, 1190 aa, Homo sapiens [sequence omitted]

SEQ ID NO: 787 - protein, 1190 aa, Homo sapiens [sequence omitted]

SEQ ID NO: 788 - protein, 1043 aa, Homo sapiens [sequence omitted]

SEQ ID NO: 789 - protein, 1116 aa, Homo sapiens
MPVRGDRGFPPRRELSGWLRAPGMEELIWEQYTVTLQKDSKRGFGIAVSGGRDNPHFENGETSIVISDVLPGGPADGLLQENDRVVMVNGTPMEDVLHSFAVQQLRKSGKVAAIVVKRPRKVQVAALQASPPLDQDDRAFEVMDEFDGRSFRSGYSERSRLNSHGGRSRSWEDSPERGRPHERARSRERDLSRDRSRGRSLERGLDQDHARTRDRSRGRSLERGLDHDFGPSRDRDRDRSRGRSIDQDYERAYHRAYDPDYERAYSPEYRRGARHDARSRGPRSRSREHPHSRSPSPEPRGRPGPIGVLLMKSRANEEYGLRLGSQIFVKEMTRTGLATKDGNLHEGDIILKINGTVTENMSLTDARKLIEKSRGKLQLVVLRDSQQTLINIPSLNDSDSEIEDISEIESTRSFSPEERRHQYSDYDYHSSSEKLKERPSSREDTPSRLSRMGATPTPFKSTGDIAGTVVPETNKEPRYQEEPPAPQPKAAPRTFLRPSPEDEAIYGPNTKMVRFKKGDSVGLRLAGGNDVGIFVAGIQEGTSAEQEGLQEGDQILKVNTQDFRGLVREDAVLYLLEIPKGEMVTILAQSRADVYRDILACGRGDSFFIRSHFECEKETPQSLAFTRGEVFRVVDTLYDGKLGNWLAVRIGNELEKGLIPNKSRAEQMASVQNAQRDNAGDRADFWRMRGQRSGVKKNLRKSREDLTAVVSVSTKFPAYERVLLREAGFKRPVVLFGPIADIAMEKLANELPDWFQTAKTEPKDAGSEKSTGVVRLNTVRQVIEQDKHALLDVTPKAVDLLNYTQWFSIVISFTPDSRQGVNTMRQRLDPTSNNSSRKLFDHANKLKKTCAHLFTATINLNSANDSWFGSLKDTIQHQQGEAVWVSEGKMEGMDDDPEDRMSYLTAMGADYLSCDSRLISDFEDTDGEGGAYTDNELDEPAEEPLVSSITRSSEPVQHEESIRKPSPEPRAQMRRAASSDQLRDNSPPPAFKPEPSKAKTQNKEESYDFSKSYEYKSNPSAVAGNETPGASTKGYPPPVAAKPTFGRSILKPSTPIPPQEGEEVGESSEEQDNAPKSVLGKVKIFGEDGSQGPGLQENAGAPGSTECKDRNCPEAS

SEQ ID NO: 790 - protein, 371 aa, Homo sapiens [sequence omitted]

SEQ ID NO: 791 - protein, 371 aa, Homo sapiens [sequence omitted]

SEQ ID NO: 792 - protein, 290 aa, Homo sapiens
MGLAIHTFPFAESESCRKEGTQMTPQHMEELAEQEIARLVLTDEEKSLLEKEGLILPETLPLTKTEEQILKRVRRKIRNKRSAQESRRKKKVYVGGLESRVLKYTAQNMELQNKVQLLEEQNLSLLDQLRKLQAMVIEISNKTSSSSTCILVLLVSFCLLLVPAMYSSDTRGSLPAEHGVLSRQLRALPSEDPYQLELPALQSEVPKDSTHQWLDGSDCVLQAPGNTSCLLHYMPQAPSAEPPLEWPFPDLFSEPLCRGPILPLQANLTRKGGWLPTGSPSVILQDRYSG

SEQ ID NO: 793 - protein, 1164 aa, Homo sapiens
MAQQANVGELLAMLDSPMLGVRDDVTAVFKENLNSDRGPMLVNTLVDYYLETSSQPALHILTTLQEPHDKHLLDRINEYVGKAATRLSILSLLGHVIRLQPSWKHKLSQAPLLPSLLKCLKMDTDVVVLTTGVLVLITMLPMIPQSGKQHLLDFFDIFGRLSSWCLKKPGHVAEVYLVHLHASVYALFHRLYGMYPCNFVSFLRSHYSMKENLETFEEVVKPMMEHVRIHPELVTGSKDHELDPRRWKRLETHDVVIECAKISLDPTEASYEDGYSVSHQISARFPHRSADVTTSPYADTQNSYGCATSTPYSTSRLMLLNMPGQLPQTLSSPSTRLITEPPQATLWSPSMVCGMTTPPTSPGNVPPDLSHPYSKVFGTTAGGKGTPLGTPATSPPPAPLCHSDDYVHISLPQATVTPPRKEERMDSARPCLHRQHHLLNDRGSEEPPGSKGSVTLSDLPGFLGDLASEEDSIEKDKEEAAISRELSEITTAEAEPVVPRGGFDSPFYRDSLPGSQRKTHSAASSSQGASVNPEPLHSSLDKLGPDTPKQAFTPIDLPCGSADESPAGDRECQTSLETSIFTPSPCKIPPPTRVGFGSGQPPPYDHLFEVALPKTAHHFVIRKTEELLKKAKGNTEEDGVPSTSPMEVLDRLIQQGADAHSKELNKLPLPSKSVDWTHFGGSPPSDEIRTLRDQLLLLHNQLLYERFKRQQHALRNRRLLRKVIKAAALEEHNAAMKDQLKLQEKDIQMWKVSLQKEQARYNQLQEQRDTMVTKLHSQIRQLQHDREEFYNQSQELQTKLEDCRNMIAELRIELKKANNKVCHTELLLSQVSQKLSNSESVQQQMEFLNRQLLVLGEVNELYLEQLQNKHSDTTKEVEMMKAAYRKELEKNRSHVLQQTQRLDTSQKRILELESHLAKKDHLLLEQKKYLEDVKLQARGQLQAAESRYEAQKRITQVFELEILDLYGRLEKDGLLKKLEEEKAEAAEAAEERLDCCNDGCSDSMVGHNEEASGHNGETKTPRPSSARGSSGSRGGGGSSSSSSELSTPEKPPHQRAGPFSSRWETTMGEASASIPTTVGSLPSSKSFLGMKARELFRNKSESQCDEDGMTSSLSESLKTELGKDLGVEAKIPLNLDGPHPSPPTPDSVGQLHIMDYNETHHEHS

SEQ ID NO: 794 - protein, 1164 aa, Homo sapiens; identical to SEQ ID NO: 793

SEQ ID NO: 795 - protein, 1164 aa, Homo sapiens; identical to SEQ ID NO: 793

SEQ ID NO: 796 - protein, 953 aa, Homo sapiens [sequence omitted]

SEQ ID NO: 797 - protein, 824 aa, Homo sapiens
MVQRMWAEAAGPAGGAEPLFPGSRRSRSVWDAVRLEVGVPDSCPVVLHSFTQLDPDLPRPESSTQEIGEELINGVIYSISLRKVQLHHGGNKGQRWLGYENESALNLYETCKVRTVKAGTLEKLVEHLVPAFQGSDLSYVTIFLCTYRAFTTTQQVLDLLFKRYGCILPYSDEDGGPQDQLKNAISSILGTWLDQYSEDFCQPPDFPCLKQLVAYVQLNMPGSDLERRAHLLLAQLEHSEPIEAEPEALSPVPALKPTPELELALTPARAPSPVPAPAPEPEPAPTPAPGSELEVAPAPAPELQQAPEPAVGLESAPAPALELEPAPEQDPAPSQTLELEPAPAPVPSLQPSWPSPVVAENGLSEEKPHLLVFPPDLVAEQFTLMDAELFKKVVPYHCLGSIWSQRDKKGKEHLAPTIRATVTQFNSVANCVITTCLGNRSTKAPDRARVVEHWIEVARECRILKNFSSLYAILSALQSNSIHRLKKTWEDVSRDSFRIFQKLSEIFSDENNYSLSRELLIKEGTSKFATLEMNPKRAQKRPKETGIIQGTVPYLGTFLTDLVMLDTAMKDYLYGRLINFEKRRKEFEVIAQIKLLQSACNNYSIAPDEQFGAWFRAVERLSETESYNLSCELEPPSESASNTLRTKKNTAIVKRWSDRQAPSTELSTSGSSHSKSCDQLRCGPYLSSGDIADALSVHSAGSSSSDVEEINISFVPESPDGQEKKFWESASQSSPETSGISSASSSTSSSSASTTPVAATRTHKRSVSGLCNSSSALPLYNQQVGDCCIIRVSLDVDNGNMYKSILVSRRGWPGCLPPLAANAP

SEQ ID NO: 798 - protein, 847 aa, Homo sapiens
MMVDCQSSTQEIGEELINGVIYSISLRKVQLHHGGNKGQRWLGYENESALNLYETCKVRTVKAGTLEKLVEHLVPAFQGSDLSYVTIFLCTYRAFTTTQQVLDLLFKRYGCILPYSDEDGGPQDQLKNAISSILGTWLDQYSEDFCQPPDFPCLKQLVAYVQLNMPGSDLERRAHLLLAQLEHSEPIEAEPEALSPVPALKPTPELELALTPARAPSPVPAPAPEPEPAPTPAPGSELEVAPAPAPELQQAPEPAVGLESAPAPALELEPAPEQDPAPSQTLELEPAPAPVPSLQPSWPSPVVAENGLSEEKPHLLVFPPDLVAEQFTLMDAELFKKVVPYHCLGSIWSQRDKKGKEHLAPTIRATVTQFNSVANCVITTCLGNRSTKAPDRARVVEHWIEVARECRILKNFSSLYAILSALQSNSIHRLKKTWEDVSRDSFRIFQKLSEIFSDENNYSLSRELLIKEGTSKFATLEMNPKRAQKRPKETGIIQGTVPYLGTFLTDLVMLDTAMKDYLYGRLINFEKRRKEFEVIAQIKLLQSACNNYSIAPDEQFGAWFRAVERLSETESYNLSCELEPPSESASNTLRTKKNTAIVKRWSDRQAPSTELSTSGSSHSKSCDQLRCGPYLSSGDIADALSVHSAGSSSSDVEEINISFVPESPDGQEKKFWESASQSSPETSGISSASSSTSSSSASTTPVAATRTHKRSVSGLCNSSSALPLYNQQVGDCCIIRVSLDVDNGNMYKSILVTSQDKAPAVIRKAMDKHNLEEEEPEDYELLQILSDDRKLKIPENANVFYAMNSTANYDFVLKKRTFTKGVKVKHGASSTLPRMKQKGLKIAKGIF

SEQ ID NO: 799 - protein, 886 aa, Homo sapiens [sequence omitted]

SEQ ID NO: 800 - protein, 914 aa, Homo sapiens
MVQRMWAEAAGPAGGAEPLFPGSRRSRSVWDAVRLEVGVPDSCPVVLHSFTQLDPDLPRPESSTQEIGEELINGVIYSISLRKVQLHHGGNKGQRWLGYENESALNLYETCKVRTVKAGTLEKLVEHLVPAFQGSDLSYVTIFLCTYRAFTTTQQVLDLLFKRYGRCDALTASSRYGCILPYSDEDGGPQDQLKNAISSILGTWLDQYSEDFCQPPDFPCLKQLVAYVQLNMPGSDLERRAHLLLAQLEHSEPIEAEPEALSPVPALKPTPELELALTPARAPSPVPAPAPEPEPAPTPAPGSELEVAPAPAPELQQAPEPAVGLESAPAPALELEPAPEQDPAPSQTLELEPAPAPVPSLQPSWPSPVVAENGLSEEKPHLLVFPPDLVAEQFTLMDAELFKKVVPYHCLGSIWSQRDKKGKEHLAPTIRATVTQFNSVANCVITTCLGNRSTKAPDRARVVEHWIEVARECRILKNFSSLYAILSALQSNSIHRLKKTWEDVSRDSFRIFQKLSEIFSDENNYSLSRELLIKEGTSKFATLEMNPKRAQKRPKETGIIQGTVPYLGTFLTDLVMLDTAMKDYLYGRLINFEKRRKEFEVIAQIKLLQSACNNYSIAPDEQFGAWFRAVERLSETESYNLSCELEPPSESASNTLRTKKNTAIVKRWSDRQAPSTELSTSGSSHSKSCDQLRCGPYLSSGDIADALSVHSAGSSSSDVEEINISFVPESPDGQEKKFWESASQSSPETSGISSASSSTSSSSASTTPVAATRTHKRSVSGLCNSSSALPLYNQQVGDCCIIRVSLDVDNGNMYKSILVTSQDKAPAVIRKAMDKHNLEEEEPEDYELLQILSDDRKLKIPENANVFYAMNSTANYDFVLKKRTFTKGVKVKHGASSTLPRMKQKGLKIAKGIF

SEQ ID NO: 801 - protein, 899 aa, Homo sapiens
MPTLGWLPENRDISEDQSSAEQTQALASQASQFLAKVESFERLIQAGRLMPQDQVKGFQRLKAAHAALEEEYLKACREQHPAQPLAGSKGTPGRFDPRRELEAEIYRLGSCLEELKEHIDQTQQEPEPPGSDSALDSTPALPCLHQPTHLPAPSGQAPMPAIKTSCPEPATTTAAASTGPCPLHVNVEVSSGNSEVEDRPQDPLARLRHKELQMEQVYHGLMERYLSVKSLPEAMRMEEEEEGEEEEEEEGGGDSLEVDGVAATPGKAEATRVLPRQCPVQAEKSHGAPLEEATEKMVSMKPPGFQASLARDGHMSGLGKAEAAPPGPGVPPHPPGTKSAASHQSSMTSLEGSGISERLPQKPLHRGGGPHLEETWMASPETDSGFVGSETSRVSPLTQTPEHRLSHISTAGTLAQPFAASVPRDGASYPKARGSLIPRRATEPSTPRSQAQRYLSSPSGPLRQRAPNFSLERTLAAEMAVPGSEFEGHKRISEQPLPNKTISPPPAPAPAAAPLPCGPTETIPSFLLTRAGRDQAICELQEEVSRLRLRLEDSLHQPLQGSPTRPASAFDRPARTRGRPADSPATWGSHYGSKSTERLPGEPRGEEQIVPPGRQRARSSSVPREVLRLSLSSESELPSLPLFSEKSKTTKDSPQAARDGKRGVGSAGWPDRVTFRGQYTGHEYHVLSPKAVPKGNGTVSCPHCRPIRTQDAGGAVTGDPLGPPPADTLQCPLCGQVGSPPEADGPGSATSGAEKATTRRKAPSTPSPKQRSKQAGSSPRPPPGLWYLATAPPAPAPPAFAYISSVPIMPYPPAAVYYAPAGPTSAQPAAKWPPTASPPPARRHRHSIQLDLGDLEELNKALSRAVQAAESVRSTTRQMRSSLSADLRQAHSLRGSCLF

SEQ ID NO: 802 - protein, 665 aa, Homo sapiens
MRMEEEEEGEEEEEEEGGGDSLEVDGVAATPGKAEATRVLPRQCPVQAEKSHGAPLEEATEKMVSMKPPGFQASLARDGHMSGLGKAEAAPPGPGVPPHPPGTKSAASHQSSMTSLEGSGISERLPQKPLHRGGGPHLEETWMASPETDSGFVGSETSRVSPLTQTPEHRLSHISTAGTLAQPFAASVPRDGASYPKARGSLIPRRATEPSTPRSQAQRYLSSPSGPLRQRAPNFSLERTLAAEMAVPGSEFEGHKRISEQPLPNKTISPPPAPAPAAAPLPCGPTETIPSFLLTRAGRDQAICELQEEVSRLRLRLEDSLHQPLQGSPTRPASAFDRPARTRGRPADSPATWGSHYGSKSTERLPGEPRGEEQIVPPGRQRARSSSVPREVLRLSLSSESELPSLPLFSEKSKTTKDSPQAARDGKRGVGSAGWPDRVTFRGQYTGHEYHVLSPKAVPKGNGTVSCPHCRPIRTQDAGGAVTGDPLGPPPADTLQCPLCGQVGSPPEADGPGSATSGAEKATTRRKAPSTPSPKQRSKQAGSSPRPPPGLWYLATAPPAPAPPAFAYISSVPIMPYPPAAVYYAPAGPTSAQPAAKWPPTASPPPARRHRHSIQLDLGDLEELNKALSRAVQAAESVRSTTRQMRSSLSADLRQAHSLRGSCLF

SEQ ID NO: 803 - protein, 1439 aa, Homo sapiens
MASSETEIRWAEPGLGKGPQRRRWAWAEDKRDVDRSSSQSWEEERLFPNATSPELLEDFRLAQQHLPPLEWDPHPQPDGHQDSESGETSGEEAEAEDVDSPASSHEPLAWLPQQGRQLDMTEEEPDGTLGSLEVEEAGESSSRLGYEAGLSLEGHGNTSPMALGHGQARGWVASGEQASGDKLSEHSEVNPSVELSPARSWSSGTVSLDHPSDSLDSTWEGETDGPQPTALAETLPEGPSHHLLSPDGRTGGSVARATPMEFQDSSAPPAQSPQHATDRWRRETTRFFCPQPKEHIWKQTKTSPKPLPSRFIGSISPLNPQPRPTRQGRPLPRQGATLAGRSSSNAPKYGRGQLNYPLPDFSKVGPRVRFPKDESYRPPKSRSHNRKPQAPARPLIFKSPAEIVQEVLLSSGEAALAKDTPPAHPITRVPQEFQTPEQATELVHQLQEDYHRLLTKYAEAENTIDQLRLGAKVNLFSDPPQPNHSIHTGMVPQGTKVLSFTIPQPRSAEWWPGPAEDPQASAASGWPSARGDLSPSSLTSMPTLGWLPENRDISEDQSSAEQTQALASQASQFLAKVESFERLIQAGRLMPQDQVKGFQRLKAAHAALEEEYLKACREQHPAQPLAGSKGTPGRFDPRRELEAEIYRLGSCLEELKEHIDQTQQEPEPPGSDSALDSTPALPCLHQPTHLPAPSGQAPMPAIKTSCPEPATTTAAASTGPCPLHVNVEVSSGNSEVEDRPQDPLARLRHKELQMEQVYHGLMERYLSVKSLPEAMRMEEEEEGEEEEEEEGGGDSLEVDGVAATPGKAEATRVLPRQCPVQAEKSHGAPLEEATEKMVSMKPPGFQASLARDGHMSGLGKAEAAPPGPGVPPHPPGTKSAASHQSSMTSLEGSGISERLPQKPLHRGGGPHLEETWMASPETDSGFVGSETSRVSPLTQTPEHRLSHISTAGTLAQPFAASVPRDGASYPKARGSLIPRRATEPSTPRSQAQRYLSSPSGPLRQRAPNFSLERTLAAEMAVPGSEFEGHKRISEQPLPNKTISPPPAPAPAAAPLPCGPTETIPSFLLTRAGRDQAICELQEEVSRLRLRLEDSLHQPLQGSPTRPASAFDRPARTRGRPADSPATWGSHYGSKSTERLPGEPRGEEQIVPPGRQRARSSSVPREVLRLSLSSESELPSLPLFSEKSKTTKDSPQAARDGKRGVGSAGWPDRVTFRGQYTGHEYHVLSPKAVPKGNGTVSCPHCRPIRTQDAGGAVTGDPLGPPPADTLQCPLCGQVGSPPEADGPGSATSGAEKATTRRKAPSTPSPKQRSKQAGSSPRPPPGLWYLATAPPAPAPPAFAYISSVPIMPYPPAAVYYAPAGPTSAQPAAKWPPTASPPPARRHRHSIQLDLGDLEELNKALSRAVQAAESVRSTTRQMRSSLSADLRQAHSLRGSCLF

SEQ ID NO: 804 - protein, 633 aa, Homo sapiens
MERYLSVKSLPEAMRMEEEEEGEEEEEEEGGGDSLEVDGVAATPGKAEATRVLPRQCPVQAEKSHGAPLEEATEKMVSMKPPGFQASLARDGHMSGLGKAEAAPPGPGVPPHPPGTKSAASHQSSMTSLEGSGISERLPQKPLHRGGGPHLEETWMASPETDSGFVGSETSRVSPLTQTPEHRLSHISTAGTLAQPFAASVPRDGASYPKARGSLIPRRATEPSTPRSQAQRYLSSPSGPLRQRAPNFSLERTLAAEMAVPGSEFEGHKRISEQPFPNKTISPPPAPAPAAAPLPCGPTETIPSFLLTRAGRDQAICELQEEVSRLRLRLEDSLHQPLQGSPTRPASAFDRPARTRGRPADSPATWGSHYGSKSTERLPGEPRGEEQIVPPGRQRARSSSVPREVLRLSLSSESELPSLPLFSEKSKTTKDSPQAARDGKRGVGSAGWPDRVTFRGQYTGHEYHVLSLRRSQKAMAQSPVPTAGPLGPRMRVVLSQGTHWDRLPLIPFSVPCVVKLGLPQRQMVQAQPPLGQRRPPRGEKHLQLPAPSRGASRRGRRHAHPPDCGIWQQRPQHQPLQPLPTSPRFPSCLIHLPLCTMRLQDLPQPNQLPSGRPQPLPHQPGDTGTPSSSTWAT

SEQ ID NO: 805 - protein, 755 aa, Homo sapiens [sequence omitted]

SEQ ID NO: 806 - protein, 330 aa, Homo sapiens
MAEEDLAPGKSSVAVNNCIRQLSYCKNDIRDTVGIWGEGKDMYLILENDMLSLVDPMDRSVLHSQPIVSIRVWGVGRDNGRDFAYVARDKDTRILKCHVFRCDTPAKAIATSLHEICSKIMAERKNAKALACSSLQERANVNLDVPLQVDFPTPKTELVQKFHVQYLGMLPVDKPVGMDILNSAIENLMTSSNKEDWLSVNMNVADATVTVISEKNEEEVLVECRVRFLSFMGVGKDVHTFAFIMDTGNQRFECHVFWCEPNAGNVSEAVQAACMLRYQKCLVARPPSQKVRPPPPPADSVTRRVTTNVKRGVLSLIDTLKQKRPVTEMP

SEQ ID NO: 807 - protein, 795 aa, Homo sapiens [sequence omitted]

SEQ ID NO: 808 - protein, 795 aa, Homo sapiens [sequence omitted]

SEQ ID NO: 809 - protein, 795 aa, Homo sapiens [sequence omitted]

SEQ ID NO: 810 - protein, 201 aa, Homo sapiens
MKWVWALLLLAALGSGRAERDCRVSSFRVKENFDKARFSGTWYAMAKKDPEGLFLQDNIVAEFSVDETGQMSATAKGRVRLLNNWDVCADMVGTFTDTEDPAKFKMKYWGVASFLQKGNDDHWIVDTDYDTYAVQYSCRLLNLDGTCADSYSFVFSRDPNGLPPEAQKIVRQRQEELCLARQYRLIVHNGYCDGRSERNLL

SEQ ID NO: 811 - protein, 201 aa, Homo sapiens; identical to SEQ ID NO: 810

SEQ ID NO: 812 - protein, 199 aa, Homo sapiens
MNYSKIPAQVDLRRQTERDCRVSSFRVKENFDKARFSGTWYAMAKKDPEGLFLQDNIVAEFSVDETGQMSATAKGRVRLLNNWDVCADMVGTFTDTEDPAKFKMKYWGVASFLQKGNDDHWIVDTDYDTYAVQYSCRLLNLDGTCADSYSFVFSRDPNGLPPEAQKIVRQRQEELCLARQYRLIVHNGYCDGRSERNLL

SEQ ID NO: 813 - protein, 201 aa, Homo sapiens; identical to SEQ ID NO: 810

SEQ ID NO: 814 - protein, 1032 aa, Homo sapiens [sequence omitted]

SEQ ID NO: 815 - protein, 1365 aa, Homo sapiens [sequence omitted]

SEQ ID NO: 816 - protein, 490 aa, Homo sapiens [sequence omitted]

SEQ ID NO: 817 - protein, 162 aa, Homo sapiens
MDSLVVLVLCLSCLLLLSLWRQSSGRGKLPPGPTPLPVIGNILQIGIKDISKSLTNLSKVYGPVFTLYFGLKPIVVLHGYEAVKEALIDLGEEFSGRGIFPLAERANRGFGIVFSNGKKWKEIRRFSLMTLRNFGMGKRSIEDRVQEEARCLVEELRKTKGG

SEQ ID NO: 818 - protein, 829 aa, Homo sapiens [sequence omitted]

SEQ ID NO: 819 - protein, 1000 aa, Homo sapiens [sequence omitted]

SEQ ID NO: 820 - protein, 725 aa, Homo sapiens
MSSECDGGSKAVMNGLAPGSNGQDKATADPLRARSISAVKIIPVKTVKNASGLVLPTDMDPTKICTGKGAVTLRASSSYRETPSSSPASPQETRQHESKPGLEPEPSSADEWRLSSSADANGNAQPSSLAAKGYRSVHPNLPSDKSQDSSPLLNEVSSSLIGTDSQAFPSVSKPSSAYPSTTIVNPTIVLLQHNREQQKRLSSLSDPVSERRVGEQDSAPTQEKPTSPGKAIEKRAKDDSRRVVKSTQDLSDVSMDEVGIPLRNTERSKDWYKTMFKQIHKLNRDDDSDLYSPRYSFSEDTKSPLSVPRSKSEMSYIDGEKVVKRSATLPLPARSSSLKSSSERNDWEPPDKKVDTRKYRAEPKSIYEYQPGKSSVLTNEKMSSAISPTPEISSETPGYIYSSNFHAVKRESDGAPGDLTSLENERQIYKSVLEGGDIPLQGLSGLKRPSSSASTKDSESPRHFIPADYLESTEEFIRRRHDDKEMRPARAKFDFKAQTLKELPLQKGDIVYIYKQIDQNWYEGEHHGRVGIFPRTYIELLPPAEKAQPKKLTPVQVLEYGEAIAKFNFNGDTQVEMSFRKGERITLLRQVDENWYEGRIPGTSRQGIFPITYVDVIKRPLVKNPVDYMDLPFSSSPSRSATASPQQPQAQQRRVTPDRSQTSQDLFSYQALYSYIPQNDDELELRDGDIVDVMEKCDDGWFVGTSRRTKQFGTFPGNYVKPLYL

SEQ ID NO: 821 - protein, 533 aa, Homo sapiens
MISSSSVHSRTFNTSNALGPVCKHKKPLSAAKACISEILPSKFKPRLSAPSALLQEQKSILLPSEKAQSCENLCVSGSLNDSKRGLPLQVGGSIENLLMRSRRDYDSKSSSTMSLQEYSTSGRRPCPLSRKAGMQFTMLYRDMHQINRSGLFLGSISSSSSVRDLASHFEKSSLALSRGELGPSQEGSEHIPKHTVSSRITAFEQLIQRSRSMPSLDLSGRLSKSPTPVLSRGSLTSARSAESLLESTKLHPKEMDGMNSSGVYASPTCSNMAHHALSFRGLVPSEPLSTCSDDVDRCSNISTDSREGSGGSVHGDFPKHRLNKCKGTCPASYTRFTTIRKHEQQQTSRQPEWRLDARGDKSTLLRNIYLMSPLPFRLKKPLHHHPRQPSPGDSSGLLVGQKPDLPSQPHQDQPPSGGKPVVPTRLSSRHTMARLSRSSEPSQERPTALEDYPRAINNGNSVPYSDHSLDRNNNPQSELAPSRGGGILCVCLVSPARPSTLLALSRPPLCPWCSFSGLSFVFCLFCLAINHGS

SEQ ID NO: 822 - protein, 350 aa, Homo sapiens
MNGLAPGSNGQDKDMDPTKICTGKGAVTLRASSSYRETPSSSPASPQETRQHESKPDEWRLSSSADANGNAQPSSLAAKGYRSVHPNLPSDKSQDSSPLLNEVSSSLIGTDSQAFPSVSKPSSAYPSTTIVNPTIVLLQHNREQQKRLSSLSDPVSERRVGEQDSAPTQEKPTSPGKAIEKRAKDDSRRVVKSTQDLSDVSMDEVGIPLRNTERSKDWYKTMFKQIHKLNRDDDSDLYSPRYSFSEDTKSPLSVPRSKSEMSYIDGEKVVKRSATLPLPARSSSLKSSSERNDWEPPDKKVDTRKYRAEPKSIYEYQPGKSSVLTNEKMYIFFQLPCSEEGIRRGSWGSH

SEQ ID NO: 823 - protein, 816 aa, Homo sapiens
MSSECDGGSKAVMNGLAPGSNGQDKDMDPTKICTGKGAVTLRASSSYRETPSSSPASPQETRQHESKPGLEPEPSSADEWRLSSSADANGNAQPSSLAAKGYRSVHPNLPSDKSQDATSSSAAQPEVIVVPLYLVNTDRGQEGTARPPTPLGPLGCVPTIPATASAASPLTFPTLDDFIPPHLQRWPHHSQPARASGSFAPISQTPPSFSPPPPLVPPAPEDLRRVSEPDLTGAVSSTDSSPLLNEVSSSLIGTDSQAFPSVSKPSSAYPSTTIVNPTIVLLQHNREQQKRLSSLSDPVSERRVGEQDSAPTQEKPTSPGKAIEKRAKDDSRRVVKSTQDLSDVSMDEVGIPLRNTERSKDWYKTMFKQIHKLNRDDDSDLYSPRYSFSEDTKSPLSVPRSKSEMSYIDGEKVVKRSATLPLPARSSSLKSSSERNDWEPPDKKVDTRKYRAEPKSIYEYQPGKSSVLTNEKMSSAISPTPEISSETPGYIYSSNFHAVKRESDGAPGDLTSLENERQIYKSVLEGGDIPLQGLSGLKRPSSSASTKDSESPRHFIPADYLESTEEFIRRRHDDKEMRPARAKFDFKAQTLKELPLQKGDIVYIYKQIDQNWYEGEHHGRVGIFPRTYIELLPPAEKAQPKKLTPVQVLEYGEAIAKFNFNGDTQVEMSFRKGERITLLRQVDENWYEGRIPGTSRQGIFPITYVDVIKRPLVKNPVDYMDLPFSSSPSRSATASPQQPQAQQRRVTPDRSQTSQDLFSYQALYSYIPQNDDELELRDGDIVDVMEKCDDGWFVGTSRRTKQFGTFPGNYVKPLYL

SEQ ID NO: 824 - protein, 265 aa, Homo sapiens [sequence omitted]

SEQ ID NO: 825 - protein, 533 aa, Homo sapiens; identical to SEQ ID NO: 821

SEQ ID NO: 826 - protein, 362 aa, Homo sapiens [sequence omitted]

SEQ ID NO: 827 - protein, 684 aa, Homo sapiens
MSSECDGGSKAVMNGLAPGSNGQDKDMDPTKICTGKGAVTLRASSSYRETPSSSPASPQETRQHESKPDEWRLSSSADANGNAQPSSLAAKGYRSVHPNLPSDKSQDSSPLLNEVSSSLIGTDSQAFPSVSKPSSAYPSTTIVNPTIVLLQHNREQQKRLSSLSDPVSERRVGEQDSAPTQEKPTSPGKAIEKRAKDDSRRVVKSTQDLSDVSMDEVGIPLRNTERSKDWYKTMFKQIHKLNRDDDSDLYSPRYSFSEDTKSPLSVPRSKSEMSYIDGEKVVKRSATLPLPARSSSLKSSSERNDWEPPDKKVDTRKYRAEPKSIYEYQPGKSSVLTNEKMSSAISPTPEISSETPGYIYSSNFHAVKRESDGAPGDLTSLENERQIYKSVLEGGDIPLQGLSGLKRPSSSASTKDSESPRHFIPADYLESTEEFIRRRHDDKEMRPARAKFDFKAQTLKELPLQKGDIVYIYKQIDQNWYEGEHHGRVGIFPRTYIELLPPAEKAQPKKLTPVQVLEYGEAIAKFNFNGDTQVEMSFRKGERITLLRQVDENWYEGRIPGTSRQGIFPITYVDVIKRPLVKNPVDYMDLPFSSSPSRSATASPQQPQAQQRRVTPDRSQTSQDLFSYQALYSYIPQNDDELELRDGDIVDVMEKCDDGWFVGTSRRTKQFGTFPGNYVKPLYL

SEQ ID NO: 828 - protein, 755 aa, Homo sapiens [sequence omitted]

SEQ ID NO: 829 - protein, 816 aa, Homo sapiens; identical to SEQ ID NO: 823

SEQ ID NO: 830 - protein, 2057 aa, Homo sapiens
MLRVIVESASNIPKTKFGKPDPIVSVIFKDEKKKTKKVDNELNPVWNEILEFDLRGIPLDFSSSLGIIVKDFETIGQNKLIGTATVALKDLTGDQSRSLPYKLISLLNEKGQDTGATIDLVIGYDPPSAPHPNDLSGPSVPGMGGDGEEDEGDEDRLDNAVRGPGPKGPVGTVSEAQLARRLTKVKNSRRMLSNKPQDFQIRVRVIEGRQLSGNNIRPVVKVHVCGQTHRTRIKRGNNPFFDELFFYNVNMTPSELMDEIISIRVYNSHSLRADCLMGEFKIDVGFVYDEPGHAVMRKWLLLNDPEDTSSGSKGYMKVSMFVLGTGDEPPPERRDRDNDSDDVESNLLLPAGIALRWVTFLLKIYRAEDIPQMDDAFSQTVKEIFGGNADKKNLVDPFVEVSFAGKKVCTNIIEKNANPEWNQVVNLQIKFPSVCEKIKLTIYDWDRLTKNDVVGTTYLHLSKIAASGGEVEDFSSSGTGAASYTVNTGETEVGFVPTFGPCYLNLYGSPREYTGFPDPYDELNTGKGEGVAYRGRILVELATFLEKTPPDKKLEPISNDDLLVVEKYQRRRKYSLSAVFHSATMLQDVGEAIQFEVSIGNYGNKFDTTCKPLASTTQYSRAVFDGNYYYYLPWAHTKPVVTLTSYWEDISHRLDAVNTLLAMAERLQTNIEALKSGIQGKIPANQLAELWLKLIDEVIEDTRYTLPLTEGKANVTVLDTQIRKLRSRSLSQIHEAAVRMRSEATDVKSTLAEIEDWLDKLMQLTEEPQNSMPDIIIWMIRGEKRLAYARIPAHQVLYSTSGENASGKYCGKTQTIFLKYPQEKNNGPKVPVELRVNIWLGLSAVEKKFNSFAEGTFTVFAEMYENQALMFGKWGTSGLVGRHKFSDVTGKIKLKREFFLPPKGWEWEGEWIVDPERSLLTEADAGHTEFTDEVYQNESRYPGGDWKPAEDTYTDANGDKAASPSELTCPPGWEWEDDAWSYDINRAVDEKGWEYGITIPPDHKPKSWVAAEKMYHTHRRRRLVRKRKKDLTQTASSTARAMEELQDQEGWEYASLIGWKFHWKQRSSDTFRRRRWRRKMAPSETHGAAAIFKLEGALGADTTEDGDEKSLEKQKHSATTVFGANTPIVSCNFDRVYIYHLRCYVYQARNLLALDKDSFSDPYAHICFLHRSKTTEIIHSTLNPTWDQTIIFDEVEIYGEPQTVLQNPPKVIMELFDNDQVGKDEFLGRSIFSPVVKLNSEMDITPKLLWHPVMNGDKACGDVLVTAELILRGKDGSNLPILPPQRAPNLYMVPQGIRPVVQLTAIEILAWGLRNMKNFQMASITSPSLVVECGGERVESVVIKNLKKTPNFPSSVLFMKVFLPKEELYMPPLVIKVIDHRQFGRKPVVGQCTIERLDRFRCDPYAGKEDIVPQLKASLLSAPPCRDIVIEMEDTKPLLASKEEEIVDWWSKFYASSGEHEKCGQYIQKGYSKLKIYNCELENVAEFEGLTDFSDTFKLYRGKSDENEDPSVVGEFKGSFRIYPLPDDPSVPAPPRQFRELPDSVPQECTVRIYIVRGLELQPQDNNGLCDPYIKITLGKKVIEDRDHYIPNTLNPVFGRMYELSCYLPQEKDLKISVYDYDTFTRDEKVGETIIDLENRFLSRFGSHCGIPEEYCVSGVNTWRDQLRPTQLLQNVARFKGFPQPILSEDGSRIRYGGRDYSLDEFEANKILHQHLGAPEERLALHILRTQGLVPEHVETRTLHSTFQPNISQGKLQMWVDVFPKSLGPPGPPFNITPRKAKKYYLRVIIWNTKDVILDEKSITGEEMSDIYVKGWIPGNEENKQKTDVHYRSLDGEGNFNWRFVFPFDYLPAEQLCIVAKKEHFWSIDQTEFRIPPRLIIQIWDNDKFSLDDYLGFLELDLRHTIIPAKSPEKCRLDMIPDLKAMNPLKAKTASLFEQKSMKGWWPCYAEKDGARVMAGKVEMTLEILNEKEADERPAGKGRDEPNMNPKLDLPNRPETSFLWFTNPCKTMKFIVWRRFKWVIIGLLFLLILLLFVAVLLYSLPNYLSMKIVKPNV

SEQ ID NO: 831 - protein, 1769 aa, Homo sapiens
MILPNSPPNRTDEKKKTKKVDNELNPVWNEILEFDLRGIPLDFSSSLGIIVKDFETIGQNKLIGTATVALKDLTGDQSRSLPYKLISLLNEKGQDTGATIDLVIGYDPPSAPHPNDLSGPSVPGMGGDGEEDEGDEDRLDNAVRGPGPKGPVGTVSEAQLARRLTKVKNSRRMLSNKPQDFQIRVRVIEGRQLSGNNIRPVVKVHVCGQTHRTRIKRGNNPFFDELFFYNVNMTPSELMDEIISIRVYNSHSLRADCLMGEFKIDVGFVYDEPGHAVMRKWLLLNDPEDTSSGSKGYMKVSMFVLGTGDEPPPERRDRDNDSDDVESNLLLPAGIALRWVTFLLKIYRAEDIPQMDDAFSQTVKEIFGGNADKKNLVDPFVEVSFAGKKVCTNIIEKNANPEWNQVVNLQIKFPSVCEKIKLTIYDWDRLTKNDVVGTTYLHLSKIAASGGEVEVNTGETEVGFVPTFGPCYLNLYGSPREYTGFPDPYDELNTGKGEGVAYRGRILVELATFLEKTPPDKKLEPISNDDLLVVEKYQRRRKYSLSAVFHSATMLQDVGEAIQFEVSIGNYGNKFDTTCKPLASTTQYSRAVFDGNYYYYLPWAHTKPVVTLTSYWEDISHRLDAVNTLLAMAERLQTNIEALKSGIQGKIPANQLAELWLKLIDEVIEDTRYTLPLTEGKANVTVLDTQIRKLRSRSLSQIHEAAVRMRSEATDVKSTLAEIEDWLDKLMQLTEEPQNSMPDIIIWMIRGEKRLAYARIPAHQVLYSTSGENASGKYCGKTQTIFLKYPQEKNNGPKVPVELRVNIWLGLSAVEKKFNSFAEGTFTVFAEMYENQALMFGKWGTSGLVGRHKFSDVTGKIKLKREFFLPPKGWEWEGEWIVDPERSLLTEADAGHTEFTDEVYQNESRYPGGDWKPAEDTYTDANGDKAASPSELTCPPGWEWEDDAWSYDINRAVDEKGWEYGITIPPDHKPKSWVAAEKMYHTHRRRRLVRKRKKDLTQTASSTARAMEELQDQEGWEYASLIGWKFHWKQRSSDTFRRRRWRRKMAPSETHGAAAIFKLEGALGADTTEDGDEKSLEKQKHSATTVFGANTPIVSCNFDRVYIYHLRCYVYQARNLLALDKDSFSDPYAHICFLHRSKTTEIIHSTLNPTWDQTIIFDEVEIYGEPQTVLQNPPKVIMELFDNDQVGKDEFLGRSIFSPVVKLNSEMDITPKLLWHPVMNGDKACGDVLVTAELILRGKDGSNLPILPPQRAPNLYMVPQGIRPVVQLTAIEILAWGLRNMKNFQMASITSPSLVVECGGERVESVVIKNLKKTPNFPSSVLFMKVFLPKEELYMPPLVIKVIDHRQFGRKPVVGQCTIERLDRFRCDPYAGKEDIVPQLKASLLSAPPCRDIVIEMEDTKPLLASKCLSSMSTALSKMASPATVHLTEKEEEIVDWWSKFYASSGEHEKCGQYIQKGYSKLKIYNCELENVAEFEGLTDFSDTFKLYRGKSDENEDPSVVGEFKGSFRIYPLPDDPSVPAPPRQFRELPDSVPQECTVRIYIVRGLELQPQDNNGLCDPYIKITLGKKVIEDRDHYIPNTLNPVFGRMYELSCYLPQEKDLKISVYDYDTFTRDEKVGETIIDLENRFLSRFGSHCGIPEEYCVSGVNTWRDQLRPTQLLQNVARFKGFPQPILSEDGSRIRYGGRDYSLDEFEANKILHQHLGAPEERLALHILRTQGLVPEHVETRTLHSTFQPNIILPACDHLEHQGRYLGREKHHRRGNE

SEQ ID NO: 832 - protein, 464 aa, Homo sapiens
MSSRSTKDLIKSKWGSKPSNSKSETTLEKLKGEIAHLKTSVDEITSGKGKLTDKERHRLLEKIRVLEAEKEKNAYQLTEKDKEIQRLRDQLKARYSTTALLEQLEETTREGERREQVLKALSEEKDVLKQQLSAATSRIAELESKTNTLRLSQTVAPNCFNSSINNIHEMEIQLKDALEKNQQWLVYDQQREVYVKGLLAKIFELEKKTETAAHSLPQQTKKPESEGYLQEEKQKCYNDLLASAKKDLEVERQTITQLSFELSEFRRKYEETQKEVHNLNQLLYSQRRADVQHLEDDRHKTEKIQKLREENDIARGKLEEEKKRSEELLSQVQFLYTSLLKQQEEQTRVALLEQQMQACTLDFENEKLDRQHVQHQLLVILKELRKARNQITQLESLKQLHEFAITEPLVTFQGETENREKVAASPKSPTAALNESLVECPKCNIQYPATEHRDLLVHVEYCSK

SEQ ID NO: 833 - protein, 858 aa, Homo sapiens
MGEINQVAVEKYLEENPQFAKEYFDRKLRVEVLGEIFKNSQVPVQSSMSFSELTQVEESALCLELLWTVQEEGGTPEQGVHRALQRLAHLLQADRCSMFLCRSRNGIPEVASRLLDVTPTSKFEDNLVGPDKEVVFPLDIGIVGWAAHTKKTHNVPDVKKNSHFSDFMDKQTGYVTKNLLATPIVVGKEVLAVIMAVNKVNASEFSKQDEEVFSKYLNFVSIILRLHHTSYMYNIESRRSQILMWSANKVFEELTDVERQFHKALYTVRSYLNCERYSIGLLDMTKEKEFYDEWPIKLGEVEPYKGPKTPDGREVNFYKIIDYILHGKEEIKVIPTPPADHWTLISGLPTYVAENGFICNMMNAPADEYFTFQKGPVDETGWVIKNVLSLPIVNKKEDIVGVATFYNRKDGKPFDEHDEYITETLTQFLGWSLLNTDTYDKMNKLENRKDIAQEMLMNQTKATPEEIKSILKFQEKLNVDVIDDCEEKQLVAILKEDLPDPRSAELYEFRFSDFPLTEHGLIKCGIRLFFEINVVEKFKVPVEVLTRWMYTVRKGYRAVTYHNWRHGFNVGQTMFTLLMTGRLKKYYTDLEAFAMLAAAFCHDIDHRGTNNLYQMKSTSPLARLHGSSILERHHLEYSKTLLQDESLNIFQNLNKRQFETVIHLFEVAIIATDLALYFKKRTMFQKIVDACEQMQTEEEAIKYVTVDPTKKEIIMAMMMTACDLSAITKPWEVQSQVALMVANEFWEQGDLERTVLQQQPIPMMDRNKRDELPKLQVGFIDFVCTFVYKEFSRFHKEITPMLSGLQNNRVEWKSLADEYDAKMKVIEEEAKKQEGGAEKAAEDSGGGDDKKSKTCLML

SEQ ID NO: 834 - protein, 474 aa, Homo sapiens [sequence omitted]

SEQ ID NO: 835 - protein, 2896 aa, Homo sapiens [sequence omitted]

SEQ ID NO: 836 - protein, 2801 aa, Homo sapiens [sequence omitted]

SEQ ID NO: 837 - protein, 3256 aa, Homo sapiens [sequence omitted]

SEQ ID NO: 838 - protein, 3256 aa, Homo sapiens
MWPTRRLVTIKRSGVDGPHFPLSLSTCLFGRGIECDIRIQLPVVSKQHCKIEIHEQEAILHNFSSTNPTQVNGSVIDEPVRLKHGDVITIIDRSFRYENESLQNGRKSTEFPRKIREQEPARRVSRSSFSSDPDEKAQDSKAYSKITEGKVSGNPQVHIKNVKEDSTADDSKDSVAQGTTNVHSSEHAGRNGRNAADPISGDFKEISSVKLVSRYGELKSVPTTQCLDNSKKNESPFWKLYESVKKELDVKSQKENVLQYCRKSGLQTDYATEKESADGLQGETQLLVSRKSRPKSGGSGHAVAEPASPEQELDQNKGKGRDVESVQTPSKAVGASFPLYEPAKMKTPVQYSQQQNSPQKHKNKDLYTTGRRESVNLGKSEGFKAGDKTLTPRKLSTRNRTPAKVEDAADSATKPENLSSKTRGSIPTDVEVLPTETEIHNEPFLTLWLTQVERKIQKDSLSKPEKLGTTAGQMCSGLPGLSSVDINNFGDSINESEGIPLKRRRVSFGGHLRPELFDENLPPNTPLKRGEAPTKRKSLVMHTPPVLKKIIKEQPQPSGKQESGSEIHVEVKAQSLVISPPAPSPRKTPVASDQRRRSCKTAPASSSKSQTEVPKRGGERVATCLQKRVSISRSQHDILQMICSKRRSGASEANLIVAKSWADVVKLGAKQTQTKVIKHGPQRSMNKRQRRPATPKKPVGEVHSQFSTGHANSPCTIIIGKAHTEKVHVPARPYRVLNNFISNQKMDFKEDLSGIAEMFKTPVKEQPQLTSTCHIAISNSENLLGKQFQGTDSGEEPLLPTSESFGGNVFFSAQNAAKQPSDKCSASPPLRRQCIRENGNVAKTPRNTYKMTSLETKTSDTETEPSKTVSTVNRSGRSTEFRNIQKLPVESKSEETNTEIVECILKRGQKATLLQQRREGEMKEIERPFETYKENIELKENDEKMKAMKRSRTWGQKCAPMSDLTDLKSLPDTELMKDTARGQNLLQTQDHAKAPKSEKGKITKMPCQSLQPEPINTPTHTKQQLKASLGKVGVKEELLAVGKFTRTSGETTHTHREPAGDGKSIRTFKESPKQILDPAARVTGMKKWPRTPKEEAQSLEDLAGFKELFQTPGPSEESMTDEKTTKIACKSPPPESVDTPTSTKQWPKRSLRKADVEEEFLALRKLTPSAGKAMLTPKPAGGDEKDIKAFMGTPVQKLDLAGTLPGSKRQLQTPKEKAQALEDLAGFKELFQTPGHTEELVAAGKTTKIPCDSPQSDPVDTPTSTKQRPKRSIRKADVEGELLACRNLMPSAGKAMHTPKPSVGEEKDIIIFVGTPVQKLDLTENLTGSKRRPQTPKEEAQALEDLTGFKELFQTPGHTEEAVAAGKTTKMPCESSPPESADTPTSTRRQPKTPLEKRDVQKELSALKKLTQTSGETTHTDKVPGGEDKSINAFRETAKQKLDPAASVTGSKRHPKTKEKAQPLEDLAGWKELFQTPVCTDKPTTHEKTTKIACRSQPDPVDTPTSSKPQSKRSLRKVDVEEEFFALRKRTPSAGKAMHTPKPAVSGEKNIYAFMGTPVQKLDLTENLTGSKRRLQTPKEKAQALEDLAGFKELFQTRGHTEESMTNDKTAKVACKSSQPDLDKNPASSKRRLKTSLGKVGVKEELLAVGKLTQTSGETTHTHTEPTGDGKSMKAFMESPKQILDSAASLTGSKRQLRTPKGKSEVPEDLAGFIELFQTPSHTKESMTNEKTTKVSYRASQPDLVDTPTSSKPQPKRSLRKADTEEEFLAFRKQTPSAGKAMHTPKPAVGEEKDINTFLGTPVQKLDQPGNLPGSNRRLQTRKEKAQALEELTGFRELFQTPCTDNPTADEKTTKKILCKSPQSDPADTPTNTKQRPKRSLKKADVEEEFLAFRKLTPSAGKAMHTPKAAVGEEKDINTFVGTPVEKLDLLGNLPGSKRRPQTPKEKAKALEDLAGFKELFQTPGHTEESMTDDKITEVSCKSPQPDPVKTPTSSKQRLKISLGKVGVKEEVLPVGKLTQTSGKTTQTHRETAGDGKSIKAFKESAKQMLDPANYGTGMERWPRTPKEEAQSLEDLAGFKELFQTPDHTEESTTDDKTTKIACKSPPPESMDTPTSTRRRPKTPLGKRDIVEELSALKQLTQTTHTDKVPGDEDKGINVFRETAKQKLDPAASVTGSKRQPRTPKGKAQPLEDLAGLKELFQTPVCTDKPTTHEKTTKIACRSPQPDPVGTPTIFKPQSKRSLRKADVEEESLALRKRTPSVGKAMDTPKPAGGDEKDMKAFMGTPVQKLDLPGNLPGSKRWPQTPKEKAQALEDLAGFKELFQTPGTDKPTTDEKTTKIACKSPQPDPVDTPASTKQRPKRNLRKADVEEEFLALRKRTPSAGKAMDTPKPAVSDEKNINTFVETPVQKLDLLGNLPGSKRQPQTPKEKAEALEDLVGFKELFQTPGHTEESMTDDKITEVSCKSPQPESFKTSRSSKQRLKIPLVKVDMKEEPLAVSKLTRTSGETTQTHTEPTGDSKSIKAFKESPKQILDPAASVTGSRRQLRTRKEKARALEDLVDFKELFSAPGHTEESMTIDKNTKIPCKSPPPELTDTATSTKRCPKTRPRKEVKEELSAVERLTQTSGQSTHTHKEPASGDEGIKVLKQRAKKKPNPVEEEPSRRRPRAPKEKAQPLEDLAGFTELSETSGHTQESLTAGKATKIPCESPPLEVVDTTASTKRHLRTRVQKVQVKEEPSAVKFTQTSGETTDADKEPAGEDKGIKALKESAKQTPAPAASVTGSRRRPRAPRESAQAIEDLAGFKDPAAGHTEESMTDDKTTKIPCKSSPELEDTATSSKRRPRTRAQKVEVKEELLAVGKLTQTSGETTHTDKEPVGEGKGTKAFKQPAKRNVDAEDVIGSRRQPRAPKEKAQPLEDLASFQELSQTPGHTEELANGAADSFTSAPKQTPDSGKPLKISRRVLRAPKVEPVGDVVSTRDPVKSQSKSNTSLPPLPFKRGGGKDGSVTGTKRLRCMPAPEEIVEELPASKKQRVAPRARGKSSEPVVIMKRSLRTSAKRIEPAEELNSNDMKTNKEEHKLQDSVPENKGISLRSRRQDKTEAEQQITEVFVLAERIEINRNEKKPMKTSPEMDIQNPDDGARKPIPRDKVTENKRCLRSARQNESSQPKVAEESGGQKSAKVLMQNQKGKGEAGNSDSMCLRSRKTKSQPAASTLESKSVQRVTRSVKRCAENPKKAEDNVCVKKITTRSHRDSEDI

SEQ ID NO: 839 - protein, 2214 aa, Homo sapiens [sequence omitted]

SEQ ID NO: 840 - protein, 1788 aa, Homo sapiens
MKRKERIARRLEGIENDTQPILLQSCTGLVTHRLLEEDTPRYMRASDPASPHIGRSNEEEETSDSSLEKQTRSKYCTETSGVHGDSPYGSGTMDTHSLESKAERIARYKAERRRQLAEKYGLTLDPEADSEYLSRYTKSRKEPDAVEKRGGKSDKQEESSRDASSLYPGTETMGLRTCAGESKDYALHVGDGSSDPEVLLNIENQRRGQELSATRQAHDLSPAAESSSTFSFSGRDSSFTEVPRSPKHAHSSSLQQAASRSPSFGDPQLSPEARPRCTSHSETPTVDDEEKVDERAKLSVAAKRLLFREMEKSFDEQNVPKRRSRNTAVEQRLRRLQDRSLTQPITTEEVVIAATLQASAHQKALAKDQTNEGKELAEQGEPDSSTLSLAEKLALFNKLSQPVSKAISTRNRIDTRQRRMNARYQTQPVTLGEVEQVQSGKLIPFSPAVNTSVSTVASTVAPMYAGDLRTKPPLDHNASATDYKFSSSIENSDSPVRSILKSQAWQPLVEGSENKGMLREYGETESKRALTGRDSGMEKYGSFEEAEASYPILNRAREGDSHKESKYAVPRRGSLERANPPITHLGDEPKEFSMAKMNAQGNLDLRDRLPFEEKVEVENVMKRKFSLRAAEFGEPTSEQTGTAAGKTIAQTTAPVSWKPQDSSEQPQEKLCKNPCAMFAAGEIKTPTGEGLLDSPSKTMSIKERLALLKKSGEEDWRNRLSRRQEGGKAPASSLHTQEAGRSLIKKRVTESRESQMTIEERKQLITVREEAWKTRGRGAANDSTQFTVAGRMVKKGLASPTAITPVASPICGKTRGTTPVSKPLEDIEARPDMQLESDLKLDRLETFLRRLNNKVGGMHETVLTVTGKSVKEVMKPDDDETFAKFYRSVDYNMPRSPVEMDEDFDVIFDPYAPKLTSSVAEHKRAVRPKRRVQASKNPLKMLAAREDLLQEYTEQRLNVAFMESKRMKVEKMSSNSNFSEVTLAGLASKENFSNVSLRSVNLTEQNSNNSAVPYKRLMLLQIKGRRHVQTRLVEPRASALNSGDCFLLLSPHCCFLWVGEFANVIEKAKASELATLIQTKRELGCRATYIQTIEEGINTHTHAAKDFWKLLGGQTSYQSAGDPKEDELYEAAIIETNCIYRLMDDKLVPDDDYWGKIPKCSLLQPKEVLVFDFGSEVYVWHGKEVTLAQRKIAFQLAKHLWNGTFDYENCDINPLDPGECNPLIPRKGQGRPDWAIFGRLTEHNETILFKEKFLDWTELKRSNEKNPGELAQHKEDPRTDVKAYDVTRMVSMPQTTAGTILDGVNVGRGYGLVEGHDRRQFEITSVSVDVWHILEFDYSRLPKQSIGQFHEGDAYVVKWKFMVSTAVGSRQKGEHSVRAAGKEKCVYFFWQGRHSTVSEKGTSALMTVELDEERGAQVQVLQGKEPPCFLQCFQGGMVVHSGRREEEEENVQSEWRLYCVRGEVPVEGNLLEVACHCSSLRSRTSMVVLNVNKALIYLWHGCKAQAHTKEVGRTAANKIKEQCPLEAGLHSSSKVTIHECDEGSEPLGFWDALGRRDRKAYDCMLQDPGSFNFAPRLFILSSSSGDFAATEFVYPARAPSVVSSMPFLQEDLYSAPQPALFLVDNHHEVYLWQGWWPIENKITGSARIRWASDRKSAMETVLQYCKGKNLKKPAPKSYLIHAGLEPLTFTNMFPSWEHREDIAEITEMDTEVSNQITLVEDVLAKLCKTIYPLADLLARPLPEGVDPLKLEIYLTDEDFEFALDMTRDEYNALPAWKQVNLKKAKGLF

SEQ ID NO: 841 - protein, 2214 aa, Homo sapiens [sequence omitted]

SEQ ID NO: 842 - protein, 836 aa, Homo sapiens
MHAQRQFVVAAVRAEVRRHEVAKQALNRLRKLAERVDDPELQDSIQASLDSIREAVINSQEWTLSRSIPELRLGVLGDARSGKSSLIHRFLTGSYQVLEKTESEQYKKEMLVDGQTHLVLIREEAGAPDAKFSGWADAVIFVFSLEDENSFQAVSRLHGQLSSLRGEGRGGLALALVGTQDRISASSPRVVGDARARALCADMKRCSYYETCATYGLNVDRVFQEVAQKVVTLRKQQQLLAACKSLPSSPSHSAASTPVAGQASNGGHTSDYSSSLPSSPNVGHRELRAEAAAVAGLSTPGSLHRAAKRRTSLFANRRGSDSEKRSLDSRGETTGSGRAIPIKQSFLLKRSGNSLNKEWKKKYVTLSSNGFLLYHPSINDYIHSTHGKEMDLLRTTVKVPGKRPPRAISAFGPSASINGLVKDMSTVQMGEGLEATTPMPSPSPSPSSLQPPPDQTSKHLLKPDRNLARALSTDCTPSGDLSPLSREPPPSPMVKKQRRKKLTTPSKTEGSAGQAEEENFEFLIVSSTGQTWHFEAASFEERDAWVQAIESQILASLQCCESSKVKLRTDSQSEAVAIQAIRNAKGNSICVDCGAPNPTWASLNLGALICIECSGIHRNLGTHLSRVRSLDLDDWPRELTLVLTAIGNDTANRVWESDTRGRAKPSRDSSREERESWIRAKYEQLLFLAPLSTSEEPLGRQLWAAVQAQDVATVLLLLAHARHGPLDTSVEDPQLRSPLHLAAELAHVVITQLLLWYGADVAARDAQGRTALFYARQAGSQLCADILLQHGCPGEGGSAATTPSAATTPSITATPSPRRRSSAASVGRADAPVALV

SEQ ID NO: 843 - protein, 836 aa, Homo sapiens; identical to SEQ ID NO: 842

SEQ ID NO: 844 - protein, 836 aa, Homo sapiens; identical to SEQ ID NO: 842

SEQ ID NO: 845 - protein, 856 aa, Homo sapiens
MHAQRQFVVAAVRAEVRRHEVAKQALNRLRKLAERVDDPELQDSIQASLDSIREAVINSQEWTLSRSIPELRLGVLGDARSGKSSLIHRFLTGSYQVLEKTESEQYKKEMLVDGQTHLVLIREEAGAPDAKFSGWADAVIFVFSLEDENSFQAVSRLHGQLSSLRGEGRGGLALALVGTQDRISASSPRVVGDARARALCADMKRCSYYETCATYGLNVDRVFQEVAQKVVTLRKQQQLLAACKSLPSSPSHSAASTPVAGQASNGGHTSDYSSSLPSSPNVGHRELRAEAAAVAGLSTPGSLHRAAKRRTSLFANRRGSDSEKRSLDSRGETTGSGRAIPIKQSFLLKRSGNSLNKEWKKKYVTLSSNGFLLYHPSINDYIHSTHGKEMDLLRTTVKVPGKRPPRAISAFGPSASINGLVKDMSTVQMGEGLEATTPMPSPSPSPSSLQPPPDQTSKHLLKPDRNLARALSTDCTPSGDLSPLSREPPPSPMVKKQRRKKLTTPSKTEGSAGQAEAKRKMWKLKSFGSLRNIYKAEENFEFLIVSSTGQTWHFEAASFEERDAWVQAIESQILASLQCCESSKVKLRTDSQSEAVAIQAIRNAKGNSICVDCGAPNPTWASLNLGALICIECSGIHRNLGTHLSRVRSLDLDDWPRELTLVLTAIGNDTANRVWESDTRGRAKPSRDSSREERESWIRAKYEQLLFLAPLSTSEEPLGRQLWAAVQAQDVATVLLLLAHARHGPLDTSVEDPQLRSPLHLAAELAHVVITQLLLWYGADVAARDAQGRTALFYARQAGSQLCADILLQHGCPGEGGSAATTPSAATTPSITATPSPRRRSSAASVGRADAPVALV

SEQ ID NO: 846 - protein, 97 aa, Homo sapiens
MVCVFQYDFVCGKFHGTAKAENGKLVINENPITIFQERDPSKIRWGNAGAEYIMESTGVFTTMEKAGTHLQRGAKRVIISAPSADTPMSVMGMKHEK

SEQ ID NO: 847 - protein, 263 aa, Homo sapiens
MDLQIERERSSYNISGGCTALIVICLLGKLYVANAGDSRAIIIRNGEIIPMSSEFTPETERQRLQYLAFMQPHLLGNEFTHLEFPRRVQRKELGKKMLYRDFNMTGWAYKTIEDEDLKFPLIYGEGKKARVMATIGVTRGLGDHDLKVHDSNIYIKPFLSSAPEVRIYDLSKYDHGSDDVLILATDGLWDVLSNEEVAEAITQFLPNCDPDDPHRYTLAAQDLVMRARGVLKDRGWRISNDRLGSGDDISVYVIPLIHGNKLS

SEQ ID NO: 848 - protein, 165 aa, Homo sapiens
MQNRRFSCRNQMPRISSRGAASGPPSPEMRSMWKTGRSFGLMSCGENITRNKGMNLRTSWRNKTMSRKRGAGRLWSSGASGTMTACTHPISTTATTPDPILKPAKKTKLVAPLASPCSSNLSHANRPFRGSQLGVCSGQQLLKRRMPFLPVCESVLTFTSLQTIF

SEQ ID NO: 849 - protein, 349 aa, Homo sapiens
MAASEAAVVSSPSLKTDTSPVLETAGTVAAMAATPSARAAAAVVAAAARTGSEARVSKAALATKLLSLSGVFAVHKPKGPTSAELLNRLKEKLLAEAGMPSPEWTKRKKQTLKIGHGGTLDSAARGVLVVGIGSGTKMLTSMLSGSKRYTAIGELGKATDTLDSTGRVTEEKPYDKITQEDIEGILQKFTGNIMQVPPLYSALKKDGQRLSTLMKRGEVVEAKPARPVTVYSISLQKFQPPFFTLDVECGGGFYIRSLVSDIGKELSSCANVLELTRTKQGPFTLEEHALPEDKWTIDDIAQSLEHCSSLFPAELALKKSKPESNEQVLSCEYITLNEPKREDDVIKTC

SEQ ID NO: 850 - protein, 268 aa, Homo sapiens
MEQSSPGFRQTHLQDLSEATQDVKEENHYLTPRSVLLELDNIIASSDSGESIETDGPDQVSGRIECHYEPMESYFFKETSHESVDSSKEEPQTLPETQDGDLHLQEQGSGIDWCLSPADVEAQTTNDQKGNIPDESQVEKLNVFLSPPDVINYLALTEATGRICVSQWEGPPRLGCIFCHGDHLLAVNDLKPQSLEEVSLFLTRSIQKEKLKLTIGRIPNSETFHAASCMCPSKCQSAAPSQLDKPRLNRAPKRSPAIKKSQQKGARE

SEQ ID NO: 851 - protein, 268 aa, Homo sapiens; identical to SEQ ID NO: 850

SEQ ID NO: 852 - protein, 268 aa, Homo sapiens; identical to SEQ ID NO: 850

SEQ ID NO: 853 - protein, 282 aa, Homo sapiens
MEQSSPGFRQTHLQDLSEATQDVKEENHYLTPRSVLLELDNIIASSDSGESIETDGPDQVSGRIECHYEPMESYFFKETSHESVDSSKEEPQTLPETQDGDLHLQEQGSGIDWCLSPADVEAQTTNDQKGSASLTVVQLSILINNIPDESQVEKLNVFLSPPDVINYLALTEATGRICVSQWEGPRRLGCIFCHGDHLLAVNDLKPQSLEEVSLFLTRSIQKEKLKLTIGRIPNSETFHAASCMCPSKCQSAAPSQLDKPRLNRAPKRSPAIKKSQQKGARE

SEQ ID NO: 854 - protein, 560 aa, Homo sapiens
MFARMSDLHVLLLMALVGKTACGFSLMSLLESLDPDWTPDQYDYSYEDYNQEENTSSTLTHAENPDWYYTEDQADPCQPNPCEHGGDCLVHGSTFTCSCLAPFSGNKCQKVQNTCKDNPCGRGQCLITQSPPYYRCVCKHPYTGPSCSQVVPVCRPNPCQNGATCSRHKRRSKFTCACPDQFKGKFCEIGSDDCYVGDGYSYRGKMNRTVNQHACLYWNSHLLLQENYNMFMEDAETHGIGEHNFCRNPDADEKPWCFIKVTNDKVKWEYCDVSACSAQDVAYPEESPTEPSTKLPGFDSCGKTEIAERKIKRIYGGFKSTAGKHPWQASLQSSLPLTISMPQGHFCGGALIHPCWVLTAAHCTDIKTRHLKVVLGDQDLKKEEFHEQSFRVEKIFKYSHYNERDEIPHNDIALLKLKPVDGHCALESKYVKTVCLPDGSFPSGSECHISGWGVTETGKGSRQLLDAKVKLIANTLCNSRQLYDHMIDDSMICAGNLQKPGQDTCQGDSGGPLTCEKDGTYYVYGIVSWGLECGKRPGVYTQVTKFLNWIKATIKSESGF

SEQ ID NO: 855 - protein, 1040 aa, Homo sapiens
MLEDISEEDIWEYKSKRKPKRVDPNNGSKNILKSVEKATDGKYQSKRSRNRKRAAEAKEVKDHEVPLGNAGCQTSVASSQNSSCGDGIQQTQDKETTPGKLCRTQKSQHVSPKIRPVYDGYCPNCQMPFSSLIGQTPRWHVFECLDSPPRSETECPDGLLCTSTIPFHYKRYTHFLLAQSRAGDHPFSSPSPASGGSFSETKSGVLCSLEERWSSYQNQTDNSVSNDPLLMTQYFKKSPSLTEASEKISTHIQTSQQALQFTDFVENDKLVGVALRLANNSEHINLPLPENDFSDCEISYSPLQSDEDTHDIDEKPHDSQEQLFFTESSKDGSLEEDDDSCGFFKKRHGPLLKDQDESCPKVNSFLTRDKYDEGLYRFNSLNDLSQPISQNNESTLPYDLACTGGDFVLFPPALAGKLAASVHQATKAKPDEPEFHSAQSNKQKQVIEESSVYNQVSLPLVKSLMLKPFESQVEGYLSSQPTQNTIRKLSSENLNAKNNTNSACFCRKALEGVPVGKATILNTENLSSTPAPKYLKILPSGLKYNARHPSTKVMKQMDIGVYFGLPPKRKEEKLLGESALEGINLNPVPSPNQKRSSQCKRKAEKSLSDLEFDASTLHESQLSVELSSERSQRQKKRCRKSNSLQEGACQKRSDHLINTESEAVNLSKVKVFTKSAHGGLQRGNKKIPESSNVGGSRKKTCPFYKKIPGTGFTVDAFQYGVVEGCTAYFLTHFHSDHYAGLSKHFTFPVYCSEITGNLLKNKLHVQEQYIHPLPLDTECIVNGVKVVLLDANHCPGAVMILFYLPNGTVILHTGDFRADPSMERSLLADQKVHMLYLDTTYCSPEYTFPSQQEVIRFAINTAFEAVTLNPHALVVCGTYSIGKEKVFLAIADVLGSKVGMSQEKYKTLQCLNIPEINSLITTDMCSSLVHLLPMMQINFKGLQSHLKKCGGKYNQILAFRPTGWTHSNKFTRIADVIPQTKGNISIYGIPYSEHSSYLEMKRFVQWLKPQKIIPTVNVGTWKSRSTMEKYFREWKLEAGY

SEQ ID NO: 856 - protein, 1040 aa, Homo sapiens; identical to SEQ ID NO: 855

SEQ ID NO: 857 - protein, 683 aa, Homo sapiens [sequence omitted]

SEQ ID NO: 858 - protein, 489 aa, Homo sapiens
MGNFKSRKPKSIFKAESGRSHGESQETEHVVSSQSECQVRAGTPAHESPQNNAFKCQETVRLQPRIDQRTAISPKDAFETRQDLNEEEAAQVHGVKDPAPASTQSVLADGTDSADPSPVHKDGQNEADSAPEDLHSVGTSRLLYHITDGDNPLLSPRCSIFSQSQRFNLDPESAPSPPSTQQFMMPRSSSRCSCGDGKEPQTITQLTKHIQSLKRKIRKFEEKFEQEKKYRPSHGDKTSNPEVLKWMNDLAKGRKQLKELKLKLSEEQGSAPKGPPRNLLCEQPTVPRENGKPEAAGPEPSSSGEETPDAALTCLKERREQLPPQEDSKVTKQDKNLIKPLYDRYRIIKQILSTPSLIPTIEEEDSDEDRPQGSQQPSLADPASHLPVGDHLTYSNETEPVRALLPDEKKEVKPPALSMSNLHEATMPVLLDHLRETRADKKRLRKALREFEEQFFKQTGRYVSAERFLKLILPRELLLKMSCNFLQER

SEQ ID NO: 859 - protein, 507 aa, Homo sapiens
MFSCFCFSLQDNSFSSTTVTECDEDPVSLHEDQTDCSSLRDENNKENYPDAGALVEEHAPPSWEPQQQNVEATVLVDSVLRPSMGNFKSRKPKSIFKAESGRSHGESQETEHVVSSQSECQVRAGTPAHESPQNNAFKCQETVRLQPRIDQRTAISPKDAFETRQDLNENSLLKLQALESDLCSAFLTNQEEAAQVHGVKDPAPASTQSVLADGTDSADPSPVHKDGQNEADSAPEDLHSVGTSRLLYHITDGDNPLLSPRCSIFSQSQRFNLDPESAPSPPSTQQFMMPRSSSRCSCGDGKEPQTITQLTKHIQSLKRKIRKFEEKFEQEKKYRVTKQDKNLIKPLYDRYRIIKQILSTPSLIPTIEEEDSDEDRPQGSQQPSLADPASHLPVGDHLTYSNETEPVRALLPDEKKEVKPPALSMSNLHEATMPVLLDHLRETRADKKRLRKALREFEEQFFKQTGRSPQKEDRIPMADEYYEYKHIKAKLRLLEVLISKQDVAKTI

SEQ ID NO: 860 - protein, 605 aa, Homo sapiens
MFSCFCFSLQDNSFSSTTVTECDEDPVSLHEDQTDCSSLRDENNKENYPDAGALVEEHAPPSWEPQQQNVEATVLVDSVLRPSMGNFKSRKPKSIFKAESGRSHGESQETEHVVSSQSECQVRAGTPAHESPQNNAFKCQETVRLQPRIDQRTAISPKDAFETRQDLNENSLLKLQALESDLCSAFLTNQEEAAQVHGVKDPAPASTQSVLADGTDSADPSPVHKDGQNEADSAPEDLHSVGTSRLLYHITDGDNPLLSPRCSIFSQSQRFNLDPESAPSPPSTQQFMMPRSSSRCSCGDGKEPQTITQLTKHIQSLKRKIRKFEEKFEQEKKYRPSHGDKTSNPEVLKWMNDLAKGRKQLKELKLKLSEEQGSAPKGPPRNLLCEQPTVPRENGKPEAAGPEPSSSGEETPDAALTCLKERREQLPPQEDSKVTKQDKNLIKPLYDRYRIIKQILSTPSLIPTIEEEDSDEDRPQGSQQPSLADPASHLPVGDHLTYSNETEPVRALLPDEKKEVKPPALSMSNLHEATMPVLLDHLRETRADKKRLRKALREFEEQFFKQTGRSPQKEDRIPMADEYYEYKHIKAKLRLLEVLISKQDVAKTI

SEQ ID NO: 861 - protein, 458 aa, Homo sapiens
MFSCFCFSLQDNSFSSTTVTECDEDPVSLHEDQTDCSSLRDENNKENYPDAGALVEEHAPPSWEPQQQNVEATVLVDSVLRPSMGNFKSRKPKSIFKAESGRSHGESQETEHVVSSQSECQVRAGTPAHESPQNNAFKCQETVRLQPRIDQRTAISPKDAFETRQDLNEEEAAQVHGVKDPAPASTQSVLADGTDSADPSPVHKDGQNEADSAPEDLHSVGTSRLLYHITDGDNPLLSPRCSIFSQSQRFNLDPESAPSPPSTQQFMMPRSSSRCSCGDGKEPQTITQLTKHIQSLKRKIRKFEEKFEQEKKYRPSHGDKTSNPEVLKWMNDLAKGRKQLKELKLKLSEEQGSAPKGPPRNLLCEQPTVPRENGKPEAAGPEPSSSGEETPDAALTCLKERREQLPPQEDSKVTKQDKNLIKPLYDRYRIIKQILSTPSLIPTIVSQDTCMLLLCTDV

SEQ ID NO: 862 - protein, 220 aa, Homo sapiens [sequence omitted]

SEQ ID NO: 863 - protein, 376 aa, Homo sapiens
MEVPRLDHALNSPTSPCEEVIKNLSLEAIQLCDRDGNKSQDSGIAEMEELPVPHNIKISNITCDSFKISWEMDSKSKDRITHYFIDLNKKENKNSNKFKHKDVPTKLVAKAVPLPMTVRGHWFLSPRTEYTVAVQTASKQVDGDYVVSEWSEIIEFCTADYSKVHLTQLLEKAEVIAGRMLKFSVFYRNQHKEYFDYVREHHGNAMQPSVKDNSGSHGSPISGKLEGIFFSCSTEFNTGKPPQDSPYGRYRFEIAAEKLFNPNTNLYFGDFYCMYTAYHYVILVIAPVGSPGDEFCKQRLPQLNSKDNKFLTCTEEDGVLVYHHAQDVILEVIYTDPVDLSLGTVAEITGHQLMSLSTANAKKDPSCKTCNISVGR

SEQ ID NO: 864 - protein, 557 aa, Homo sapiens
RPSSPTMSRQSSITFQSGSRRGFSTTSAITPAAGRSRFSSVSVARSAAGSGGLGRISSAGASFGSRSLYNLGGAKRVSINGCGSSCRSGFGGRASNRFGVNSGFGYGGGVGGGFSGPSFPVCPPGGIQEVTVNQSLLTPLHLQIDPTIQRVRAEEREQIKTLNNKFASFIDKVRFLEQQNKVLETKWALLQEQGSRTVRQNLEPLFDSYTSELRRQLESITTERGRLEAELRNMQDVVEDFKVRYEDEINKRTAAENEFVALKKDVDAAYMNKVELEAKVKSLPEEINFIHSVFDAELSQLQTQVGDTSVVLSMDNNRNLDLDSIIAEVKAQYEDIANRSRAEAESWYQTKYEELQVTAGRHGDDLRNTKQEISEMNRMIQRLRAEIDSVKKQCSSLQTAIADAEQRGELALKDARAKLVDLEEALQKAKQDMARLLREYQELMNIKLALDVEIATYRKLLEGEECRLSGEGVSPVNISVVTSTLSSGYGSGSSIGGGNLGLGGGSGYSFTTSGGHSLGAGLGGSGFSATSNRGLGGSGSSVKFVSTTSSSQKSYTH

SEQ ID NO: 865 - protein, 551 aa, Homo sapiens
MSRQSSITFQSGSRRGFSTTSAITPAAGRSRFSSVSVARSAAGSGGLGRISSAGASFGSRSLYNLGGAKRVSINGCGSSCRSGFGGRASNGFGVNSGFGYGGGVGGGFSGPSFPVCPPGGIQEVTVNQSLLTPLHLQIDPTIQRVRAEEREQIKTLNNKFASFIDKVRFLEQQNKVLETKWALLQEQGSRTVRQNLEPLFDSYTSELRRQLESITTERGRLEAELRNMQDVVEDFKVRYEDEINKRTAAENEFVALKKDVDAAYMNKVELEAKVKSLPEEINFSHSVFDAELSQLQTQVGDTSVVLSMDNNRNLDLDSIIAEVKAQYEDIANRSRAEAESWYQTKYEELQVTAGRHGDDLRNTKQEISEMNRMIQRLRAEIDSVKKQCSSLQTAIADAEQRGELALKDARAKLVDLEEALQKAKQDMARLLREYQELMNIKLALDVEIATYRKLLEGEECRLSGEGVSPVNISVVTSTLSSGYGRGSSIGGGNLGLGGGSGYSFTTSGGHSLGAGLGGSGFSATSNRGLGGSGSSVKFVSTTSSSQKSYTH

SEQ ID NO: 866 - protein, 248 aa, Homo sapiens
MASQSCHISSGCGVKNFSSRSATVPKPGYHSCVSAMAHHGVSPGGLGSRRLGGFGSQSLCTVGSPRIAVSCRWPLHSRGRFGYWAGGLCRPSPPRITSVTINESLLMPLNLEIDPNAQCVKHEEKEHIRCLNKFAAFIDKVRFLEQQNKLLETKLQFYQNRECCESNLEPLLQGYMATLRREAECVEADSGRLASELNCTQEALEGYKKKYEEELALRATAENEFMMLKKDVGYTYLHETDLEANVSR

SEQ ID NO: 867 - DNA, 201 bp, Homo sapiens
agtgatcctggattagaaattctgaatatggcttcttgtgaccttgacagaaactcgctctgtaagaaagaggaggatacaagatcagcttctcccacgayagaggcccaaggcacaagtccagctcatgataatattgcattccaagactctacgagtaaggataaaaccatattaaatctggaagccaaagaggaacca

SEQ ID NO: 868 - DNA, 201 bp, Homo sapiens
ttttttttttttttttttttaactccagtcagaaacaactagaagccattaaacaactacaggaagatgctgtcaaccaggaaggcatccttaggaagagsctccaagaaaccagccaacggctggaggatgtggaggagcaggtagggtggctcatggctacattagattcaggggacatctcctcagatgccctgcaaa

SEQ ID NO: 869 - DNA, 201 bp, Homo sapiens
ggatttaagtgtgactggtttaccttggagaagagagtgaagcttgaagagaggtcccgtgacttggcagaagaaaatttgaagaaagaaatcactaactstttaaaactattagagtctttaacacctctgtgtgaagatgacaaccaggcacaggaaatcattaagaagctggagaagagtataaagtttcttagccag

SEQ ID NO: 870 - DNA, 201 bp, Homo sapiens
cccaagtatggaagagaatggtgttgaacgcgtgtgtcctgagagcctgctgcagtccagggaatattcctcactaccattacccagacacacttcatcgrcagacggtactataacttcaagtgatcctggattagaaattctgaatatggcttcttgtgaccttgacagaaactcgctctgtaagaaagaggaggatac

SEQ ID NO: 871 - DNA, 201 bp, Homo sapiens
tttttttttttttaactccagtcagaaacaactagaagccattaaacaactacaggaagatgctgtcaaccaggaaggcatccttaggaagaggctccaaraaaccagccaacggctggaggatgtggaggagcaggtagggtggctcatggctacattagattcaggggacatctcctcagatgccctgcaaaccatgaa

SEQ ID NO: 872 - DNA, 201 bp, Homo sapiens
agaagaaaaacacattttcagttttgcctgcatcataagagtgagcactccattgctttctttcctggccacactgctacaatccagcactaactatccaygtccagggtaaggatcgagatcgagaagcccacactgccagtgaaaaagctacgtctttactgcataaattagaggaagcaatttcggaacaacggaacc

SEQ ID NO: 873 - DNA, 201 bp, Homo sapiens
gggaagaagtctgcctatgatctttgaatgagctttttaaggaagaaatattatatattgtttgttaaagtttattgaaataaagaatcatttaaatcttsatagagtgaaagctgaaattcttaacaggccaagtattcaaaggaaaaaaaaatactgtttttaaaataaaacttgagtagaaaatgcagattagaaaat

SEQ ID NO: 874 - DNA, 201 bp, Homo sapiens
aatccagcactaactatccatgtccagggtaaggatcgagatcgagaagcccacactgccagtgaaaaagctacgtctttactgcataaattagaggaagyaatttcggaacaacggaaccttcaaactataaatactgaattatcgaacacttgccaggcacttcagcagaagacaaggaaactgaagaagctttttaga

SEQ ID NO: 875 - DNA, 201 bp, Homo sapiens
acaaagtgagaacacttctgctaatgagaaggaggtggaggcagaatttctcagattatctttgggatttaagtgtgactggtttaccttggagaagagartgaagcttgaagagaggtcccgtgacttggcagaagaaaatttgaagaaagaaatcactaactctttaaaactattagagtctttaacacctctgtgtga

SEQ ID NO: 876 - DNA, 108 bp, Homo sapiens
aaatgcctcactctcttccttgatcttcagtctttgtgctctgtcaccactaaacattaaaagggcccaattaggattctcagtacattcttcagtaaggkgttccct

SEQ ID NO: 877 - DNA, 201 bp, Homo sapiens
gaaattctgaatatggcttcttgtgaccttgacagaaactcgctctgtaagaaagaggaggatacaagatcagcttctcccacgatagaggcccaaggcayaagtccagctcatgataatattgcattccaagactctacgagtaaggataaaaccatattaaatctggaagccaaagaggaaccagaaacaatagaagaa

SEQ ID NO: 878 - DNA, 201 bp, Homo sapiens
aaggaggtggaggcagaatttctcagattatctttgggatttaagtgtgactggtttaccttggagaagagagtgaagcttgaagagaggtcccgtgactkggcagaagaaaatttgaagaaagaaatcactaactctttaaaactattagagtctttaacacctctgtgtgaagatgacaaccaggcacaggaaatcatt

SEQ ID NO: 879 - DNA, 201 bp, Homo sapiens
caaagaggaaccagaaacaatagaagaacataaaaaagaacatgcttcaggagactctgtggtttcccctcttcctgtaaccactgtgaaatcggttaacsttagacaaagtgagaacacttctgctaatgagaaggaggtggaggcagaatttctcagattatctttgggatttaagtgtgactggtttaccttggagaa

SEQ ID NO: 880 - DNA, 201 bp, Homo sapiens
tcaacacctttctcaggtgtagccaaccaaatccacactctgtgtgaaaggcccacatatggagaagtaaaggatggtgctttggatgtaaaaagacaachcaagtgcccaggccccacaagtggccccagcccaggaacgaatctctcaggctgcatcaggatgaatgatgacccaagtatggaagagaatggtgttgaa

SEQ ID NO: 881 - DNA, 201 bp, Homo sapiens
tgtgtgaaaggcccacatatggagaagtaaaggatggtgctttggatgtaaaaagacaacacaagtgcccaggccccacaagtggccccagcccaggaacraatctctcaggctgcatcaggatgaatgatgacccaagtatggaagagaatggtgttgaacgcgtgtgtcctgagagcctgctgcagtccagggaatatt

SEQ ID NO: 882 - DNA, 201 bp, Homo sapiens; identical to SEQ ID NO: 867

SEQ ID NO: 883 - DNA, 201 bp, Homo sapiens; identical to SEQ ID NO: 868

SEQ ID NO: 884 - DNA, 201 bp, Homo sapiens; identical to SEQ ID NO: 869

SEQ ID NO: 885 - DNA, 201 bp, Homo sapiens; identical to SEQ ID NO: 870

SEQ ID NO: 886 - DNA, 201 bp, Homo sapiens; identical to SEQ ID NO: 871

SEQ ID NO: 887 - DNA, 201 bp, Homo sapiens; identical to SEQ ID NO: 872

SEQ ID NO: 888 - DNA, 201 bp, Homo sapiens; identical to SEQ ID NO: 873

SEQ ID NO: 889 - DNA, 201 bp, Homo sapiens
aatccagcactaactatccatgtccagggtaaggatcgagatcgagaagcccacactgccagtgaaaaagctacgtctttactgcataaattagaggaagyaatttcggaacaacggaaccttcaaactataaatactgaattatcgaacacttgccaggcacttcagcagaagacaaggaaactgaagacaacaattgag

SEQ ID NO: 890 - DNA, 201 bp, Homo sapiens; identical to SEQ ID NO: 875

SEQ ID NO: 891 - DNA, 108 bp, Homo sapiens; identical to SEQ ID NO: 876

SEQ ID NO: 892 - DNA, 201 bp, Homo sapiens; identical to SEQ ID NO: 877

SEQ ID NO: 893 - DNA, 201 bp, Homo sapiens; identical to SEQ ID NO: 878

SEQ ID NO: 894 - DNA, 201 bp, Homo sapiens; identical to SEQ ID NO: 879

SEQ ID NO: 895 - DNA, 201 bp, Homo sapiens; identical to SEQ ID NO: 880

SEQ ID NO: 896 - DNA, 201 bp, Homo sapiens; identical to SEQ ID NO: 881

SEQ ID NO: 897 - DNA, 201 bp, Homo sapiens; identical to SEQ ID NO: 867

SEQ ID NO: 898 - DNA, 201 bp, Homo sapiens; identical to SEQ ID NO: 869

SEQ ID NO: 899 - DNA, 201 bp, Homo sapiens; identical to SEQ ID NO: 870

SEQ ID NO: 900 - DNA, 201 bp, Homo sapiens; identical to SEQ ID NO: 872

SEQ ID NO: 901 - DNA, 201 bp, Homo sapiens; identical to SEQ ID NO: 873

SEQ ID NO: 902 - DNA, 201 bp, Homo sapiens
aatccagcactaactatccatgtccagggtaaggatcgagatcgagaagcccacactgccagtgaaaaagctacgtctttactgcataaattagaggaagyaatttcggaacaacggaaccttcaaactataaatactgaattatcgaacacttgccaggcacttcagcagaagacaaggaaactgaagacagtgttgcca

SEQ ID NO: 903 - DNA, 201 bp, Homo sapiens; identical to SEQ ID NO: 875

SEQ ID NO: 904 - DNA, 108 bp, Homo sapiens; identical to SEQ ID NO: 876

SEQ ID NO: 905 - DNA, 201 bp, Homo sapiens; identical to SEQ ID NO: 877

SEQ ID NO: 906 - DNA, 201 bp, Homo sapiens; identical to SEQ ID NO: 878

SEQ ID NO: 907 - DNA, 201 bp, Homo sapiens; identical to SEQ ID NO: 879

SEQ ID NO: 908 - DNA, 201 bp, Homo sapiens; identical to SEQ ID NO: 880

SEQ ID NO: 909 - DNA, 201 bp, Homo sapiens; identical to SEQ ID NO: 881

SEQ ID NO: 910 - DNA, 201 bp, Homo sapiens
ggatttaagtgtgactggtttaccttggagaagagagtgaagcttgaagagaggtcccgtgactgggcagaagaaaatttgaagaaagaaatcactaactstttaaaactattagagtctttaacacctctgtgtgaagatgacaaccaggcacaggaaatcattaagaagctggagaagagtataaagtttcttagccag

SEQ ID NO: 911 - DNA, 201 bp, Homo sapiens; identical to SEQ ID NO: 878

SEQ ID NO: 912 - DNA, 201 bp, Homo sapiens; identical to SEQ ID NO: 879

SEQ ID NO: 913 - DNA, 201 bp, Homo sapiens; identical to SEQ ID NO: 877

SEQ ID NO: 914 - DNA, 201 bp, Homo sapiens; identical to SEQ ID NO: 874

SEQ ID NO: 915 - DNA, 201 bp, Homo sapiens
tgtgtgaaaggcccacatatggagaagtaaaggatggtgctttggatgtaaaaagacaacacaagtgcccaggccccacaagtggccccagcccaggaacraatctctcaggctgcatcaggatgaatgatgacccaagtatggaagagaatggtgttgaacgcgtgtgtcctgagagcctgctgcagtccaggggatatt

SEQ ID NO: 916 - DNA, 201 bp, Homo sapiens
acaaagtgagaacacttctgctaatgagaaggaggtggaggcagaatttctcagattatctttgggatttaagtgtgactggtttaccttggagaagagartgaagcttgaagagaggtcccgtgactgggcagaagaaaatttgaagaaagaaatcactaactctttaaaactattagagtctttaacacctctgtgtga

SEQ ID NO: 917 - DNA, 201 bp, Homo sapiens; identical to SEQ ID NO: 867

SEQ ID NO: 918 - DNA, 201 bp, Homo sapiens
cccaagtatggaagagaatggtgttgaacgcgtgtgtcctgagagcctgctgcagtccaggggatattcctcactaccattacccagacacacttcatcgrcagacggtactataacttcaagtgatcctggattagaaattctgaatatggcttcttgtgaccttgacagaaactcgctctgtaagaaagaggaggatac

SEQ ID NO: 919 - DNA, 201 bp, Homo sapiens
tgaattataacccattttcagttttgcctgcatcataagagtgagcactccattgctttctttcctggccacactgctacaatccagcactaactatccaygtccagggtaaggatcgagatcgagaagcccacactgccagtgaaaaagctacgtctttactgcataaattagaggaagcaatttcggaacaacggaacc

SEQ ID NO: 920 - DNA, 201 bp, Homo sapiens; identical to SEQ ID NO: 880

SEQ ID NO: 921 - DNA, 201 bp, Homo sapiens
tgcatcgacgtagcatctctcgtcacatagaaaacatccacttatctggaaagacagctgtctacaaatgtgacgaatgtccgtttacttgcaagagctcrttgaaacttggggctcacaaacagtgtcacacgggtacaacgtcagattgggatgctgtgaattcccagagtgaaagcatttcttcctcactgaatgaag

SEQ ID NO: 922 - DNA, 201 bp, Homo sapiens
ttgtggagcgcagcatcttagagtctatggtcaagcctttgaccaaatctcgaggcaacttttgttgtgagtggtgcagctaccagaccccccgccgagamcgctggtgtgaccacatgatgaagaaacaccgcagtatggtcaagatcctttccagtctcagacagcaacaagaaggaactaatctacctgatgtgccga

SEQ ID NO: 923 - DNA, 201 bp, Homo sapiens
agctgcaatgatgagaggggtcgaagggccccaaggctccccccggccacccgcccccatacaacagctgaaccgaagcagctctgagagagatggccctyctgtggagaatgagatgttcttttgccagcactgtgattatgggaaccggacggtcaaaggggtactcattcattatcagaagaagcaccgagacttcaa

SEQ ID NO: 924 - DNA, 201 bp, Homo sapiens
caagaataattaagcatcagaagatgtatcacaaaaacaatttgaaggagaccactgctcccccacctgctcctgctccaatgccagaccctgtggttccrcccgtatcactgcaggacccctgcaaggaactgccagcagaggttgtggagcgcagcatcttagagtctatggtcaagcctttgaccaaatctcgaggca

SEQ ID NO: 925 - DNA, 201 bp, Homo sapiens
gaccaattcttctgctgacctggaaactaacagcatgctaaatgactctagttctgatgaagagttaaatgaaatagacagtgagaatggtttaagtgctrtggatcaccagacatcaggcctgtctgcagagcagctgatgggctcagatggcaacaaattattggagaccaaggggattccatttagaagattcatgaa

SEQ ID NO: 926 - DNA, 201 bp, Homo sapiens
agaatgagatgttcttttgccagcactgtgattatgggaaccggacggtcaaaggggtactcattcattatcagaagaagcaccgagacttcaaggccaaygcagatgtgatccggcagcatacggccaccattcgaagcctctgcgaccgaaatcagaagaagcctgccagctgcgtgcttgtctccccctctaatctgg

SEQ ID NO: 927 - DNA, 201 bp, Homo sapiens
ctttggagaaactaaaaatccactacgagaagtatcacaatcagcctgaatttgatgtcttttcccagtcgcccccgaagctgccagtccccctcgagccygagatgaccactgaagtgagcccttcccaagtctccatcactgaggaggaggtgggagaggagcccgtgtccacttctcacttctctacctcccacctgg

SEQ ID NO: 928 - DNA, 201 bp, Homo sapiens
attcttcagcttccaagttttcgcccatgtcttaccctcagatgaagccgaagtcacctcacaattctggtctagttaacttgacagagagatcccgttayggaatgactgacatgaccaattcttctgctgacctggaaactaacagcatgctaaatgactctagttctgatgaagagttaaatgaaatagacagtgaga

SEQ ID NO: 929 - DNA, 201 bp, Homo sapiens
ccaaagaagcagcacgccagcaagttggggggctacttcacggccgtctatgcagatgagcatgagaagcccacactgatggaagaagaggagagaggcarctttgagaaagccgaggtggagggtgaagctcaggaaatcgagtggctcccattccgctgcatcaaatgcttcaagctgtcctttagcactgcagagctg

SEQ ID NO: 930 - DNA, 201 bp, Homo sapiens
tgtggacgggcgttttcacagggctctgagtgggaaagacatgtgctgagacacggcatggcattgaatgacaccaagcaggtgagcagagaagaaatccwcccaaaagagatcatggagaacagtgttaaaatgccctccatagaggaaaaggaagatgacgaggccattgggatagacttttccctaaagaatgaaaca

SEQ ID NO: 931 - DNA, 201 bp, Homo sapiens
ccaaccccatccgcaaaggtctggcagcccactaccagaagcgccacgacattgatgcgtattacactcactgcttggcagcctccaggaccatcagcgayaagcccaacaaagtgatcatcccatccccgcccaaggacgactcccctcagctgagcgaggaactccggcgggcagtggagaagaaaaagtgctccttgt

SEQ ID NO: 932 - DNA, 201 bp, Homo sapiens
aagaggaagaggaagacaacgaagtcgagatagaggttgagttggacagggaggaagaaccgacagaacccatcatagaggttcccacttccttttctgcscaacagatatgggtaagagataccagtgagccccagaaagagcccaacttcagaaacatcacccacgattacaatgccaccaatggggctgagattgagc

SEQ ID NO: 933 - DNA, 201 bp, Homo sapiens
tcatagaggttcccacttccttttctgcccaacagatatgggtaagagataccagtgagccccagaaagagcccaacttcagaaacatcacccacgattayaatgccaccaatggggctgagattgagctcaccctttctgaagatgaagaggattattatggctcctcaacaaacttgaaagatcaccaagtttccaata

SEQ ID NO: 934 - DNA, 201 bp, Homo sapiens; identical to SEQ ID NO: 921

SEQ ID NO: 935 - DNA, 201 bp, Homo sapiens; identical to SEQ ID NO: 922

SEQ ID NO: 936 - DNA, 201 bp, Homo sapiens; identical to SEQ ID NO: 923

SEQ ID NO: 937 - DNA, 201 bp, Homo sapiens; identical to SEQ ID NO: 924

SEQ ID NO: 938 - DNA, 201 bp, Homo sapiens; identical to SEQ ID NO: 925

SEQ ID NO: 939 - DNA, 201 bp, Homo sapiens; identical to SEQ ID NO: 926

SEQ ID NO: 940 - DNA, 201 bp, Homo sapiens; identical to SEQ ID NO: 927

SEQ ID NO: 941 - DNA, 201 bp, Homo sapiens; identical to SEQ ID NO: 928

SEQ ID NO: 942 - DNA, 201 bp, Homo sapiens; identical to SEQ ID NO: 929

SEQ ID NO: 943 - DNA, 201 bp, Homo sapiens; identical to SEQ ID NO: 930

SEQ ID NO: 944 - DNA, 201 bp, Homo sapiens; identical to SEQ ID NO: 931

SEQ ID NO: 945 - DNA, 201 bp, Homo sapiens; identical to SEQ ID NO: 932

SEQ ID NO: 946 - DNA, 201 bp, Homo sapiens; identical to SEQ ID NO: 933

SEQ ID NO: 947 - DNA, 168 bp, Homo sapiens
cagtgaagtggacatgttgaaaattaggtctgaattcaagagaaagtatggcatgtccccgtactattacatccagcaagacactaagaacgactacccaraaagcactgctgtacctgtgtggtggagatgactgaagcccaacatagcttgagcttccagaaacgg

SEQ ID NO: 948 - DNA, 201 bp, Homo sapiens
gttaaaggagacctggaaaatgctttcctgaacctggtccagtgcattcagaacaagcccctgtattttgctgattggctgtactactccatgaagggccagggggctcgagataaggtcctgatcagaatcatcgtctcccgcagtgaagtggacatgttgaaaattaggtctgaattcaagagaaagtatggcatgtcc

SEQ ID NO: 949 - DNA, 201 bp, Homo sapiens
gcctacaccaactttgatgctgagggggatgctttgaacattgaaaggaccatcaggacaaaaggtgtgggtaagttcaccattgtcaacattttgaccarcagcaggaatgctcggagagaggatgttgcctttgcctagcagagaaggaccacaaaggaacttacatcagcactgaagtcagccttactggccacctgg

SEQ ID NO: 950 - DNA, 201 bp, Homo sapiens
ttcataacctctcctaccagctggaggtagagctcccagagaaatattcccagaatatctatattcaaaacccaaatgtccagactaacaacaaaaccggragtggaccaatgccgacatcagtggctcagacagtcgtccagaaggaaaatggcctgcagcacacccgaaagatggtgcatgtcagtgacccaagtgtga

SEQ ID NO: 951 - DNA, 201 bp, Homo sapiens
accaatgccgacatcagtggctcagacagtcgtccagaaggaaaatggcctgcagcacacccgaaagatggtgcatgtcagtgacccaagtgtgaaaaagmcagccaacttgctgctgaggaatctgtcccagaatctttctctgcagaataaaattgccaaagaaactctccccagtttggtctccatcattcctgatac

SEQ ID NO: 952 - DNA, 201 bp, Homo sapiens
acagtcccgagtactgaccttctcattgaaactacagcctctgcctgttacatgttgaacaacgtaatccaaaacagttaccagaatgcacagcgccttcygaataccgggggcatccagaaaattatgaccatcagtgcaggcgatgcctatgcctccaacaaagcaagtaaagctgcttccatcctcctgtattctctg

SEQ ID NO: 953 - DNA, 201 bp, Homo sapiens
atggcctgaaggagactacccaaaagcgaatggtttgctcgattttgacacagtctacaacccactggatgtctaagaaacatgagtgctgctggccctgrtaggagaaaagcaatgagaagatgtgaccgactcattgactcactggtccattatgtcagaggaaccattgcggattaccagccagatgacaaggccacg

SEQ ID NO: 954 - DNA, 201 bp, Homo sapiens
actccattgtgataaggatgtatctgtccttgatcgccaagagtgtcccaaactacacacaggaagcctccttaggcgctctccagaacctcacagccggragtggaccaatgccgacatcagtggctcagacagtcgtccagaaggaaaatggcctgcagcacacccgaaagatggtgcatgtcagtgacccaagtgtga

SEQ ID NO: 955 - DNA, 201 bp, Homo sapiens
aacacctatttttctactacccagcccaagaaacctcaaaagcatgcctcgtttctatcattttctatttccatggtcccccgaatccagaaaacaagtayaacataatcttatgagtcttccagaagacttttgcaagcttgccaccagtagatactggtcacaggctctacaaatagtggtctttgttattagggctta

SEQ ID NO: 956 - DNA, 201 bp, Homo sapiens; identical to SEQ ID NO: 951

SEQ ID NO: 957 - DNA, 201 bp, Homo sapiens
taatgcctttcctgtattttttaggccactgccctggactagtggaagaatggactctagtctttatctgcaagaggaactaaggccttctatcagactgyccggccagcctggggcactgaaaatacagctcattttaatgagttacattatcaaccagctttgcccagcatttaagaaatatcacagggccactaaatc

SEQ ID NO: 958 - DNA, 201 bp, Homo sapiens; identical to SEQ ID NO: 952

SEQ ID NO: 959 - DNA, 201 bp, Homo sapiens; identical to SEQ ID NO: 953

SEQ ID NO: 960 - DNA, 201 bp, Homo sapiens
cctctgatttttaaataaacttaagaaatttagattacagagtatgcatgactgtaagaaaaagaaattgagaggaagtgatcatagcaaattaaagaaayctttttctcccaaaacttaaagtaaaataaataaaaataaaaataaatcttttccccagagaaaggcaactgtgattataaagtttaaccttcccccaaa

SEQ ID NO: 961 - DNA, 115 bp, Homo sapiens
atgcccaatctcttycgaaaagtatacagaaactctccaactacaacaaatgaaagcagattcatctgggcagcaggccctgagctaggtgctggctacaaggtggtgagagaga

SEQ ID NO: 962 - DNA, 201 bp, Homo sapiens
agcaccaacagatccgccaaatccagaagatgatggaaatcatgacccaagaggtgcagacaaatgacttgaaagaagtggtcaataaattgattctagayagcattggaaaagacatagaaaaggcttgccaatctatttaccttctccacgatgtctttgttagaaaagtaaaaatgctgaagaagctcaagtttgaat

SEQ ID NO: 963 - DNA, 201 bp, Homo sapiens
ggctactggaaatacctttctagatatgtgtcacctgtatgacatgtttgacattaagtgtgagttctcggcagtcaaggacattgtcaaccacttctccyctcattaccaaacacatgaagcagggtatgacaactcaagcatccaggtggaaggaatgacacaaacagaacctgtctcctttagcttccaagactcaaa

SEQ ID NO: 964 - DNA, 201 bp, Homo sapiens
ccttgaagtctccagagaaggggggatataaggctactggaaatacctttctagatatgtgtcacctgtatgacatgtttgacattaagtgtgagttctcrgcagtcaaggacattgtcaaccacttctcccctcattaccaaacacatgaagcagggtatgacaactcaagcatccaggtggaaggaatgacacaaacag

SEQ ID NO: 965 - DNA, 201 bp, Homo sapiens
tcatccctacatctactagtggtgccaaggctgtgggccaggttactcccgagctgaatgggaagctcattggcatggccttccatgtctccactgccaamttgttggtcatggacctgacttgccatctggagaaagctgccaaatatgatgacatcaagaaggtggtaaagcaggaattggaggccccctcatgggcat

SEQ ID NO: 966 - DNA, 201 bp, Homo sapiens
catccctacatctactagtggtgccaaggctgtgggccaggttactcccgagctgaatgggaagctcattggcatggccttccatgtctccactgccaaaktgttggtcatggacctgacttgccatctggagaaagctgccaaatatgatgacatcaagaaggtggtaaagcaggaattggaggccccctcatgggcatc

SEQ ID NO: 967 - DNA, 172 bp, Homo sapiens
ctctctgctcctcccgtaagacagacagctgcatcttgtcatgcagcaccagctgtatccctgagacaccayggtgaaggtgaagaccaaagtaaatggatttggccatgttgggtgtctggtcaccagggctgcttttaactttggcaaagtggatactgtcaccatcaat

SEQ ID NO: 968 - DNA, 201 bp, Homo sapiens
acaaggcagaggcccagattgcagccaaaaatttggacgaggactacttctccattgggcggctggctgaattttgcaaggcatctgcagaagtagccttrggcgagaatagcgaagtctcgaaaagtggccggtttgtcactgtgcagaccatttctggaactagtgccttaaggatcagagctagttttctgcaaagat

SEQ ID NO: 969 - DNA, 201 bp, Homo sapiens
ggcaatggtaacaaggatgcctgggctgtgcgccactctgccaattatacgccattgtcgctgccaatcatacaccaagaacatggtcttacacagtgagrgtgtggcaggcttcaccatggtttgcaaagacgcagatgaagccaagagggtagagtcacatttgaagatcttgatgtgtcccatgtattccaaccctcc

SEQ ID NO: 970 - DNA, 201 bp, Homo sapiens
acaaaaatctctttgcactcttcgacatggcctaccaaggctttgccagtggcaatggtaacaaggatgcctgggctgtgcgccactctgccaattatacrccattgtcgctgccaatcatacaccaagaacatggtcttacacagtgagggtgtggcaggcttcaccatggtttgcaaagacgcagatgaagccaagagg

SEQ ID NO: 971 - DNA, 201 bp, Homo sapiens
gaatctgggagttagtgcctacagggaccacaacggaaagccttacagcatccacaaggcagaggcccagattgcagccaaaaatttggacgaggactacytctccattgggcggctggctgaattttgcaaggcatctgcagaagtagccttgggcgagaatagcgaagtctcgaaaagtggccggtttgtcactgtgca

SEQ ID NO: 972 - DNA, 201 bp, Homo sapiens
agcatccacaaggcagaggcccagattgcagccaaaaatttggacgaggactacttctccattgggcggctggctgaattttgcaaggcatctgcagaagyagccttgggcgagaatagcgaagtctcgaaaagtggccggtttgtcactgtgcagaccatttctggaactagtgccttaaggatcagagctagttttctg

SEQ ID NO: 973 - DNA, 201 bp, Homo sapiens
aatgggacccgtttgcttctaccattctgaatgctccagatttgtgaaaacaatggttgcaagaagtgaaaggcaaggcccatcgcatcattagcatgcaractcagctggtctctaacctcaagaaggagggttctacccactactggccacacatcactgcccaaattgacatgttttgtttcacagggttaaagcccg

SEQ ID NO: 974 - DNA, 201 bp, Homo sapiens
gtttgtcactgtgcagaccatttctggaactagtgccttaaggatcagagctagttttctgcaaagatttcttaagttcagccaagatgtctttctgcccraaccaacctggggaagtcgcacacccatcttcagggatactggcatgcagctacaaggttatcgatactatgaccgcaagacttgcggttttgacttcac

SEQ ID NO: 975 - DNA, 201 bp, Homo sapiens
agaacatggtcttacacagtgagggtgtggcaggcttcaccatggtttgcaaagacgcagatgaagccaagagggtagagtcacatttgaagatcttgatstgtcccatgtattccaaccctcccctcaatgggacccgtttgcttctaccattctgaatgctccagatttgtgaaaacaatggttgcaagaagtgaaagg

SEQ ID NO: 976 - DNA, 201 bp, Homo sapiens
ttgcttctaccattctgaatgctccagatttgtgaaaacaatggttgcaagaagtgaaaggcaaggcccatcgcatcattagcatgcagactcagctggtstctaacctcaagaaggagggttctacccactactggccacacatcactgcccaaattgacatgttttgtttcacagggttaaagcccgaacaggtggaaa

SEQ ID NO: 977 - DNA, 201 bp, Homo sapiens
ggctatgaagtagagtcatctttaaagaatgccagctttgagaaggaggcaacctgtgaaaagctaaacaggtccaattctgaacttgaggatgaaatacyctgtctagaaaaagagttaaaataagagaaatctaaacattctgaacaaggtgaattgatggtggatatttgcaaaaggatacagtctctagaagatgag

SEQ ID NO: 978 - DNA, 125 bp, Homo sapiens
ggttgtggcagcactgcctgaaagygtgagaccagactctaatccttatggttttccatgggagttggtgatatgtgcagctgtacatggattttttgctgttctctttttttgtgtggagaagt

SEQ ID NO: 979 - DNA, 201 bp, Homo sapiens
tttccgggggatacaaggggcctgttcatgagaagaggacctcctttccccccacctcctccaggaaccatgtttggagcttctcaagattattttccacsaagggatttcccagatccaccacatgctccatttgcaatgagaaatgtctatccagcgaggcgtttcctccttaccttcccccaaaacctggatttttcc

SEQ ID NO: 980 - DNA, 201 bp, Homo sapiens
ccttaccttcccccaaaacctggatttttccccataaaccccacattctgaaggtagaagtgagttccctgcagggctgattctgccttcaaatgagcctrctactgaacatccagaaccacagcaagaaacctgacaatatttttgctctcttcaaaagtaattttgactgatctcattttcagtttaagtaactgctgt

SEQ ID NO: 981 - DNA, 201 bp, Homo sapiens
tgattcatctctccctgctgaaaatgaagcaactggcccttacttttctcctccacctcttgctccaatcagaggtccattgtttccgggggatacaaggrgcctgttcatgagaagaggacctcctttccccccacctcctccaggaaccatgtttggagcttctcaagattattttccaccaagggatttcccagatcc

SEQ ID NO: 982 - DNA, 201 bp, Homo sapiens
ccctcatgttcctcctgctctgcctcaagcaccccttctttgctgcacagcaagaaacagttctgacagagcagacagtttgagatctgtaacattctaaygagaatatctctaaggagaatatttggcttttctcactttctctgtagagaaacaaattgtcattcttctcttacagaggggcagtagagtgtgtctggg

SEQ ID NO: 983 - DNA, 201 bp, Homo sapiens
atagatgtaaagaagacaacctgactcttttctgaaacattcagagcatcctctaccccgaggatcatgggaattccctcatgttcctcctgctctgcctyaagcaccccttctttgctgcacagcaagaaacagttctgacagagcagacagtttgagatctgtaacattctaatgagaatatctctaaggagaatattt

SEQ ID NO: 984 - DNA, 201 bp, Homo sapiens
tcacatttcaggattctgctggagcaaggaataaccgagatggaaataacctaagaaaaagagggcatccagctccatctcccatttggcgtcatgctgcyctgggtctggtaactctttgcctgatgttgctgattgggctggtgacgttggggatgatgtttttgcagatatctaatgacattaactcagattcagaga

SEQ ID NO: 985 - DNA, 201 bp, Homo sapiens
acctaagaaaaagagggcatccagctccatctcccatttggcgtcatgctgctctgggtctggtaactctttgcctgatgttgctgattgggctggtgacrttggggatgatgtttttgcagatatctaatgacattaactcagattcagagaaattgagtcaacttcagaaaaccatccaacagcagcaggataacttat

SEQ ID NO: 986 - DNA, 201 bp, Homo sapiens
tgaaaaacacatgctgttcccaggcctcaagatattgaaacattaattagataatttaaagtagcgttttcttctacaatgtctgaagaagtgacctacgygacactcacatttcaggattctgctggagcaaggaataaccgagatggaaataacctaagaaaaagagggcatccagctccatctcccatttggcgtcat

SEQ ID NO: 987 - DNA, 201 bp, Homo sapiens
cttgaaaaacacatgctgttcccaggcctcaagatattgaaacattaattagataatttaaagtagcgttttcttctacaatgtctgaagaagtgacctaygcgacactcacatttcaggattctgctggagcaaggaataaccgagatggaaataacctaagaaaaagagggcatccagctccatctcccatttggcgtc

SEQ ID NO: 988 - DNA, 201 bp, Homo sapiens
gaaaaccatccaacagcagcaggataacttatcccagcaactgggcaactccaacaacttgtccatggaggaggaatttctcaagtcacagatctccagtstactgaagaggcaggaacaaatggccatcaaactgtgccaagagctaatcattcatacttcagaccacagatgtaatccatgtcctaagatgtggcaatg

SEQ ID NO: 989 - DNA, 201 bp, Homo sapiens
cagccttgaaaaacacatgctgttcccaggcctcaagatattgaaacattaattagataatttaaagtagcgttttcttctacaatgtctgaagaagtgamctacgcgacactcacatttcaggattctgctggagcaaggaataaccgagatggaaataacctaagaaaaagagggcatccagctccatctcccatttgg

SEQ ID NO: 990 - DNA, 201 bp, Homo sapiens
agttccaaactcctcatccaccagagagtacatactggagagaagccctatgagtgcagcaagtgtgggaagggcttcagccagagctccaaccttcacakccaccagcgggttcacaagaaagatcctcgctaactgacattagcccattcaggtcttcacagcgctcatactgtaaaaactgttaaatatttagtatca

SEQ ID NO: 991 - DNA, 201 bp, Homo sapiens
atacaggcgaaaaaccttataaatgtgacaagtgtgggaagggctttagtcagagctccaaactgcacatccaccagcgagtccacactggagagaagccytatgagtgtgaggagtgtggtatgagcttcagtcagcgctcaaacctgcacatccaccagcgagtacacacaggagagaggccctacaagtgtggtgagt

SEQ ID NO: 992 - DNA, 201 bp, Homo sapiens
gcctgaactagatatttccccttgtcaacagtggggagaagcatcttctcctatttccagaaacagggacagtgtgatgactcttcaaagtggttgtttcraaaacattgaaagtgaaacatatttgcctttgaaagtctcaagccaaatagacacacaagactcttcagtgaagttctgtaagaatgagcctcaggatca

SEQ ID NO: 993 - DNA, 201 bp, Homo sapiens
agaagccctatgagtgtgaggagtgtggtatgagcttcagtcagcgctcaaacctgcacatccaccagcgagtacacacaggagagaggccctacaagtgwggtgagtgtgggaagggcttcagtcagagctcgaaccttcacattcaccggtgcatccacacaggagagaagccttaccaatgctatgagtgtgggaagg

SEQ ID NO: 994 - DNA, 201 bp, Homo sapiens
atttaagtatcaagcactttgttatgctgtacaatgaatggattgttcttgtttctcagatgggtagagtaaaagtgtctgtactttacaattcaactacwtgttctacccagcattttaacggcaagaactttatatttattctcaagcagggcatgtttccctttgttcacattctctgagaaattgaaactctggttt

SEQ ID NO: 995 - DNA, 128 bp, Homo sapiens
actttacaattcaactacttgttctacccagcattttaacggcaagaactttatatttattctcaagcagggcatgtttccctttgttcacattctctgakaaattgaaactctggtttctcttcaaa

SEQ ID NO: 996 - DNA, 201 bp, Homo sapiens
ggagaaaccctgtgaccataataactgtgggaaaatacttaacaccagcccagatggtcatccatatgagaaaatccacactgcagagaaacaatacgaakgtagtcagtgtggtaagaacttcagtcaaagctcagagctactacttcatcagagagaccacacagaagaaaaaccctacaaatgtgagcaatgtgggaa

SEQ ID NO: 997 - DNA, 201 bp, Homo sapiens
ctggactctgctcccaggaagctgtgcggagctgtgatgctgggcaactacagaaacttggtcttggagacttgaatgaaaattctgtggagaatcttcarcagaaaacacttcaggatctgttacatgagctttcctcctggctagttttggaaggcatggccagtacaattactggaagtcaggattgtattgtgaatc

SEQ ID NO: 998 - DNA, 201 bp, Homo sapiens
cagaatggccagttaaaagaatctttggatcccattgactgtaactgcaaagacattcatggatggaaatcacaggtggtcagttgtagtcagcagagagstcatacagaggagaaaccctgtgaccataataactgtgggaaaatacttaacaccagcccagatggtcatccatatgagaaaatccacactgcagagaaa

SEQ ID NO: 999 - DNA, 201 bp, Homo sapiens
aaccctacaaatgtgagcaatgtgggaagggcttcacaaggagctcgagtctgcttatccatcaggcagtccacacagatgagaagccttataagtgtgasaagtgtgggaagggcttcaccaggagctcaagtctgctcatccatcatgccgtccatacaggcgaaaaaccttataaatgtgacaagtgtgggaagggct

SEQ ID NO: 1000 - DNA, 201 bp, Homo sapiens; identical to SEQ ID NO: 990

SEQ ID NO: 1001 - DNA, 201 bp, Homo sapiens; identical to SEQ ID NO: 991

SEQ ID NO: 1002 - DNA, 201 bp, Homo sapiens; identical to SEQ ID NO: 992

SEQ ID NO: 1003 - DNA, 201 bp, Homo sapiens; identical to SEQ ID NO: 993

SEQ ID NO: 1004 - DNA, 201 bp, Homo sapiens; identical to SEQ ID NO: 994

SEQ ID NO: 1005 - DNA, 128 bp, Homo sapiens; identical to SEQ ID NO: 995

SEQ ID NO: 1006 - DNA, 196 bp, Homo sapiens
ctagtcccgattatggttattacagtttgatgaaatgtggctgagatcattggcactgtggagattaagaaatgtgaggtcagagtgttgggtaarttgttcctgcgagtgttaaggttgtcaggataatggtgggaatggggtgaagatgacaactcagcaatgacacaagaagagagtgacacagaaagattca

SEQ ID NO: 1007 - DNA, 201 bp, Homo sapiens; identical to SEQ ID NO: 996

SEQ ID NO: 1008 - DNA, 201 bp, Homo sapiens; identical to SEQ ID NO: 997

SEQ ID NO: 1009 - DNA, 201 bp, Homo sapiens; identical to SEQ ID NO: 998

SEQ ID NO: 1010 - DNA, 201 bp, Homo sapiens; identical to SEQ ID NO: 999

SEQ ID NO: 1011 - DNA, 201 bp, Homo sapiens; identical to SEQ ID NO: 996

SEQ ID NO: 1012 - DNA, 201 bp, Homo sapiens
ctagtcccgattatggttattacagtttgatgaaatgtggctgagatcattggcactgtggagattaagaaatgtgaggtcagagtgttgggtaaattgtrcctgcgagtgttaaggttgtcaggataatggtgggaatggggtgaagatgacaactcagcaatgacacaagaagagagtgacacagaaagattcagtagc

SEQ ID NO: 1013 - DNA, 201 bp, Homo sapiens; identical to SEQ ID NO: 997

SEQ ID NO: 1014 - DNA, 201 bp, Homo sapiens; identical to SEQ ID NO: 998

SEQ ID NO: 1015 - DNA, 201 bp, Homo sapiens
atttaagtatcaagcactttgttatgctgtacaatgaatggattgttcttgtttctcagatgggtagagtaaaagtgtctgtactttacaattcaactacwtgttctacccagcatttaacggcaagaactttatatttattctcaagcagggcatgtttccctttgttcacattctctgagaaattgaaactctggtttc

SEQ ID NO: 1016 - DNA, 201 bp, Homo sapiens; identical to SEQ ID NO: 992

SEQ ID NO: 1017 - DNA, 201 bp, Homo sapiens
agaagccctatgagtgtgaggagtgtggtatgagcttcagtcagcgctcaaacctgcacatccaccagcgagatcacacaggagagaggccctacaagtgwggtgagtgtgggaagggcttcagtcagagctcgaaccttcacattcaccggtgcatccacacaggagagaagccttaccaatgctatgagtgtgggaagg

SEQ ID NO: 1018 - DNA, 201 bp, Homo sapiens
atacaggcgaaaaaccttataaatgtgacaagtgtgggaagggctttagtcagagctccaaactgcacatccaccagcgagtccacactggagagaagccytatgagtgtgaggagtgtggtatgagcttcagtcagcgctcaaacctgcacatccaccagcgagatcacacaggagagaggccctacaagtgtggtgagt

SEQ ID NO: 1019 - DNA, 201 bp, Homo sapiens; identical to SEQ ID NO: 999

SEQ ID NO: 1020 - DNA, 201 bp, Homo sapiens; identical to SEQ ID NO: 990

SEQ ID NO: 1021 - DNA, 201 bp, Homo sapiens
caaacacacaggaaaacttgaaaaaccaagaccatctgtttcacacggaagagcacaattacttcggaagagtgctgaaaagattgaggaaactgttagckatagctcctcagaaagtgaggaagatgaagaaccacctgaccatcgtcaggaagcaagtgcagatttgccatcagaatattggcaaattcagaagctggt

SEQ ID NO: 1022 - DNA, 201 bp, Homo sapiens
acttctttcctactttttttgcatccctctctcttccttttcctgccgtctttcttgtagacatactagttgattgctgtatttgctgactttatatggayattattttctcccttggccaagattgttttaaaatcttgcaaggaaaatgtcttgcttttgatcacttctagcgattaaaggagatggtttgttaatgtc

SEQ ID NO: 1023 - DNA, 201 bp, Homo sapiens
gctcagcaaaagaaatccaagaggacaaacacacaggaaaacttgaaaaaccaagaccatctgtttcacacggaagagcacaattacttcggaagagtgckgaaaagattgaggaaactgttagcgatagctcctcagaaagtgaggaagatgaagaaccacctgaccatcgtcaggaagcaagtgcagatttgccatcag

SEQ ID NO: 1024 - DNA, 172 bp, Homo sapiens
taaaggggattagcttcaatgaagaccagcaaaaggaaaaggatcagcttggcaaagcccccaagaaggaaraagcagctgccctccacaaagacatttctggttcaggcaagaggtcactggagaagaaccaaattaatttttggaggaatcaaatgaccaagagatggga

SEQ ID NO: 1025 - DNA, 201 bp, Homo sapiens
actacctacttcttgagtagagagatcacattaaatttattgctgtatctcgcagggcatcttgctaatgtgcacaggctcgcctccctacctctgccctratggtgcgaaggggagagagcgaggttccttagtggcagggctttgctgttcttcactctcagccccctgaaagcagttcttcctgcctctgagcctgtc

SEQ ID NO: 1026 - DNA, 127 bp, Homo sapiens
tgctgtatttgctgactttatatggatattattttctcccttggccaagattgttttaaaatcttgcaaggaaaatgtcttgcttttgatcacttctagcrattaaaggagatggtttgttaatgtc

SEQ ID NO: 1027 - DNA, 201 bp, Homo sapiens
cacttatgttctgccttctgccatcctgatggttcaggttgtctgtcttactacctacttcttgagtagagagatcacattaaatttattgctgtatctcrcagggcatcttgctaatgtgcacaggctcgcctccctacctctgccctaatggtgcgaaggggagagagcgaggttccttagtggcagggctttgctgtt

SEQ ID NO: 1028 - DNA, 201 bp, Homo sapiens
gatgatgctgtaccctaattctaaaggaagcaaggaacccccttttcagctaccttactgataagcacttatgttctgccttctgccatcctgatggttcrggttgtctgtcttactacctacttcttgagtagagagatcacattaaatttattgctgtatctcgcagggcatcttgctaatgtgcacaggctcgcctcc

SEQ ID NO: 1029 - DNA, 201 bp, Homo sapiens
agcaaaagatgggctaggaagcagaataccagagtaattagaagcacgatctttgacgttggaaagaccagttgagttgaaattctgccacttactcaatrgccttggatgactgatgatgctgtaccctaattctaaaggaagcaaggaacccccttttcagctaccttactgataagcacttatgttctgccttctgcc

SEQ ID NO: 1030 - DNA, 201 bp, Homo sapiens
tgcggaggtgagacgctgtcgtgtattgatctcagcccaaaacagaggctctgccaagtgcctgtgccagagcccaacacctaccatggcaccttcaccaycttaaatttccaaggaaactatatttcttacattgatggaaatgtatggaaagcatacagttggaccgggaaactaattctcaatgaaaattatttgact

SEQ ID NO: 1031 - DNA, 201 bp, Homo sapiens
gggccgcctgagccctggtcttccgctcctcccatctcccatgggaatctccccatgcccctattgccccagcagatccgggggactttgattacctgggrccctctgcttcctcgcagatgtcagccccaccccaggaatcaactgaaaatttggttccattcctggacacggattcagctggagagctgcccctagggc

SEQ ID NO: 1032 - DNA, 201 bp, Homo sapiens
gggggccgcctgagccctggtcttccgctcctcccatctcccatgggaatctccccatgcccctattgccccagcagatccgggggactttgattacctgrggccctctgcttcctcgcagatgtcagccccaccccaggaatcaactgaaaatttggttccattcctggacacggattcagctggagagctgcccctagg

SEQ ID NO: 1033 - DNA, 201 bp, Homo sapiens
tgggaatctccccatgcccctattgccccagcagatccgggggactttgattacctggggccctctgcttcctcgcagatgtcagccccaccccaggaatyaactgaaaatttggttccattcctggacacggattcagctggagagctgcccctagggccagggcagttctcagttgcacaccaggatttcaatgacaag

SEQ ID NO: 1034 - DNA, 201 bp, Homo sapiens
caccaacatatgtgagctctgtacctgcggaggtgagacgctgtcgtgtattgatctcagcccaaaacagaggctctgccaagtgcctgtgccagagcccracacctaccatggcaccttcaccatcttaaatttccaaggaaactatatttcttacattgatggaaatgtatggaaagcatacagttggaccgggaaact

SEQ ID NO: 1035 - DNA, 201 bp, Homo sapiens
atctcagcccaaaacagaggctctgccaagtgcctgtgccagagcccaacacctaccatggcaccttcaccatcttaaatttccaaggaaactatatttcwtacattgatggaaatgtatggaaagcatacagttggaccgggaaactaattctcaatgaaaattatttgactgaattacataacgattcatttaaaggcc

SEQ ID NO: 1036 - DNA, 201 bp, Homo sapiens
cagcccaaaacagaggctctgccaagtgcctgtgccagagcccaacacctaccatggcaccttcaccatcttaaatttccaaggaaactatatttcttacmttgatggaaatgtatggaaagcatacagttggaccgggaaactaattctcaatgaaaattatttgactgaattacataacgattcatttaaaggcctgct

SEQ ID NO: 1037 - DNA, 201 bp, Homo sapiens
atggcaccttcaccatcttaaatttccaaggaaactatatttcttacattgatggaaatgtatggaaagcatacagttggaccgggaaactaattctcaawgaaaattatttgactgaattacataacgattcatttaaaggcctgctatccctccagtatttagatttatcctgcaataaaatacagtctatcgaaagac

SEQ ID NO: 1038 - DNA, 201 bp, Homo sapiens
cttcaccatcttaaatttccaaggaaactatatttcttacattgatggaaatgtatggaaagcatacagttggaccgggaaactaattctcaatgaaaatwatttgactgaattacataacgattcatttaaaggcctgctatccctccagtatttagatttatcctgcaataaaatacagtctatcgaaagacatacatt

SEQ ID NO: 1039 - DNA, 201 bp, Homo sapiens
tcaccatcttaaatttccaaggaaactatatttcttacattgatggaaatgtatggaaagcatacagttggaccgggaaactaattctcaatgaaaattayttgactgaattacataacgattcatttaaaggcctgctatccctccagtatttagatttatcctgcaataaaatacagtctatcgaaagacatacatttg

SEQ ID NO: 1040 - DNA, 125 bp, Homo sapiens
tgccacaagagtaaataaccaggcatggaagctgcacaagaagtcatctaatgaggatgagatccccatctgatgaggacagcgaaaccccaacagagaasggggaggagagtgaagccctgcca

SEQ ID NO: 1041 - DNA, 113 bp, Homo sapiens
atggcccctgctyacgtggcaactattgtggctactagtcaaggaggctcagcctctggagtgagtcaaggatctgctccagctgacctctaacccccgggggccgcctgagc

SEQ ID NO: 1042 - DNA, 164 bp, Homo sapiens
atggcccctgctcacgtggcaactattgtggctactagtcaaggaggctcagcctctggagtgrgtcaaggatctgctccagctgacctctaacccccgggggccgcctgagccctggtcttccgctcctcccatctcccatgggaatctccccatgcccctat

SEQ ID NO: 1043 - DNA, 177 bp, Homo sapiens
atggcccctgctcacgtggcaactattgtggctactagtcaaggaggctcagcctctggagtgagtcaaggatctgytccagctgacctctaacccccgggggccgcctgagccctggtcttccgctcctcccatctcccatgggaatctccccatgcccctattgccccagcagat

SEQ ID NO: 1044 - DNA, 201 bp, Homo sapiens
ttagaaacagactttgcaggatgaatattcgagtatggatacacagtatcctggcagcctgcctccagaactccgggtgaactcagatgagcctccagggycccctgagtaagttggactttctcaattccatctagagcctgaaactcaaaatccagagacccttgaagatatccagtcctcttcactccaggaagaagc

SEQ ID NO: 1045 - DNA, 201 bp, Homo sapiens
gactttgattataattttttgcctcattgagatttattctcaccgatggtcatcacaagaagatggagaaggattctcaaggggcattttcagatttctgycacagaggagatgctcttcacgaagtgagactcaggatgaatctttctcattcagacagccactctggcttaaagatatgtacaaacctctcagtgccac

SEQ ID NO: 1046 - DNA, 201 bp, Homo sapiens
cccaacagccacgttccctcatccccaacaacaatgtgagaaggctcatttctcatgttatccggaccttgaagatggactgctctgagacccatgtgcarttgacctgtgccaagctcatctccaggacaggcctcctgatgaagcttctcagtgagcagcaagaagtaaaggtgtccaaggcagaatgggatacggacc

SEQ ID NO: 1047 - DNA, 201 bp, Homo sapiens
agagtcctctatggagagtctagctcaaactctaccaaatcatgaggtgacagttcaacctccaggtgaggatcaagctcattataacttgcccaacattrcagttaaacctgcagatgtggaggttaccataacttcggagcctaccaatgagaaagaatcttcccaagcccagcaggaggctccagttcagtttccaga

SEQ ID NO: 1048 - DNA, 201 bp, Homo sapiens
acagttcaacctccaggtgaggatcaagctcattataacttgcccaacattacagttaaacctgcagatgtggaggttaccataacttcggagcctaccartgagaaagaatcttcccaagcccagcaggaggctccagttcagtttccagaggaggtggaaccttctgcaacccaacaccctgacgactacagctcctcc

SEQ ID NO: 1049 - DNA, 201 bp, Homo sapiens
tctgcttcctcgcagatgtcagccccaccccaggaatcaactgaaaatttggttccattcctggacacggattcagctggagagctgcccctagggccagrgcagttctcagttgcacaccaggatttcaatgacaagctgactctgcaagaaaggctcccagaggtggttccaatgctggacagggatcagaaccagacc

SEQ ID NO: 1050 - DNA, 201 bp, Homo sapiens
gatcaagctcattataacttgcccaacattacagttaaacctgcagatgtggaggttaccataacttcggagcctaccaatgagaaagaatcttcccaagsccagcaggaggctccagttcagtttccagaggaggtggaaccttctgcaacccaacaccctgacgactacagctcctcctccagaacaccctgaggtgac

SEQ ID NO: 1051 - DNA, 201 bp, Homo sapiens
gcaaatactttgaaaatatgccaaaataaaaaaaaggaatactcagcgttcagccagtggaccgaagcagcgtctgttgcacagtacttccagttttatgrctgcatttctcaacagcagaacatgatgcaagattttgtgaggacagccacttaccacagagccgtcctccagaatcacattgactttagagacaaggtg

SEQ ID NO: 1052 - DNA, 201 bp, Homo sapiens
tctgttgcacagtacttccagttttatggctgcatttctcaacagcagaacatgatgcaagattttgtgaggacagccacttaccacagagccgtcctccrgaatcacattgactttagagacaaggtggttctagatgttggttgtggatcaggaatcctgtcattttttgctgtacaggctggagctaggacagtttat

SEQ ID NO: 1053 - DNA, 145 bp, Homo sapiens
tggatctctggtaactgtttggctgtcaacagccccagctgagcctctgactcattggtaccaggtgcagtgcctcctgcagactcctctctttgccaagraagggaagacactgtcagggaaagtgctgtttgtagccaataaa

SEQ ID NO: 1054 - DNA, 201 bp, Homo sapiens
tccagtctccagggtgctacagtggatgaatacttcaggcagccaatagtagacacatttgatgttaggattttgatggctggaacagtcaaatacacagyaaactttatggatgcagaagaggaagatctacacagagtagaaattccctttgtgtttcagatggcagtctgggctcatccatggcctggcgttctggtt

SEQ ID NO: 1055 - DNA, 160 bp, Homo sapiens
tgatgtggcatttgttggatctctggtaactgtttggctgtcaacagccccagctgagcctctgactcattggtaccaggtgcagtgcctcctgcagactmctctctttgccaaggaagggaagacactgtcagggaaagtgctgtttgtagccaataaa

SEQ ID NO: 1056 - DNA, 201 bp, Homo sapiens
ttatctttttcagatgctagtgaaaaacaatcacctttcagacaagatcattgttttgccaggaaaaactgaagacgtctcacttcctgaggctgtagatrtgatcatttccgaaccaatgggatacatgctgttcaatgaacggatgctagagagttatcttcattccaaaaaatggctaaaatcaaatggaatgatgtt

SEQ ID NO: 1057 - DNA, 201 bp, Homo sapiens
ggcgggtatggtggtggtggaccaggatatggaaaccaaggtggtggatatggtggcggtgttggaggatatgatggttacaatgaaggaggaaattttgrcggtagtaactatggtggtggtgggaactataatgattttggaaattacagtggacaacagcaatcaaattatggacacatgaaagggggcagttttggt

SEQ ID NO: 1058 - DNA, 201 bp, Homo sapiens
gggcataactgtgaagtgaaaaaggcccttgctaaacaagtgatgcagccggctggatcacagaggggtcgtggaggtggatctggcaattgtatgggtcrcagaggaaactttggaggtggtggaggtaattttggccgtgatggaaactttggtggaagaggaggctatggtggtggaggtggtggcagcagaggtagt

SEQ ID NO: 1059 - DNA, 201 bp, Homo sapiens
aattgttgttcagaaataccacactattaatgggcataactgtgaagtgaaaaaggcccttgctaaacaagtgatgcagccggctggatcacagaggggtsgtggaggtggatctggcaattgtatgggtcacagaggaaactttggaggtggtggaggtaattttggccgtgatggaaactttggtggaagaggaggcta

SEQ ID NO: 1060 - DNA, 201 bp, Homo sapiens
ttcttagcaggagagagagtgaggagttgtcaggaaagctacaggttactttgagacagtcgtcccaagtgcattagaggaactgtaaaaatctgtcacakaaggaacgatgatccataatcagaaaagttactgcagcttaaacaggaaacccttcttgttcaggactgtcatagccacagtttgcaggaagtgcagcta

SEQ ID NO: 1061 - DNA, 201 bp, Homo sapiens
gatggttacaatgaaggaggaaattttgacggtagtaactatggtggtggtgggaactataatgattttggaaattacagtggacaacagcaatcaaattmtggacacatgaaagggggcagttttggtggaagaagctcgggcagtccctatggtggtggttatggatctggtggtggaagtggtggatatggtagcaga

SEQ ID NO: 1062 - DNA, 189 bp, Homo sapiens
cgagttggaagaggtgagtcctgtctcaaaatggaggtaaaaccgccgcctggttgcccccagcccgactccggcagtcgccgtcgccrctggggggaggagggccatgatccaaaggaaccagagcagctgagaaaactgtttattggtggtctgagctttgaaactacagatgatagtttaagagaa

SEQ ID NO: 1063 - DNA, 201 bp, Homo sapiens
gtatggtggtggtggaccaggatatggaaaccaaggtggtggatatggtggcggtgttggaggatatgatggttacaatgaaggaggaaattttgacggtrgtaactatggtggtggtgggaactataatgattttggaaattacagtggacaacagcaatcaaattatggacacatgaaagggggcagttttggtggaag

SEQ ID NO: 1064 - DNA, 201 bp, Homo sapiens; identical to SEQ ID NO: 1057

SEQ ID NO: 1065 - DNA, 201 bp, Homo sapiens; identical to SEQ ID NO: 1058

SEQ ID NO: 1066 - DNA, 201 bp, Homo sapiens; identical to SEQ ID NO: 1059

SEQ ID NO: 1067 - DNA, 201 bp, Homo sapiens
attgtctcaagttcttttattcatataaataaagtttaaatgaatgggggagattgggccaggcacagtggctcacgcctgtaatcccagcactttgggakgctgaggtgggccgatcacctgagttcaagaccagcctgggcaacatagtgagaccttgcctaaaaaatacaaaaattagctgagcatggtgacacatgc

SEQ ID NO: 1068 - DNA, 201 bp, Homo sapiens; identical to SEQ ID NO: 1060

SEQ ID NO: 1069 - DNA, 201 bp, Homo sapiens; identical to SEQ ID NO: 1061

SEQ ID NO: 1070 - DNA, 199 bp, Homo sapiens
atattgatctcgagttggaagaggtgagtcctgtctcaaaatggaggtaaaaccgccgcctggttgcccccagcccgactccggcagtcgccgtcgccrctggggggaggagggccatgatccaaaggaaccagagcagctgagaaaactgtttattggtggtctgagctttgaaactacagatgatagtttaagagaa

SEQ ID NO: 1071 - DNA, 201 bp, Homo sapiens; identical to SEQ ID NO: 1063

SEQ ID NO: 1072 - DNA, 201 bp, Homo sapiens
cgagttggaagaggtgagtcctgtctcaaaatggaggtaaaaccgccgcctggttgcccccagcccgactccggcagtcgccgtcgccgctggggggaggrgggccatgatccaaaggaaccagagcagctgagaaaactgtttattggtggtctgagctttgaaactacagatgatagtttaagagaacattttgagaaa

SEQ ID NO: 1073 - DNA, 201 bp, Homo sapiens
ttcttagcaggagagagagtgaggagttgtcaggaaagctgcaggttactttgagacagtcgtcccaagtgcattagaggaactgtaaaaatctgtcacakaaggaacgatgatccataatcagaaaagttactgcagcttaaacaggaaacccttcttgttcaggactgtcatagccacagtttgcaaaaagtgcagcta

SEQ ID NO: 1074 - DNA, 201 bp, Homo sapiens; identical to SEQ ID NO: 1061

SEQ ID NO: 1075 - DNA, 201 bp, Homo sapiens; identical to SEQ ID NO: 1063

SEQ ID NO: 1076 - DNA, 201 bp, Homo sapiens; identical to SEQ ID NO: 1057

SEQ ID NO: 1077 - DNA, 201 bp, Homo sapiens; identical to SEQ ID NO: 1058

SEQ ID NO: 1078 - DNA, 201 bp, Homo sapiens; identical to SEQ ID NO: 1059

SEQ ID NO: 1079 - DNA, 201 bp, Homo sapiens
acagtgcatgtggttggtgcttcccatgtggagacatttcttactcgcccaggggactatgatgagcttggttacatgtttcctgggcaccttggactccrtgtggtcatggtgggtgtagatgtagctactggcttttcacagagcacctcaacttcacccctggaacctggcacaattcagcttagtgcccacaggggc

SEQ ID NO: 1080 - DNA, 201 bp, Homo sapiens
gtttagccacagtagcttctagagataggaaattagatttagtgggtgggaagaggccctgatgctggtctttccagagcttatagttgctaacacttttytttgtaaagaagtttaccttttgactggaaccagatggcactgagaaaaagaatgagaaccaccttattcttctgaaaaagactttcttctcatccagta

SEQ ID NO: 1081 - DNA, 201 bp, Homo sapiens
aacctggcacaattcagcttagtgcccacaggggcctctaccatgacttctgggaggagcaagtagagaccgggcagacacaccatccagatttggtggcrgcattccatccaggttttcattcctccccagacttgatggaggcttggctgcccaccctgctgctacttcgtgactataagattcctacattgattactg

SEQ ID NO: 1082 - DNA, 201 bp, Homo sapiens
ccagtcccaacaagcagccagtatactgcagtgcatactatatcatgtttcttggaagctcctgtcagctggataataggcaattagaagagaaagtggayggcgggatttaaatagatcataactggacatctggaaaacggggagtttgtgatgaaattaccctgctaatgccaggttcttgcaaactttgaaaaacat

SEQ ID NO: 1083 - DNA, 201 bp, Homo sapiens
ctataagattcctacattgattactgtttacagccatcaggagttggtatcctctttgcagattctggtggaactggatacacacatcactgcctttgggkctaatcctttcatgtccctcaaacctgaacaggtctattccagtcccaacaagcagccagtatactgcagtgcatactatatcatgtttcttggaagctc

SEQ ID NO: 1084 - DNA, 201 bp, Homo sapiens
caaactttgaaaaacattatattctaaacctcatttactgtttgggtaaaaattctaagctgaatgagagtttctgtataacataactggtttctttcttyttttgagatggagtcttgctctgttgcccaggctggagtgcagcggcatgatctcgactcactgcagcctccgcctcctgggttcaagtggttctcctgc

SEQ ID NO: 1085 - DNA, 201 bp, Homo sapiens
attactgtttacagccatcaggagttggtatcctctttgcagattctggtggaactggatacacacatcactgcctttgggtctaatcctttcatgtcccycaaacctgaacaggtctattccagtcccaacaagcagccagtatactgcagtgcatactatatcatgtttcttggaagctcctgtcagctggataatagg

SEQ ID NO: 1086 - DNA, 201 bp, Homo sapiens
gtctaatcctttcatgtccctcaaacctgaacaggtctattccagtcccaacaagcagccagtatactgcagtgcatactatatcatgtttcttggaagcycctgtcagctggataataggcaattagaagagaaagtggacggcgggatttaaatagatcataactggacatctggaaaacggggagtttgtgatgaaat

SEQ ID NO: 1087 - DNA, 201 bp, Homo sapiens
ccttgactctaggcctaggacttagggccttggggatagatgttaggaggactgggggaagcacagtgcatgtggttggtgcttcccatgtggagacattycttactcgcccaggggactatgatgagcttggttacatgtttcctgggcaccttggactccgtgtggtcatggtgggtgtagatgtagctactggctttt

SEQ ID NO: 1088 - DNA, 201 bp, Homo sapiens
ctggcttttcacagagcacctcaacttcacccctggaacctggcacaattcagcttagtgcccacaggggcctctaccatgacttctgggaggagcaagtrgagaccgggcagacacaccatccagatttggtggcggcattccatccaggttttcattcctccccagacttgatggaggcttggctgcccaccctgctgc

SEQ ID NO: 1089 - DNA, 201 bp, Homo sapiens
cgttcctagctgcctgccagcgtcctcggcccggccctgaggatggacccaggagatcccgctggtgaccctgccgctggcgagcgccaccgcatgggccrggaccccctcctgctcctgcaggccctgcagaccctgtggtccacgcgggagcggaagcaggctctcttgtcggaccttcgtctgtgacgctcagtcttc

SEQ ID NO: 1090 - DNA, 197 bp, Homo sapiens
ggccctgaggatggacccaggagatcccgctggtgaccctgccgctggcgagcgccaccgcatgggccaggaccccctcctgctcctgcaggccctgcagrccctgtggtccacgcgggagcggaagcaggctctcttgtcggaccttcgtctgtgacgctcagtcttcctcgctctttggcacctgcgtgtgtggt

SEQ ID NO: 1091 - DNA, 201 bp, Homo sapiens
ccttttaggtagagtgcctggtccaggtcattggaggagagtccacatggccacctctggcgtgttctagagaggccctcccgcgctgggtcaggaggcakcatcgggacaggagaagggggctgagctcctgttcctctctccctcccccgaggccaagaaacattcccatccgaatgtccactgcgctcacagattcct

SEQ ID NO: 1092 - DNA, 201 bp, Homo sapiens
cccccagaacagacacagcaccccctggaacagcctggcgcttcctggaatggccacatccccccatcctttctgtgctgctttaggcatctgcccttacrtggttcgtgtccagctctgtcaacaaggccagctccacaagaggccccagctcagccctccccagtgggctcccctactcaggctctgggtcagcttctt

SEQ ID NO: 1093 - DNA, 201 bp, Homo sapiens
ttatggtggctcacgcctgtaatcccagtactgtgggaggccgaggcaggaggatcacgaggtcagaagatcgagaccatcctggccaacatggtgaaacyctgtctctactaaaaatacaaaaattagctggacatggtggcgggcgcctgtattcccagctactggggaggctgaggcaggagaatggcttggaggcag

SEQ ID NO: 1094 - DNA, 201 bp, Homo sapiens
cctcggcgccccctggaacactaatggccctccctggaacagacacggcacccccaccgagaacagcctcggtgccccctggaacagcctcagcaccccckggaacactaatggccctccctggaacagacacggcacccccaccgagaacagcctcggtgccccctggaacagcctcagcaccccctggaacactaatgg

SEQ ID NO: 1095 - DNA, 201 bp, Homo sapiens
atggtggctcacgcctgtaatcccagtactgtgggaggccgaggcaggaggatcacgaggtcagaagatcgagaccatcctggccaacatggtgaaactcygtctctactaaaaatacaaaaattagctggacatggtggcgggcgcctgtattcccagctactggggaggctgaggcaggagaatggcttggaggcagta

SEQ ID NO: 1096 - DNA, 201 bp, Homo sapiens; identical to SEQ ID NO: 1091

SEQ ID NO: 1097 - DNA, 201 bp, Homo sapiens; identical to SEQ ID NO: 1092

SEQ ID NO: 1098 - DNA, 201 bp, Homo sapiens; identical to SEQ ID NO: 1093

SEQ ID NO: 1099 - DNA, 201 bp, Homo sapiens; identical to SEQ ID NO: 1094

SEQ ID NO: 1100 - DNA, 201 bp, Homo sapiens; identical to SEQ ID NO: 1095

SEQ ID NO: 1101 - DNA, 167 bp, Homo sapiens
gatcgagaccatcctggctaacaaggtgaaaccccgtctctactaaaaatacaaaaaattagccgggcgcggtggcgggcgcctgtagtcccagctactcrggaggctgaggcaggagaatggcgtgaacctgggaagcggagcttgcagtgagccgagattgcacc

SEQ ID NO: 1102 - DNA, 201 bp, Homo sapiens
aggtgcgagaggctccatcaggcacacatgcagtcgaggattactggtttgaaacaaagatgtcagccctaaagcaaagcacttctgaagcatctgttctrggagagcgaacgaaaagtgtcatgatggaaaaaggcctggactgggagggcagaagctccacagagaagaactataagtgcaaggaatgtgggaaagtct

SEQ ID NO: 1103 - DNA, 201 bp, Homo sapiens
tctcagcccttgcctgggagaacagttcaggagacagatggccccaagagcccagatccagggaccgctgacatttggggatgtggctgtggcctttaccyggattgagtggagacacctggatgctgctcagcgggccctgtacagggatgtgatgctggagaactatgggaatctggtgtctgtggggcttctctcttc

SEQ ID NO: 1104 - DNA, 201 bp, Homo sapiens
ggactgaggtgcgagaggctccatcaggcacacatgcagtcgaggattactggtttgaaacaaagatgtcagccctaaagcaaagcacttctgaagcatcygttctgggagagcgaacgaaaagtgtcatgatggaaaaaggcctggactgggagggcagaagctccacagagaagaactataagtgcaaggaatgtggga

SEQ ID NO: 1105 - DNA, 201 bp, Homo sapiens
ccaaaatttgtctgagcaccaacaggtacaaaattctacaccagaccttatgtgatgggttgcagttaaaatgcacccccggccgggcgcggtggctcacrcctgtaatcccagcactttgggaggccgaggcgggtggatcatgaggtcaggagatcgagaccatcctggctaacaaggtgaaaccccgtctctactaaa

SEQ ID NO: 1106 - DNA, 201 bp, Homo sapiens
attctagggagaaaccccacaaatgcattgaatgtggaaaaactttcagaaagaactcaatccttttaagtcatcagagaattcatactggccagaaaccytacaaatgtaatgactgtgggaaagccttcgctcagaatgcagctcttactcgtcatgaaagaatacatagtggagagaagccttttaaatgtaacaagt

SEQ ID NO: 1107 - DNA, 201 bp, Homo sapiens
atgtggaaaaactttcagaaagaactcaatccttttaagtcatcagagaattcatactggccagaaaccctacaaatgtaatgactgtgggaaagccttcrctcagaatgcagctcttactcgtcatgaaagaatacatagtggagagaagccttttaaatgtaacaagtgtgggagagctttcagggataattcaactgt

SEQ ID NO: 1108 - DNA, 201 bp, Homo sapiens
gttaaagaagcaagtttcaggaaatctatattatatgcattcaaaaagacctggacaaataaagaccaatcttaacagcagttatctctctctctctctcttttttttttttttttaaaagaaactagctcttactctgtcacccaggctggagtgccatgtgatcatagctcactgtagttttgaacttgggcttgaaca

SEQ ID NO: 1109 - DNA, 201 bp, Homo sapiens
ctgtagttttgaacttgggcttgaacaaccttcccacttcagtctctggagtagctggggctacaggcacgtaccaccacactcagctaacagcagttatytttgatgaggatgtagtataggttgagcatccataactggaaaatctgaaatctgaagtgctccaaaatccaaaatttgtctgagcaccaacaggtacaa

SEQ ID NO: 1110 - DNA, 167 bp, Homo sapiens; identical to SEQ ID NO: 1101

SEQ ID NO: 1111 - DNA, 201 bp, Homo sapiens
agagaacacacacaggggagaaaccatataaattcgaggattactggtttgaaacaaagatgtcagccctaaagcaaagcacttctgaagcatctgttctrggagagcgaacgaaaagtgtcatgatggaaaaaggcctggactgggagggcagaagctccacagagaagaactataagtgcaaggaatgtgggaaagtct

SEQ ID NO: 1112 - DNA, 201 bp, Homo sapiens
tgtccgagacccctctagcccttaccttttgcccagcctctttctttgcacttcccagtctttgcaaatggcacctggatttacctggaggctcataaagraactctgggagataatttccccatctttcttttgcaccatgaatttgggaccaatatctcttaatgtcttattttgtaggatcaattcttctttccagga

SEQ ID NO: 1113 - DNA, 201 bp, Homo sapiens
tacatcagagaacacacacaggggagaaaccatataaattcgaggattactggtttgaaacaaagatgtcagccctaaagcaaagcacttctgaagcatcygttctgggagagcgaacgaaaagtgtcatgatggaaaaaggcctggactgggagggcagaagctccacagagaagaactataagtgcaaggaatgtggga

SEQ ID NO: 1114 - DNA, 201 bp, Homo sapiens; identical to SEQ ID NO: 1105

SEQ ID NO: 1115 - DNA, 201 bp, Homo sapiens
aggggagaaatcccatgagggtaaagaatgtggaaaaacctttgtttacaattcattcctcatagtacatcaaaggatacacataggtgtaagaccctatkaatgtaacgaatgtgggaaaacattctcacaaaagccagacttcacttatcatcagagaactcatactggagaaaggccctgtgaatgtaatgaatgtgg

SEQ ID NO: 1116 - DNA, 201 bp, Homo sapiens; identical to SEQ ID NO: 1106

SEQ ID NO: 1117 - DNA, 201 bp, Homo sapiens
atgacttatgtataatgaacgtgaattatatttcagaattaattgttagtgataaacccaatgagtgtagtgaatgtgggaaaaaattctgtgagaagtcrtatctccaagtacatcagagaactcacacaggggagaaatcccatgagggtaaagaatgtggaaaaacctttgtttacaattcattcctcatagtacatc

SEQ ID NO: 1118 - DNA, 201 bp, Homo sapiens; identical to SEQ ID NO: 1107

SEQ ID NO: 1119 - DNA, 201 bp, Homo sapiens; identical to SEQ ID NO: 1108

SEQ ID NO: 1120 - DNA, 201 bp, Homo sapiens; identical to SEQ ID NO: 1109

SEQ ID NO: 1121 - DNA, 167 bp, Homo sapiens; identical to SEQ ID NO: 1101

SEQ ID NO: 1122 - DNA, 201 bp, Homo sapiens; identical to SEQ ID NO: 1102

SEQ ID NO: 1123 - DNA, 201 bp, Homo sapiens; identical to SEQ ID NO: 1103

SEQ ID NO: 1124 - DNA, 201 bp, Homo sapiens; identical to SEQ ID NO: 1104

SEQ ID NO: 1125 - DNA, 201 bp, Homo sapiens; identical to SEQ ID NO: 1105

SEQ ID NO: 1126 - DNA, 201 bp, Homo sapiens; identical to SEQ ID NO: 1106

SEQ ID NO: 1127 - DNA, 201 bp, Homo sapiens; identical to SEQ ID NO: 1107

SEQ ID NO: 1128 - DNA, 201 bp, Homo sapiens; identical to SEQ ID NO: 1108

SEQ ID NO: 1129 - DNA, 201 bp, Homo sapiens; identical to SEQ ID NO: 1109

SEQ ID NO: 1130 - DNA, 201 bp, Homo sapiens; identical to SEQ ID NO: 1111

SEQ ID NO: 1131 - DNA, 201 bp, Homo sapiens; identical to SEQ ID NO: 1113

SEQ ID NO: 1132 - DNA, 201 bp, Homo sapiens; identical to SEQ ID NO: 1105

SEQ ID NO: 1133 - DNA, 201 bp, Homo sapiens; identical to SEQ ID NO: 1115

SEQ ID NO: 1134 - DNA, 201 bp, Homo sapiens
ttcatgtacatcagagaacacacacaggagagaaaccctatggatgtaatgaatgtcagaaagcctttggtgataggtcagctctaaaagtacatcagagratacatactggcgagaaaccctatgagtggtattgcattagcaagccaaaggtggtcttcaagttgcagcaaggagaggaggcatggatattagaggaag

SEQ ID NO: 1135 - DNA, 201 bp, Homo sapiens; identical to SEQ ID NO: 1107

SEQ ID NO: 1136 - DNA, 201 bp, Homo sapiens; identical to SEQ ID NO: 1108

SEQ ID NO: 1137 - DNA, 201 bp, Homo sapiens; identical to SEQ ID NO: 1109

SEQ ID NO: 1138 - DNA, 201 bp, Homo sapiens
gtctctcagaatgaggacttatttaggcatcagtatattcaaactcttaagcagtgttttgaatacaatcagtgtgggaaggcttttcatgaagaggcagyctgcagtacccataagagagaaagaatgcctataaaattaatcagtatgctagtacattttgctgtaagccaaagcattctgtatatcagaaaacagata

SEQ ID NO: 1139 - DNA, 167 bp, Homo sapiens; identical to SEQ ID NO: 1101

SEQ ID NO: 1140 - DNA, 201 bp, Homo sapiens
cagcatctggactctgctcagaggaccccgtacagagacatgatgctggagaactacagcctcctcctctcagtgggatattgcattaccaaaccagaggkggtttgcaagttggagcatggacaggtgctgtggatattagaggaagagtccccaagtcagagccacctagactgctgcatagatgatgacctgatggag

SEQ ID NO: 1141 - DNA, 201 bp, Homo sapiens
gcatagatgatgacctgatggagaagagacaggaaaatcaagaccagcatttgcagaaagttgattttgtcaacaataaaacactgactatggacagaaayggtgtattaggaaaaacattttctcttgacacaaaccccattctatcaagaaaaatacgtggcaactgtgactcatctggaatgaatttgaataatattt

SEQ ID NO: 1142 - DNA, 201 bp, Homo sapiens
gtcttcctgaagaaggctgggggatcagtgtccttcagtgatgtggctgtgggcttcacccaggaggagtggcagcatctggactctgctcagaggacccsgtacagagacatgatgctggagaactacagcctcctcctctcagtgggatattgcattaccaaaccagaggtggtttgcaagttggagcatggacaggtg

SEQ ID NO: 1143 - DNA, 201 bp, Homo sapiens; identical to SEQ ID NO: 1106

SEQ ID NO: 1144 - DNA, 201 bp, Homo sapiens; identical to SEQ ID NO: 1117

SEQ ID NO: 1145 - DNA, 201 bp, Homo sapiens; identical to SEQ ID NO: 1104

SEQ ID NO: 1146 - DNA, 201 bp, Homo sapiens
aggtgcgagaggctccatcaggcacacatgcagtcgaggattactggtttgaaacaaagatgtcagccctaaagcaaagcacttctgaagcatccgttctrggagagcgaacgaaaagtgtcatgatggaaaaaggcctggactgggagggcagaagctccacagagaagaactataagtgcaaggaatgtgggaaagtct

SEQ ID NO: 1147 - DNA, 201 bp, Homo sapiens; identical to SEQ ID NO: 1107

SEQ ID NO: 1148 - DNA, 201 bp, Homo sapiens
ctcagcccttgcctgggagaacagttcaggagacagatggcccccaagagcccagatccagggaccgctgacatttggggatgtggctgtggcctttaccyggattgagtggagacacctggatgctgctcagcgggccctgtacagggatgtgatgctggagaactatgggaatctggtgtctgtggggcttctctcttc

SEQ ID NO: 1149 - DNA, 201 bp, Homo sapiens; identical to SEQ ID NO: 1106

SEQ ID NO: 1150 - DNA, 201 bp, Homo sapiens
tcccatctgggacctctattgctggagggaggctgccaccacctggggcctctccacctactcacatggcaaatcccagccacggcatcttcccgaccacmcctcagaggcttccttctggggagaccccacacccaagcacatggaggtaggtggctgcacattcatccaccctgacgtgcagaagctgctggagaccct

SEQ ID NO: 1151 - DNA, 201 bp, Homo sapiens
cagccgcatgggaaatgcatgcaagatccgtctcctgccagcttgtccccaccagctcccccagctcctctggcctccaccctgtcaccaggcccgatgascttctcagagccttttggaccacactcaaccctgagtgcctccgggccaccagagcccttgcttcccctaaaatgccctgcaacccagccacatgtggtt

SEQ ID NO: 1152 - DNA, 201 bp, Homo sapiens
caccctgtcaccaggcccgatgaccttctcagagccttttggaccacactcaaccctgagtgcctccgggccaccagagcccttgcttcccctaaaatgcyctgcaacccagccacatgtggtttttcctccttcaccacagccgcatggtcccctggcctcctctccacctccacccgactccagcctggctggacttca

SEQ ID NO: 1153 - DNA, 201 bp, Homo sapiens
cgaccctaaatcccttctggaacgtgtcaacccagccacagcagctgccccgtcctcagcaagtctctgatgccacaaccgtggggaaccacttacagcaraaacgcagccagcttttctgggacctcccctctctcaatagcgagtccctggcgaccacagtctgggtttctaggaacccttcctcacagaatgcacact

SEQ ID NO: 1154 - DNA, 201 bp, Homo sapiens
tcccctaaaatgccctgcaacccagccacatgtggtttttcctccttcaccacagccgcatggtcccctggcctcctctccacctccacccgactccagcstggctggacttcagtgtggctccacaacatgccccgtcccccagagctcccctctacacaaccaggtgctgcctcctccaaccagggtgatctctggcct

SEQ ID NO: 1155 - DNA, 201 bp, Homo sapiens
ccaggagaggacacagtctgtcatccccactggaaaggagtatcttgaatggcccttgaagaagcgaccaaagtggaagagggttttgccctctctcctcraaaagtctcaggctgttctgagccagcccactgcccaccttccccaagagaggccggcctcctggagccccaagtcagcccccatccttcccggggttgt

SEQ ID NO: 1156 - DNA, 201 bp, Homo sapiens
ctaaaatgccctgcaacccagccacatgtggtttttcctccttcaccacagccgcatggtcccctggcctcctctccacctccacccgactccagcctggstggacttcagtgtggctccacaacatgccccgtcccccagagctcccctctacacaaccaggtgctgcctcctccaaccagggtgatctctggcctgggg

SEQ ID NO: 1157 - DNA, 201 bp, Homo sapiens
tttttcctccttcaccacagccgcatggtcccctggcctcctctccacctccacccgactccagcctggctggacttcagtgtggctccacaacatgcccygtcccccagagctcccctctacacaaccaggtgctgcctcctccaaccagggtgatctctggcctggggtgctccagcgatcccatctgggacctctatt

SEQ ID NO: 1158 - DNA, 201 bp, Homo sapiens
gaagatgtggcaggagaaagaaagaaaacgggccgaccacccgcacatgacatcactggggaaggagtgggacatcacgaccctaaatcccttctggaacrtgtcaacccagccacagcagctgccccgtcctcagcaagtctctgatgccacaaccgtggggaaccacttacagcagaaacgcagccagcttttctggga

SEQ ID NO: 1159 - DNA, 201 bp, Homo sapiens
aaactttaaggagacagaaattttctcccctggaacctgtgaaaatgtcccttttccaaggaagtgaaggttaagaggtcccgttctcacagaccctcagkaatttcacttggctccgagctttgacctccgagagagccatggaaaagctgctgcggctgtgctgctggtactcctggctgctgctattttattacaact

SEQ ID NO: 1160 - DNA, 201 bp, Homo sapiens
cgtggcataggggaaacccccatagtaccattggggatttcttacattgatgattttgcaaaagaaggacattcttccttgtatttaggtactgtgaatgyaatgggaatgactggtctagtttttgcctttatgctgggatctctgtttgctaaaatgtatgtggatatcggatatgtggatctgagtaagtacaatcgg

SEQ ID NO: 1161 - DNA, 101 bp, Homo sapiens
ctggtctagtttttgcctttatgctgggatctctgtttgctaaaatgtatgtggatatcggatatgtggatctgagtaagtacaatcggaacgaggtaccr

SEQ ID NO: 1162 - DNA, 201 bp, Homo sapiens
ttaattggaattggttgttttcttatgggaactggaaaaaattcaacatcaaacttaccaaactgtttaattaatcaaatgttatcactcaatagaacacygtctgagataatagaaagaggttgtgtgaaggaatctgggtcacacatgtggatctatgtcttcatgggtaatatgcttcgtggcataggggaaaccccc

SEQ ID NO: 1163 - DNA, 201 bp, Homo sapiens
gcacgaggggcttgtaggatatataattccacatatttgggaagagccttcttcggcttgaaggtagccctaatatttccagtacttgttttacttactgkatttatttttgttgtaaggaaaaaatcccatggaaaggataccaaagtattagaaaatgaaagacaagtaatggatgaagcaaacttagaattcttaaac

SEQ ID NO: 1164 - DNA, 201 bp, Homo sapiens
cgtggcataggggaaacccccatagtaccattggggatttcttacattgatgattttgcaaaagaaggacattcttccttgtatttaggtactgtgaatgyaatgggaatgactggtctagtttttgcctttatgctgggatctctgtttgctaaaatgtatgtggatatcggatatgtggatctgagcactatcaggata

SEQ ID NO: 1165 - DNA, 201 bp, Homo sapiens
ctacattgcttctcttacttatatcattaaaatggtggagcaacagtatggttggtctgcatctaagactaactttttgttgggagtcctcgccctacctrctgttgcaattggcatgttttcaggaggatatatcattaaaaaattcaaattgtctttagttggacttgccaaattggcattttgttctgcaacagtgca

SEQ ID NO: 1166 - DNA, 201 bp, Homo sapiens
tttttccagtctttgaaaagcatccttaccaatcccctgtatgttatatttgtaatttttacattgttacacatgagcagctacattgcttctcttacttrtatcattaaaatggtggagcaacagtatggttggtctgcatctaagactaactttttgttgggagtcctcgccctacctgctgttgcaattggcatgttt

SEQ ID NO: 1167 - DNA, 201 bp, Homo sapiens
ttccttgtgtctggaatagtatccattatttcttctataccattctttttcttgcctctaaatccaaataaaccacagaaagaaaggaaagtttcactatwtttgcatgtgctaaaaactaatgataaaaggaatcaaatagctaatttgaccaaccgaagaaaatatattaccaaaaatgtgactggctttttccagtct

SEQ ID NO: 1168 - DNA, 201 bp, Homo sapiens
tacaggtattctaaagaaaccaatattgatccatcagaaaattcaacatcaaacttaccaaactgtttaattaatcaaatgttatcactcaatagaacacygtctgagataatagaaagaggttgtgtgaaggaatctgggtcacacatgtggatctatgtcttcatgggtaatatgcttcgtggcataggggaaaccccc

SEQ ID NO: 1169 - DNA, 201 bp, Homo sapiens
aagtcaatgggaacccgtctgtggaaacaatggaataacttacctgtcaccttgtctagcaggatgcaaatcttcaagtggtaataaagagcccatagtgytttataactgtagctgtgtggaagtaattggtctccagaacaaaaattactcagcgcacttgggtgaatgcccaagagatgatgcttgtacaaggaaatc

SEQ ID NO: 1170 - DNA, 201 bp, Homo sapiens
tccttttagcaggacttcaatgtcaggcctccaaagaagtctacaaattccatcagtcagtaacggcttggagttccaaagcttatgactcaaaggtgatyagagcatggacctggggctagtctggattggtaactgctaaacttggatacatggcttctgatggccctgctggggagaccatgtggagagatggcatag

SEQ ID NO: 1171 - DNA, 201 bp, Homo sapiens
ctccagaccctatgagaggatgccatcccctgctaccatctgactgcaacctcaggagacaccccaagccagaactgagcagccaagccactctcatattsttgacccatagacattgggagataaaaactgattgttgtcaattttagtcagtacattttagggcaatttgatgtcctagcaatagactagtatatttat

SEQ ID NO: 1172 - DNA, 201 bp, Homo sapiens
cagttagaaccaatgtatttcttgccccacggaacactattcctataagatagctgaaagaagctgctgtgaggagctcagctccaaacacaggatcagcmccttgtataggaattcccatgaattatgacttctcattctgttttatcagagtgcatatatgtcctacttcaggaaaagtaaaacagtcatttacgaaag

SEQ ID NO: 1173 - DNA, 195 bp, Homo sapiens
agctcagctccaaacacaggatcagcaccttgtataggaattcccatgaattatgacttctcattctgttttatcagagtgcatatatgtcctacttcagsaaaagtaaaacagtcatttacgaaagaaagtcaatctgtatcctaagcattttaataaaaagttaaaacaaatacgctatttcctttttttttt

SEQ ID NO: 1174 - DNA, 201 bp, Homo sapiens
agatatttgggctttatggacagaccacaggaaaggggaatgtgaccctgaaggagctgaatgctcgccccatggaagtgttcatgtgcagtgtgctcaaraggcaaggttacggcgagggtttccgctggctctcccagtatattgactgatgtttggacggtgaaaataaaagagttttacttctctggactgatccta

SEQ ID NO: 1175 - DNA, 139 bp, Homo sapiens
aggggtgtgacgtacatccggcgagtagctggcggtccmgggtgctgctggttagtgtgctctgagggagggtccgagccagccgctgttttgccggaggagcccctcaggcctaagcattaataatgtctttcatctt

SEQ ID NO: 1176 - DNA, 201 bp, Homo sapiens
tttacattttttctcctttgacacctattttattggtgtttaaagtaaaggttaacatctgtagcttttccaggtttttttttttttttttttttttttgrtatgaaattgtctttctccattgcagaaataagctagggaaacactaacccaaaaactttctgtagagctgttcctttggaggcagcatcacttattggc

SEQ ID NO: 1177 - DNA, 201 bp, Homo sapiens
gaaataagctagggaaacactaacccaaaaactttctgtagagctgttcctttggaggcagcatcacttattggcagtaaagactcagtataaaagcaccrgcatccctacttgggtgatggggattaattttatagcattccattttcctagtgccacatgtgaaattggattttgatgatcttaatctatattctaccc

SEQ ID NO: 1178 - DNA, 120 bp, Homo sapiens
agagtgcatatatgtcctacttcaggaaaagtaaaacagtcatttacgaaagaaagtcaatctgtatcctaagcattttaataaaaagttaaaacaaataygctatttcctttttttttt

SEQ ID NO: 1179 - DNA, 201 bp, Homo sapiens
atctcctatgaacagattggagataggagatgaaaagttgggaggatgtctttattctaatgtgagggtagggaaaatgtggataacattactggggtgarggaggcattgttctttagttggagttctcatttttattctccagtactgacttgtggggaaagcatactttttcactgccaggtactgaatgcagaggct

SEQ ID NO: 1180 - DNA, 201 bp, Homo sapiens
aaagttgggaggatgtctttattctaatgtgagggtagggaaaatgtggataacattactggggtgaaggaggcattgttctttagttggagttctcattyttattctccagtactgacttgtggggaaagcatactttttcactgccaggtactgaatgcagaggctcagtgaagtatatatgtgggaagtgcatgcatt

SEQ ID NO: 1181 - DNA, 201 bp, Homo sapiens
catatttttaatttcctttggttaaaggtcccccatacttctctgttcggagacatgagaagtatgattacttcagtgttagttttcttaatttttttttycccctatttgtcccttgtcactttgttgcaagctagaaatctgtgggttatacatagggcagctctttgtgaaagtggtttattccactggagaaagggg

SEQ ID NO: 1182 - DNA, 180 bp, Homo sapiens
aggggtgtgacgtacatccggcgagtagctggcggtcccgggtgctgctggttagtgtgctctgagggagggtccgagcyagccgctgttttgccggaggagcccctcaggcctaagcattaataatgtctttcatctttgagtggatctacaatggcttcagcagtgtgctccagttcc

SEQ ID NO: 1183 - DNA, 201 bp, Homo sapiens; identical to SEQ ID NO: 1172

SEQ ID NO: 1184 - DNA, 195 bp, Homo sapiens; identical to SEQ ID NO: 1173

SEQ ID NO: 1185 - DNA, 201 bp, Homo sapiens; identical to SEQ ID NO: 1174

SEQ ID NO: 1186 - DNA, 146 bp, Homo sapiens
cccggggaggggtgtgacgtacatccggcgagtagctggcggtccmgggtgctgctggttagtgtgctctgagggagggtccgagccagccgctgttttgccggaggagcccctcaggccgtagtaagcattaataatgtctttca

SEQ ID NO: 1187 - DNA, 201 bp, Homo sapiens; identical to SEQ ID NO: 1176

SEQ ID NO: 1188 - DNA, 201 bp, Homo sapiens; identical to SEQ ID NO: 1177

SEQ ID NO: 1189 - DNA, 120 bp, Homo sapiens; identical to SEQ ID NO: 1178

SEQ ID NO: 1190 - DNA, 201 bp, Homo sapiens; identical to SEQ ID NO: 1179

SEQ ID NO: 1191 - DNA, 201 bp, Homo sapiens; identical to SEQ ID NO: 1180

SEQ ID NO: 1192 - DNA, 201 bp, Homo sapiens; identical to SEQ ID NO: 1181

SEQ ID NO: 1193 - DNA, 187 bp, Homo sapiens
cccggggaggggtgtgacgtacatccggcgagtagctggcggtcccgggtgctgctggttagtgtgctctgagggagggtccgagcyagccgctgttttgccggaggagcccctcaggccgtagtaagcattaataatgtctttcatctttgagtggatctacaatggcttcagcagtgtgctccag

SEQ ID NO: 1194 - DNA, 201 bp, Homo sapiens; identical to SEQ ID NO: 1172

SEQ ID NO: 1195 - DNA, 195 bp, Homo sapiens; identical to SEQ ID NO: 1173

SEQ ID NO: 1196 - DNA, 201 bp, Homo sapiens; identical to SEQ ID NO: 1174

SEQ ID NO: 1197 - DNA, 139 bp, Homo sapiens; identical to SEQ ID NO: 1175

SEQ ID NO: 1198 - DNA, 201 bp, Homo sapiens; identical to SEQ ID NO: 1176

SEQ ID NO: 1199 - DNA, 201 bp, Homo sapiens; identical to SEQ ID NO: 1177

SEQ ID NO: 1200 - DNA, 120 bp, Homo sapiens; identical to SEQ ID NO: 1178

SEQ ID NO: 1201 - DNA, 201 bp, Homo sapiens; identical to SEQ ID NO: 1179

SEQ ID NO: 1202 - DNA, 201 bp, Homo sapiens; identical to SEQ ID NO: 1180

SEQ ID NO: 1203 - DNA, 201 bp, Homo sapiens; identical to SEQ ID NO: 1181

SEQ ID NO: 1204 - DNA, 180 bp, Homo sapiens; identical to SEQ ID NO: 1182

SEQ ID NO: 1205 - DNA, 201 bp, Homo sapiens; identical to SEQ ID NO: 1172

SEQ ID NO: 1206 - DNA, 195 bp, Homo sapiens; identical to SEQ ID NO: 1173

SEQ ID NO: 1207 - DNA, 201 bp, Homo sapiens; identical to SEQ ID NO: 1174

SEQ ID NO: 1208 - DNA, 146 bp, Homo sapiens; identical to SEQ ID NO: 1186

SEQ ID NO: 1209 - DNA, 201 bp, Homo sapiens; identical to SEQ ID NO: 1176

SEQ ID NO: 1210 - DNA, 201 bp, Homo sapiens; identical to SEQ ID NO: 1177

SEQ ID NO: 1211 - DNA, 120 bp, Homo sapiens; identical to SEQ ID NO: 1178

SEQ ID NO: 1212 - DNA, 201 bp, Homo sapiens; identical to SEQ ID NO: 1179

SEQ ID NO: 1213 - DNA, 201 bp, Homo sapiens; identical to SEQ ID NO: 1180

SEQ ID NO: 1214 - DNA, 201 bp, Homo sapiens; identical to SEQ ID NO: 1181

SEQ ID NO: 1215 - DNA, 187 bp, Homo sapiens; identical to SEQ ID NO: 1193

SEQ ID NO: 1216 - DNA, 201 bp, Homo sapiens
tgccagcagctctgcgctccagccagataattgccctgaagctgctgcctctcctcaattcagtgcgactggctccacccccggtcataaaaaggcggacrttccagggcgaacagagccaggccagcatccaaggtccaccagggcccccaggcccccctggaccaagtggacctctggggcacccaggactgccagggc

SEQ ID NO: 1217 - DNA, 180 bp, Homo sapiens
aagtagcacggattgctcatccgatccgtgccgccgcagggagtgtgtcaagttacagaggcgccggaatcggcccctgmgctcctcgccagccgccacgacccacctctgcccatggggccctccatgtgcgccccttcgcccggggactgaaactgactggcccgggagacacgaggc

SEQ ID NO: 1218 - DNA, 201 bp, Homo sapiens
agccgggaccccagggacaaaaaggagaaaagggtcagtgtggagagtacccacaccgggagtgcctaagcagcatgccagcagctctgcgctccagccarataattgccctgaagctgctgcctctcctcaattcagtgcgactggctccacccccggtcataaaaaggcggacattccagggcgaacagagccaggcca

SEQ ID NO: 1219 - DNA, 201 bp, Homo sapiens
aaaagggacctcgcggtaaaccaggagacatgggccctcctggtccccaaggccccccaggaaaggatggacctccaggagtgaagggagaaaacgggcasccagggagcccaggagagaagggggaaaaaggggagacaggacaagcaggctcaccgggagagaaaggagaagccggggagaagggcaatccaggagcag

SEQ ID NO: 1220 - DNA, 201 bp, Homo sapiens
tttttcggcacttcctctcctactgctaatttttccgtcctctttgccgggagcagcggaaagggacgttttccagcgatacaagccctttccccctgccycgcagtttggatagagccttttggcagcggctgtcgcctttatttattctatttatttatttattggttctcaagacgcgagaggatggtagcggagcgc

SEQ ID NO: 1221 - DNA, 201 bp, Homo sapiens
gctccactcaaggaggcgccgggaggccccaaagacatctccaggatgtaactgcccaccagggtcccactggaagacccggactcccaggtcaaccaggmactagaggtttccctggatttccgggtcccattgggctggacggcaaaccgggccacccaggaccaaagggcgacatgggtctgacgggtcccccaggac

SEQ ID NO: 1222 - DNA, 201 bp, Homo sapiens
tgcatattttgtacagaaaatatcaacctcttcccttttgtttacaagatgttttgtataagcctatgtctctaatacattttttgtttggtcgtaatgtmtgcatgatatttgtgcacatttattaagtatcgaagcttaataaattattgtgtcctggtgccaaagggggccagccagaactgaggtgctggctagctc

SEQ ID NO: 1223 - DNA, 201 bp, Homo sapiens
ttgtttacaagatgttttgtataagcctatgtctctaatacattttttgtttggtcgtaatgtctgcatgatatttgtgcacatttattaagtatcgaagsttaataaattattgtgtcctggtgccaaagggggccagccagaactgaggtgctggctagctcatgtgtgaattcacataaatgtagaggtccatgatat

SEQ ID NO: 1224 - DNA, 201 bp, Homo sapiens
cgtgccgccgcagggagtgtgtcaagttacagaggcgccggaatcggcccctgcgctcctcgccagccgccacgacccacctctgcccatggggccctccrtgtgcgccccttcgcccggggactgaaactgactggcccgggagacacgaggcgcccagaaggactgacagcgcggcaccaactgctctgcagacacttg

SEQ ID NO: 1225 - DNA, 201 bp, Homo sapiens
gcagacacttgaagggaaagactgggcggagagaaggagagccggtcagattcccctaactttcctggacttggaacgttcttcgaaataacttttttctyacctaggtgtaccccaattaccgctggttgtgctttttcggcacttcctctcctactgctaatttttccgtcctctttgccgggagcagcggaaagggac

SEQ ID NO: 1226 - DNA, 201 bp, Homo sapiens
gctcgctggcactcagcctgctcgcccactttcggacggccgagctgcaggcccgggtgctgcgcctggaagcggagcgcggggagcagcaaatggagacrgctattttgggacgagtcaatcaactgctggacgagaaatggaagctccactcaaggaggcgccgggaggccccaaagacatctccaggatgtaactgcc

SEQ ID NO: 1227 - DNA, 201 bp, Homo sapiens
tgacagcgcggcaccaactgctctgcagacacttgaagggaaagactgggcggagagaaggagagccggtcagattcccctaactttcctggacttggaamgttcttcgaaataacttttttctcacctaggtgtaccccaattaccgctggttgtgctttttcggcacttcctctcctactgctaatttttccgtcctct

SEQ ID NO: 1228 - DNA, 201 bp, Homo sapiens
agggagacccagggatccagggctaccacggccggaagggagaacggggcatgccagggatgccaggcaagcatggagccaagggggcgcccggaattgcsgtggctgggatgaagggtgagccagggatcccaggaaccaagggtgagaagggggctgaaggctcccctgggcttcctggcctcctggggcagaagggag

SEQ ID NO: 1229 - DNA, 180 bp, Homo sapiens; identical to SEQ ID NO: 1217

SEQ ID NO: 1230 - DNA, 201 bp, Homo sapiens; identical to SEQ ID NO: 1219

SEQ ID NO: 1231 - DNA, 201 bp, Homo sapiens; identical to SEQ ID NO: 1220

SEQ ID NO: 1232 - DNA, 201 bp, Homo sapiens
agacatctccaggatgtaactgcccaccaggcgagaaggggtcccccggagacgctgggctgtccatcattggtccccgcggcccccctggtcaaccaggmactagaggtttccctggatttccgggtcccattgggctggacggcaaaccgggccacccaggaccaaagggcgacatgggtctgacgggtcccccaggac

SEQ ID NO: 1233 - DNA, 201 bp, Homo sapiens; identical to SEQ ID NO: 1222

SEQ ID NO: 1234 - DNA, 201 bp, Homo sapiens; identical to SEQ ID NO: 1223

SEQ ID NO: 1235 - DNA, 201 bp, Homo sapiens; identical to SEQ ID NO: 1224

SEQ ID NO: 1236 - DNA, 201 bp, Homo sapiens; identical to SEQ ID NO: 1225

SEQ ID NO: 1237 - DNA, 201 bp, Homo sapiens; identical to SEQ ID NO: 1226

SEQ ID NO: 1238 - DNA, 201 bp, Homo sapiens; identical to SEQ ID NO: 1227

SEQ ID NO: 1239 - DNA, 201 bp, Homo sapiens; identical to SEQ ID NO: 1228

SEQ ID NO: 1240 - DNA, 201 bp, Homo sapiens
aaaaaggagaaaagggtcagtgtggagagtacccacaccggctgctgcctctcctcaattcagtgcgactggctccacccccggtcataaaaaggcggacrttccagggcgaacagagccaggccagcatccaaggtccaccagggcccccaggcccccctggaccaagtggacctctggggcacccaggactgccagggc

SEQ ID NO: 1241 - DNA, 180 bp, Homo sapiens; identical to SEQ ID NO: 1217

SEQ ID NO: 1242 - DNA, 201 bp, Homo sapiens; identical to SEQ ID NO: 1219

SEQ ID NO: 1243 - DNA, 201 bp, Homo sapiens; identical to SEQ ID NO: 1220

SEQ ID NO: 1244 - DNA, 201 bp, Homo sapiens
caggggacaaaggtgccattgggatgcctggacgtgtggggtcccccggagacgctgggctgtccatcattggtccccgcggcccccctggtcaaccaggmactagaggtttccctggatttccgggtcccattgggctggacggcaaaccgggccacccaggaccaaagggcgacatgggtctgacgggtcccccaggac

SEQ ID NO: 1245 - DNA, 201 bp, Homo sapiens; identical to SEQ ID NO: 1222

SEQ ID NO: 1246 - DNA, 201 bp, Homo sapiens; identical to SEQ ID NO: 1223

SEQ ID NO: 1247 - DNA, 201 bp, Homo sapiens; identical to SEQ ID NO: 1224

SEQ ID NO: 1248 - DNA, 201 bp, Homo sapiens; identical to SEQ ID NO: 1225

SEQ ID NO: 1249 - DNA, 201 bp, Homo sapiens; identical to SEQ ID NO: 1226

SEQ ID NO: 1250 - DNA, 201 bp, Homo sapiens; identical to SEQ ID NO: 1227

SEQ ID NO: 1251 - DNA, 201 bp, Homo sapiens; identical to SEQ ID NO: 1228

SEQ ID NO: 1252 - DNA, 201 bp, Homo sapiens; identical to SEQ ID NO: 1216

SEQ ID NO: 1253 - DNA, 180 bp, Homo sapiens; identical to SEQ ID NO: 1217

SEQ ID NO: 1254 - DNA, 201 bp, Homo sapiens; identical to SEQ ID NO: 1218

SEQ ID NO: 1255 - DNA, 201 bp, Homo sapiens; identical to SEQ ID NO: 1219

SEQ ID NO: 1256 - DNA, 201 bp, Homo sapiens; identical to SEQ ID NO: 1220

SEQ ID NO: 1257 - DNA, 201 bp, Homo sapiens; identical to SEQ ID NO: 1244

SEQ ID NO: 1258 - DNA, 201 bp, Homo sapiens; identical to SEQ ID NO: 1222

SEQ ID NO: 1259 - DNA, 201 bp, Homo sapiens; identical to SEQ ID NO: 1223

SEQ ID NO: 1260 - DNA, 201 bp, Homo sapiens; identical to SEQ ID NO: 1224

SEQ ID NO: 1261 - DNA, 201 bp, Homo sapiens; identical to SEQ ID NO: 1225

SEQ ID NO: 1262 - DNA, 201 bp, Homo sapiens; identical to SEQ ID NO: 1226

SEQ ID NO: 1263 - DNA, 201 bp, Homo sapiens; identical to SEQ ID NO: 1227

SEQ ID NO: 1264 - DNA, 201 bp, Homo sapiens; identical to SEQ ID NO: 1228

SEQ ID NO: 1265 - DNA, 180 bp, Homo sapiens; identical to SEQ ID NO: 1217

SEQ ID NO: 1266 - DNA, 201 bp, Homo sapiens
agccgggaccccagggacaaaaaggagaaaagggtcagtgtggagagtacccacaccgggagtgcctaagcagcatgccagcagctctgcgctccagccarataattgccctgaagggcgaacagagccaggccagcatccaaggtccaccagggcccccaggcccccctggaccaagtggacctctggggcacccaggac

SEQ ID NO: 1267 - DNA, 201 bp, Homo sapiens; identical to SEQ ID NO: 1219

SEQ ID NO: 1268 - DNA, 201 bp, Homo sapiens; identical to SEQ ID NO: 1220

SEQ ID NO: 1269 - DNA, 201 bp, Homo sapiens; identical to SEQ ID NO: 1244

SEQ ID NO: 1270 - DNA, 201 bp, Homo sapiens; identical to SEQ ID NO: 1222

SEQ ID NO: 1271 - DNA, 201 bp, Homo sapiens; identical to SEQ ID NO: 1223

SEQ ID NO: 1272 - DNA, 201 bp, Homo sapiens; identical to SEQ ID NO: 1224

SEQ ID NO: 1273 - DNA, 201 bp, Homo sapiens; identical to SEQ ID NO: 1225

SEQ ID NO: 1274 - DNA, 201 bp, Homo sapiens; identical to SEQ ID NO: 1226

SEQ ID NO: 1275 - DNA, 201 bp, Homo sapiens; identical to SEQ ID NO: 1227

SEQ ID NO: 1276 - DNA, 201 bp, Homo sapiens; identical to SEQ ID NO: 1228

SEQ ID NO: 1277 - DNA, 180 bp, Homo sapiens; identical to SEQ ID NO: 1217

SEQ ID NO: 1278 - DNA, 201 bp, Homo sapiens; identical to SEQ ID NO: 1266

SEQ ID NO: 1279 - DNA, 201 bp, Homo sapiens
aaaagggacctcgcggtaaaccaggagacatgggccctcctggtccccaaggccccccaggaaaggatggacctccaggagtgaagggagaaaacgggcasccagggagcccaggagagaagggggaaaaaggggagacaggacaagcaggctcaccggttcctgggctgccagggccagaggggcctcccggacctccgg

SEQ ID NO: 1280 - DNA, 201 bp, Homo sapiens; identical to SEQ ID NO: 1220

SEQ ID NO: 1281 - DNA, 201 bp, Homo sapiens; identical to SEQ ID NO: 1221

SEQ ID NO: 1282 - DNA, 201 bp, Homo sapiens; identical to SEQ ID NO: 1222

SEQ ID NO: 1283 - DNA, 201 bp, Homo sapiens; identical to SEQ ID NO: 1223

SEQ ID NO: 1284 - DNA, 201 bp, Homo sapiens; identical to SEQ ID NO: 1224

SEQ ID NO: 1285 - DNA, 201 bp, Homo sapiens; identical to SEQ ID NO: 1225

SEQ ID NO: 1286 - DNA, 201 bp, Homo sapiens; identical to SEQ ID NO: 1226

SEQ ID NO: 1287 - DNA, 201 bp, Homo sapiens; identical to SEQ ID NO: 1227

SEQ ID NO: 1288 - DNA, 201 bp, Homo sapiens; identical to SEQ ID NO: 1228

SEQ ID NO: 1289 - DNA, 180 bp, Homo sapiens; identical to SEQ ID NO: 1217

SEQ ID NO: 1290 - DNA, 201 bp, Homo sapiens; identical to SEQ ID NO: 1219

SEQ ID NO: 1291 - DNA, 201 bp, Homo sapiens; identical to SEQ ID NO: 1220

SEQ ID NO: 1292 - DNA, 201 bp, Homo sapiens
aagacatctccaggatgtaactgcccaccaggtaagcagggtcccccggagacgctgggctgtccatcattggtccccgcggcccccctggtcaaccaggmactagaggtttccctggatttccgggtcccattgggctggacggcaaaccgggccacccaggaccaaagggcgacatgggtctgacgggtcccccaggac

SEQ ID NO: 1293 - DNA, 201 bp, Homo sapiens; identical to SEQ ID NO: 1222

SEQ ID NO: 1294 - DNA, 201 bp, Homo sapiens; identical to SEQ ID NO: 1223

SEQ ID NO: 1295 - DNA, 201 bp, Homo sapiens; identical to SEQ ID NO: 1224

SEQ ID NO: 1296 - DNA, 201 bp, Homo sapiens; identical to SEQ ID NO: 1225

SEQ ID NO: 1297 - DNA, 201 bp, Homo sapiens; identical to SEQ ID NO: 1226

SEQ ID NO: 1298 - DNA, 201 bp, Homo sapiens; identical to SEQ ID NO: 1227

SEQ ID NO: 1299 - DNA, 201 bp, Homo sapiens; identical to SEQ ID NO: 1228

SEQ ID NO: 1300 - DNA, 201 bp, Homo sapiens; identical to SEQ ID NO: 1216

SEQ ID NO: 1301 - DNA, 180 bp, Homo sapiens; identical to SEQ ID NO: 1217

SEQ ID NO: 1302 - DNA, 201 bp, Homo sapiens; identical to SEQ ID NO: 1218

SEQ ID NO: 1303 - DNA, 201 bp, Homo sapiens; identical to SEQ ID NO: 1279

SEQ ID NO: 1304 - DNA, 201 bp, Homo sapiens; identical to SEQ ID NO: 1220

SEQ ID NO: 1305 - DNA, 201 bp, Homo sapiens; identical to SEQ ID NO: 1244

SEQ ID NO: 1306 - DNA, 201 bp, Homo sapiens; identical to SEQ ID NO: 1222

SEQ ID NO: 1307 - DNA, 201 bp, Homo sapiens; identical to SEQ ID NO: 1223

SEQ ID NO: 1308 - DNA, 201 bp, Homo sapiens; identical to SEQ ID NO: 1224

SEQ ID NO: 1309 - DNA, 201 bp, Homo sapiens; identical to SEQ ID NO: 1225

SEQ ID NO: 1310 - DNA, 201 bp, Homo sapiens; identical to SEQ ID NO: 1226

SEQ ID NO: 1311 - DNA, 201 bp, Homo sapiens; identical to SEQ ID NO: 1227

SEQ ID NO: 1312 - DNA, 201 bp, Homo sapiens; identical to SEQ ID NO: 1228

SEQ ID NO: 1313 - DNA, 201 bp, Homo sapiens; identical to SEQ ID NO: 1216

SEQ ID NO: 1314 - DNA, 180 bp, Homo sapiens; identical to SEQ ID NO: 1217

SEQ ID NO: 1315 - DNA, 201 bp, Homo sapiens; identical to SEQ ID NO: 1218

SEQ ID NO: 1316 - DNA, 201 bp, Homo sapiens; identical to SEQ ID NO: 1279

SEQ ID NO: 1317 - DNA, 201 bp, Homo sapiens; identical to SEQ ID NO: 1220

SEQ ID NO: 1318 - DNA, 201 bp, Homo sapiens; identical to SEQ ID NO: 1244

SEQ ID NO: 1319 - DNA, 201 bp, Homo sapiens; identical to SEQ ID NO: 1222

SEQ ID NO: 1320 - DNA, 201 bp, Homo sapiens; identical to SEQ ID NO: 1223

SEQ ID NO: 1321 - DNA, 201 bp, Homo sapiens; identical to SEQ ID NO: 1224

SEQ ID NO: 1322 - DNA, 201 bp, Homo sapiens; identical to SEQ ID NO: 1225

SEQ ID NO: 1323 - DNA, 201 bp, Homo sapiens; identical to SEQ ID NO: 1226

SEQ ID NO: 1324 - DNA, 201 bp, Homo sapiens; identical to SEQ ID NO: 1227

SEQ ID NO: 1325 - DNA, 201 bp, Homo sapiens; identical to SEQ ID NO: 1228

SEQ ID NO: 1326 - DNA, 201 bp, Homo sapiens; identical to SEQ ID NO: 1240

SEQ ID NO: 1327 - DNA, 180 bp, Homo sapiens; identical to SEQ ID NO: 1217

SEQ ID NO: 1328 - DNA, 201 bp, Homo sapiens; identical to SEQ ID NO: 1219

SEQ ID NO: 1329 - DNA, 201 bp, Homo sapiens; identical to SEQ ID NO: 1220

SEQ ID NO: 1330 - DNA, 201 bp, Homo sapiens
agaaatggaagctccactcaaggaggcgccgggaggccccaaagacatctccaggatgtaactgcccaccagggagtaaagggccaaccaggcgagaaggmactagaggtttccctggatttccgggtcccattgggctggacggcaaaccgggccacccaggaccaaagggcgacatgggtctgacgggtcccccaggac

SEQ ID NO: 1331 - DNA, 201 bp, Homo sapiens; identical to SEQ ID NO: 1222

SEQ ID NO: 1332 - DNA, 201 bp, Homo sapiens; identical to SEQ ID NO: 1223

SEQ ID NO: 1333 - DNA, 201 bp, Homo sapiens; identical to SEQ ID NO: 1224

SEQ ID NO: 1334 - DNA, 201 bp, Homo sapiens; identical to SEQ ID NO: 1225

SEQ ID NO: 1335 - DNA, 201 bp, Homo sapiens; identical to SEQ ID NO: 1226

SEQ ID NO: 1336 - DNA, 201 bp, Homo sapiens; identical to SEQ ID NO: 1227

SEQ ID NO: 1337 - DNA, 201 bp, Homo sapiens; identical to SEQ ID NO: 1228

SEQ ID NO: 1338 - DNA, 201 bp, Homo sapiens; identical to SEQ ID NO: 1216

SEQ ID NO: 1339 - DNA, 180 bp, Homo sapiens; identical to SEQ ID NO: 1217

SEQ ID NO: 1340 - DNA, 201 bp, Homo sapiens; identical to SEQ ID NO: 1218

SEQ ID NO: 1341 - DNA, 201 bp, Homo sapiens; identical to SEQ ID NO: 1219

SEQ ID NO: 1342 - DNA, 201 bp, Homo sapiens; identical to SEQ ID NO: 1220

SEQ ID NO: 1343 - DNA, 201 bp, Homo sapiens; identical to SEQ ID NO: 1244

SEQ ID NO: 1344 - DNA, 201 bp, Homo sapiens; identical to SEQ ID NO: 1222

SEQ ID NO: 1345 - DNA, 201 bp, Homo sapiens; identical to SEQ ID NO: 1223

SEQ ID NO: 1346 - DNA, 201 bp, Homo sapiens; identical to SEQ ID NO: 1224

SEQ ID NO: 1347 - DNA, 201 bp, Homo sapiens; identical to SEQ ID NO: 1225

SEQ ID NO: 1348 - DNA, 201 bp, Homo sapiens; identical to SEQ ID NO: 1226

SEQ ID NO: 1349 - DNA, 201 bp, Homo sapiens; identical to SEQ ID NO: 1227

SEQ ID NO: 1350 - DNA, 201 bp, Homo sapiens; identical to SEQ ID NO: 1228

SEQ ID NO: 1351 - DNA, 201 bp, Homo sapiens; identical to SEQ ID NO: 1216

SEQ ID NO: 1352 - DNA, 180 bp, Homo sapiens; identical to SEQ ID NO: 1217

SEQ ID NO: 1353 - DNA, 201 bp, Homo sapiens; identical to SEQ ID NO: 1218

SEQ ID NO: 1354 - DNA, 201 bp, Homo sapiens; identical to SEQ ID NO: 1219

SEQ ID NO: 1355 - DNA, 201 bp, Homo sapiens; identical to SEQ ID NO: 1220

SEQ ID NO: 1356 - DNA, 201 bp, Homo sapiens; identical to SEQ ID NO: 1244

SEQ ID NO: 1357 - DNA, 201 bp, Homo sapiens; identical to SEQ ID NO: 1222

SEQ ID NO: 1358 - DNA, 201 bp, Homo sapiens; identical to SEQ ID NO: 1223

SEQ ID NO: 1359 - DNA, 201 bp, Homo sapiens; identical to SEQ ID NO: 1224

SEQ ID NO: 1360 - DNA, 201 bp, Homo sapiens; identical to SEQ ID NO: 1225

SEQ ID NO: 1361 - DNA, 201 bp, Homo sapiens; identical to SEQ ID NO: 1226

SEQ ID NO: 1362 - DNA, 201 bp, Homo sapiens; identical to SEQ ID NO: 1227

SEQ ID NO: 1363 - DNA, 201 bp, Homo sapiens; identical to SEQ ID NO: 1228

SEQ ID NO: 1364 - DNA, 180 bp, Homo sapiens; identical to SEQ ID NO: 1217

SEQ ID NO: 1365 - DNA, 201 bp, Homo sapiens; identical to SEQ ID NO: 1219

SEQ ID NO: 1366 - DNA, 201 bp, Homo sapiens; identical to SEQ ID NO: 1220

SEQ ID NO: 1367 - DNA, 201 bp, Homo sapiens
gtaacccgaggggtcccactggaagacccggactcccagggtcccccggagacgctgggctgtccatcattggtccccgcggcccccctggtcaaccaggmactagaggtttccctggatttccgggtcccattgggctggacggcaaaccgggccacccaggaccaaagggcgacatgggtctgacgggtcccccaggac

SEQ ID NO: 1368 - DNA, 201 bp, Homo sapiens; identical to SEQ ID NO: 1222

SEQ ID NO: 1369 - DNA, 201 bp, Homo sapiens; identical to SEQ ID NO: 1223

SEQ ID NO: 1370 - DNA, 201 bp, Homo sapiens; identical to SEQ ID NO: 1224

SEQ ID NO: 1371 - DNA, 201 bp, Homo sapiens; identical to SEQ ID NO: 1225

SEQ ID NO: 1372 - DNA, 201 bp, Homo sapiens; identical to SEQ ID NO: 1226

SEQ ID NO: 1373 - DNA, 201 bp, Homo sapiens; identical to SEQ ID NO: 1227

SEQ ID NO: 1374 - DNA, 201 bp, Homo sapiens; identical to SEQ ID NO: 1228

SEQ ID NO: 1375 - DNA, 201 bp, Homo sapiens; identical to SEQ ID NO: 1216

SEQ ID NO: 1376 - DNA, 180 bp, Homo sapiens; identical to SEQ ID NO: 1217

SEQ ID NO: 1377 - DNA, 201 bp, Homo sapiens; identical to SEQ ID NO: 1218

SEQ ID NO: 1378 - DNA, 201 bp, Homo sapiens; identical to SEQ ID NO: 1219

SEQ ID NO: 1379 - DNA, 201 bp, Homo sapiens; identical to SEQ ID NO: 1220

SEQ ID NO: 1380 - DNA, 201 bp, Homo sapiens
gcccaccaggtgctggtaacccgaggggtcccactggaagacccggactcccaggggacaaaggtgccattgggatgcctggacgtgtgggtcaaccaggmactagaggtttccctggatttccgggtcccattgggctggacggcaaaccgggccacccaggaccaaagggcgacatgggtctgacgggtcccccaggac

SEQ ID NO: 1381 - DNA, 201 bp, Homo sapiens; identical to SEQ ID NO: 1222

SEQ ID NO: 1382 - DNA, 201 bp, Homo sapiens; identical to SEQ ID NO: 1223

SEQ ID NO: 1383 - DNA, 201 bp, Homo sapiens; identical to SEQ ID NO: 1224

SEQ ID NO: 1384 - DNA, 201 bp, Homo sapiens; identical to SEQ ID NO: 1225

SEQ ID NO: 1385 - DNA, 201 bp, Homo sapiens; identical to SEQ ID NO: 1226

SEQ ID NO: 1386 - DNA, 201 bp, Homo sapiens; identical to SEQ ID NO: 1227

SEQ ID NO: 1387 - DNA, 201 bp, Homo sapiens; identical to SEQ ID NO: 1228

SEQ ID NO: 1388 - DNA, 180 bp, Homo sapiens; identical to SEQ ID NO: 1217

SEQ ID NO: 1389 - DNA, 201 bp, Homo sapiens; identical to SEQ ID NO: 1219

SEQ ID NO: 1390 - DNA, 201 bp, Homo sapiens; identical to SEQ ID NO: 1220

SEQ ID NO: 1391 - DNA, 201 bp, Homo sapiens; identical to SEQ ID NO: 1244

SEQ ID NO: 1392 - DNA, 201 bp, Homo sapiens; identical to SEQ ID NO: 1222

SEQ ID NO: 1393 - DNA, 201 bp, Homo sapiens; identical to SEQ ID NO: 1223

SEQ ID NO: 1394 - DNA, 201 bp, Homo sapiens; identical to SEQ ID NO: 1224

SEQ ID NO: 1395 - DNA, 201 bp, Homo sapiens; identical to SEQ ID NO: 1225

SEQ ID NO: 1396 - DNA, 201 bp, Homo sapiens; identical to SEQ ID NO: 1226

SEQ ID NO: 1397 - DNA, 201 bp, Homo sapiens; identical to SEQ ID NO: 1227

SEQ ID NO: 1398 - DNA, 201 bp, Homo sapiens; identical to SEQ ID NO: 1228

SEQ ID NO: 1399 - DNA, 201 bp, Homo sapiens; identical to SEQ ID NO: 1216

SEQ ID NO: 1400 - DNA, 180 bp, Homo sapiens; identical to SEQ ID NO: 1217

SEQ ID NO: 1401 - DNA, 201 bp, Homo sapiens; identical to SEQ ID NO: 1218

SEQ ID NO: 1402 - DNA, 201 bp, Homo sapiens; identical to SEQ ID NO: 1219

SEQ ID NO: 1403 - DNA, 201 bp, Homo sapiens; identical to SEQ ID NO: 1220

SEQ ID NO: 1404 - DNA, 201 bp, Homo sapiens; identical to SEQ ID NO: 1244

SEQ ID NO: 1405 - DNA, 201 bp, Homo sapiens; identical to SEQ ID NO: 1222

SEQ ID NO: 1406 - DNA, 201 bp, Homo sapiens; identical to SEQ ID NO: 1223

SEQ ID NO: 1407 - DNA, 201 bp, Homo sapiens; identical to SEQ ID NO: 1224

SEQ ID NO: 1408 - DNA, 201 bp, Homo sapiens; identical to SEQ ID NO: 1225

SEQ ID NO: 1409 - DNA, 201 bp, Homo sapiens; identical to SEQ ID NO: 1226

SEQ ID NO: 1410 - DNA, 201 bp, Homo sapiens; identical to SEQ ID NO: 1227

SEQ ID NO: 1411 - DNA, 201 bp, Homo sapiens; identical to SEQ ID NO: 1228

SEQ ID NO: 1412 - DNA, 201 bp, Homo sapiens; identical to SEQ ID NO: 1216

SEQ ID NO: 1413 - DNA, 180 bp, Homo sapiens; identical to SEQ ID NO: 1217

SEQ ID NO: 1414 - DNA, 201 bp, Homo sapiens; identical to SEQ ID NO: 1218

SEQ ID NO: 1415 - DNA, 201 bp, Homo sapiens; identical to SEQ ID NO: 1219

SEQ ID NO: 1416 - DNA, 201 bp, Homo sapiens; identical to SEQ ID NO: 1220

SEQ ID NO: 1417 - DNA, 201 bp, Homo sapiens
gccgggaggccccaaagacatctccaggatgtaactgcccaccaggtgctggtaacccgaggggtcccactggaagacccggactcccaggtcaaccaggmactagaggtttccctggatttccgggtcccattgggctggacggcaaaccgggccacccaggaccaaagggcgacatgggtctgacgggtcccccaggac

SEQ ID NO: 1418 - DNA, 201 bp, Homo sapiens; identical to SEQ ID NO: 1222

SEQ ID NO: 1419 - DNA, 201 bp, Homo sapiens; identical to SEQ ID NO: 1223

SEQ ID NO: 1420 - DNA, 201 bp, Homo sapiens; identical to SEQ ID NO: 1224

SEQ ID NO: 1421 - DNA, 201 bp, Homo sapiens; identical to SEQ ID NO: 1225

SEQ ID NO: 1422 - DNA, 201 bp, Homo sapiens; identical to SEQ ID NO: 1226

SEQ ID NO: 1423 - DNA, 201 bp, Homo sapiens; identical to SEQ ID NO: 1227

SEQ ID NO: 1424 - DNA, 201 bp, Homo sapiens; identical to SEQ ID NO: 1228

SEQ ID NO: 1425 - DNA, 201 bp, Homo sapiens; identical to SEQ ID NO: 1240

SEQ ID NO: 1426 - DNA, 180 bp, Homo sapiens; identical to SEQ ID NO: 1217

SEQ ID NO: 1427 - DNA, 201 bp, Homo sapiens; identical to SEQ ID NO: 1219

SEQ ID NO: 1428 - DNA, 201 bp, Homo sapiens; identical to SEQ ID NO: 1220

SEQ ID NO: 1429 - DNA, 201 bp, Homo sapiens; identical to SEQ ID NO: 1244

SEQ ID NO: 1430 - DNA, 201 bp, Homo sapiens; identical to SEQ ID NO: 1222

SEQ ID NO: 1431 - DNA, 201 bp, Homo sapiens; identical to SEQ ID NO: 1223

SEQ ID NO: 1432 - DNA, 201 bp, Homo sapiens; identical to SEQ ID NO: 1224

SEQ ID NO: 1433 - DNA, 201 bp, Homo sapiens; identical to SEQ ID NO: 1225

SEQ ID NO: 1434 - DNA, 201 bp, Homo sapiens; identical to SEQ ID NO: 1226

SEQ ID NO: 1435 - DNA, 201 bp, Homo sapiens; identical to SEQ ID NO: 1227

SEQ ID NO: 1436 - DNA, 201 bp, Homo sapiens; identical to SEQ ID NO: 1228

SEQ ID NO: 1437 - DNA, 180 bp, Homo sapiens; identical to SEQ ID NO: 1217

SEQ ID NO: 1438 - DNA, 201 bp, Homo sapiens; identical to SEQ ID NO: 1219

SEQ ID NO: 1439 - DNA, 201 bp, Homo sapiens; identical to SEQ ID NO: 1220

SEQ ID NO: 1440 - DNA, 201 bp, Homo sapiens; identical to SEQ ID NO: 1244

SEQ ID NO: 1441 - DNA, 201 bp, Homo sapiens; identical to SEQ ID NO: 1222

SEQ ID NO: 1442 - DNA, 201 bp, Homo sapiens; identical to SEQ ID NO: 1223

SEQ ID NO: 1443 - DNA, 201 bp, Homo sapiens; identical to SEQ ID NO: 1224

SEQ ID NO: 1444 - DNA, 201 bp, Homo sapiens; identical to SEQ ID NO: 1225

SEQ ID NO: 1445 - DNA, 201 bp, Homo sapiens; identical to SEQ ID NO: 1226

SEQ ID NO: 1446 - DNA, 201 bp, Homo sapiens; identical to SEQ ID NO: 1227

SEQ ID NO: 1447 - DNA, 201 bp, Homo sapiens; identical to SEQ ID NO: 1228

SEQ ID NO: 1448 - DNA, 201 bp, Homo sapiens; identical to SEQ ID NO: 1216

SEQ ID NO: 1449 - DNA, 180 bp, Homo sapiens; identical to SEQ ID NO: 1217

SEQ ID NO: 1450 - DNA, 201 bp, Homo sapiens; identical to SEQ ID NO: 1218

SEQ ID NO: 1451 - DNA, 201 bp, Homo sapiens; identical to SEQ ID NO: 1219

SEQ ID NO: 1452 - DNA, 201 bp, Homo sapiens; identical to SEQ ID NO: 1220

SEQ ID NO: 1453 - DNA, 201 bp, Homo sapiens
ctgcccaccagggtcccactggaagacccggactcccagggtcccccggagacgctgggctgtccatcattggtccccgcggcccccctggtcaaccaggmactagaggtttccctggatttccgggtcccattgggctggacggcaaaccgggccacccaggaccaaagggcgacatgggtctgacgggtcccccaggac

SEQ ID NO: 1454 - DNA, 201 bp, Homo sapiens; identical to SEQ ID NO: 1222

SEQ ID NO: 1455 - DNA, 201 bp, Homo sapiens; identical to SEQ ID NO: 1223

SEQ ID NO: 1456 - DNA, 201 bp, Homo sapiens; identical to SEQ ID NO: 1224

SEQ ID NO: 1457 - DNA, 201 bp, Homo sapiens; identical to SEQ ID NO: 1225

SEQ ID NO: 1458 - DNA, 201 bp, Homo sapiens; identical to SEQ ID NO: 1226

SEQ ID NO: 1459 - DNA, 201 bp, Homo sapiens; identical to SEQ ID NO: 1227

SEQ ID NO: 1460 - DNA, 201 bp, Homo sapiens; identical to SEQ ID NO: 1228

SEQ ID NO: 1461 - DNA, 180 bp, Homo sapiens; identical to SEQ ID NO: 1217

SEQ ID NO: 1462 - DNA, 201 bp, Homo sapiens; identical to SEQ ID NO: 1266

SEQ ID NO: 1463 - DNA, 201 bp, Homo sapiens; identical to SEQ ID NO: 1219

SEQ ID NO: 1464 - DNA, 201 bp, Homo sapiens; identical to SEQ ID NO: 1220

SEQ ID NO: 1465 - DNA, 201 bp, Homo sapiens
ctgctggacgagaaatggaagctccactcaaggaggcgccgggaggccccaaagacatctccaggatgtaactgcccaccaggtaagcaggtcaaccaggmactagaggtttccctggatttccgggtcccattgggctggacggcaaaccgggccacccaggaccaaagggcgacatgggtctgacgggtcccccaggac

SEQ ID NO: 1466 - DNA, 201 bp, Homo sapiens; identical to SEQ ID NO: 1222

SEQ ID NO: 1467 - DNA, 201 bp, Homo sapiens; identical to SEQ ID NO: 1223

SEQ ID NO: 1468 - DNA, 201 bp, Homo sapiens; identical to SEQ ID NO: 1224

SEQ ID NO: 1469 - DNA, 201 bp, Homo sapiens; identical to SEQ ID NO: 1225

SEQ ID NO: 1470 - DNA, 201 bp, Homo sapiens; identical to SEQ ID NO: 1226

SEQ ID NO: 1471 - DNA, 201 bp, Homo sapiens; identical to SEQ ID NO: 1227

SEQ ID NO: 1472 - DNA, 201 bp, Homo sapiens; identical to SEQ ID NO: 1228

SEQ ID NO: 1473 - DNA, 201 bp, Homo sapiens; identical to SEQ ID NO: 1216

SEQ ID NO: 1474 - DNA, 180 bp, Homo sapiens; identical to SEQ ID NO: 1217

SEQ ID NO: 1475 - DNA, 201 bp, Homo sapiens; identical to SEQ ID NO: 1218

SEQ ID NO: 1476 - DNA, 201 bp, Homo sapiens; identical to SEQ ID NO: 1219

SEQ ID NO: 1477 - DNA, 201 bp, Homo sapiens; identical to SEQ ID NO: 1220

SEQ ID NO: 1478 - DNA, 201 bp, Homo sapiens; identical to SEQ ID NO: 1244

SEQ ID NO: 1479 - DNA, 201 bp, Homo sapiens; identical to SEQ ID NO: 1222

SEQ ID NO: 1480 - DNA, 201 bp, Homo sapiens; identical to SEQ ID NO: 1223

SEQ ID NO: 1481 - DNA, 201 bp, Homo sapiens; identical to SEQ ID NO: 1224

SEQ ID NO: 1482 - DNA, 201 bp, Homo sapiens; identical to SEQ ID NO: 1225

SEQ ID NO: 1483 - DNA, 201 bp, Homo sapiens; identical to SEQ ID NO: 1226

SEQ ID NO: 1484 - DNA, 201 bp, Homo sapiens; identical to SEQ ID NO: 1227

SEQ ID NO: 1485 - DNA, 201 bp, Homo sapiens; identical to SEQ ID NO: 1228

SEQ ID NO: 1486 - DNA, 180 bp, Homo sapiens; identical to SEQ ID NO: 1217

SEQ ID NO: 1487 - DNA, 201 bp, Homo sapiens; identical to SEQ ID NO: 1266

SEQ ID NO: 1488 - DNA, 201 bp, Homo sapiens; identical to SEQ ID NO: 1219

SEQ ID NO: 1489 - DNA, 201 bp, Homo sapiens; identical to SEQ ID NO: 1220

SEQ ID NO: 1490 - DNA, 201 bp, Homo sapiens; identical to SEQ ID NO: 1244

SEQ ID NO: 1491 - DNA, 201 bp, Homo sapiens; identical to SEQ ID NO: 1222

SEQ ID NO: 1492 - DNA, 201 bp, Homo sapiens; identical to SEQ ID NO: 1223

SEQ ID NO: 1493 - DNA, 201 bp, Homo sapiens; identical to SEQ ID NO: 1224

SEQ ID NO: 1494 - DNA, 201 bp, Homo sapiens; identical to SEQ ID NO: 1225

SEQ ID NO: 1495 - DNA, 201 bp, Homo sapiens; identical to SEQ ID NO: 1226

SEQ ID NO: 1496 - DNA, 201 bp, Homo sapiens; identical to SEQ ID NO: 1227

SEQ ID NO: 1497 - DNA, 201 bp, Homo sapiens; identical to SEQ ID NO: 1228

SEQ ID NO: 1498 - DNA, 201 bp, Homo sapiens; identical to SEQ ID NO: 1216

SEQ ID NO: 1499 - DNA, 180 bp, Homo sapiens; identical to SEQ ID NO: 1217

SEQ ID NO: 1500 - DNA, 201 bp, Homo sapiens; identical to SEQ ID NO: 1218

SEQ ID NO: 1501 - DNA, 201 bp, Homo sapiens; identical to SEQ ID NO: 1279

SEQ ID NO: 1502 - DNA, 201 bp, Homo sapiens; identical to SEQ ID NO: 1220

SEQ ID NO: 1503 - DNA, 201 bp, Homo sapiens; identical to SEQ ID NO: 1244

SEQ ID NO: 1504 - DNA, 201 bp, Homo sapiens; identical to SEQ ID NO: 1222

SEQ ID NO: 1505 - DNA, 201 bp, Homo sapiens; identical to SEQ ID NO: 1223

SEQ ID NO: 1506 - DNA, 201 bp, Homo sapiens; identical to SEQ ID NO: 1224

SEQ ID NO: 1507 - DNA, 201 bp, Homo sapiens; identical to SEQ ID NO: 1225

SEQ ID NO: 1508 - DNA, 201 bp, Homo sapiens; identical to SEQ ID NO: 1226

SEQ ID NO: 1509 - DNA, 201 bp, Homo sapiens; identical to SEQ ID NO: 1227

SEQ ID NO: 1510 - DNA, 201 bp, Homo sapiens; identical to SEQ ID NO: 1228

SEQ ID NO: 1511 - DNA, 180 bp, Homo sapiens; identical to SEQ ID NO: 1217

SEQ ID NO: 1512 - DNA, 201 bp, Homo sapiens; identical to SEQ ID NO: 1266

SEQ ID NO: 1513 - DNA, 201 bp, Homo sapiens; identical to SEQ ID NO: 1219

SEQ ID NO: 1514 - DNA, 201 bp, Homo sapiens; identical to SEQ ID NO: 1220

SEQ ID NO: 1515 - DNA, 201 bp, Homo sapiens; identical to SEQ ID NO: 1330

SEQ ID NO: 1516 - DNA, 201 bp, Homo sapiens; identical to SEQ ID NO: 1222

SEQ ID NO: 1517 - DNA, 201 bp, Homo sapiens; identical to SEQ ID NO: 1223

SEQ ID NO: 1518 - DNA, 201 bp, Homo sapiens; identical to SEQ ID NO: 1224

SEQ ID NO: 1519 - DNA, 201 bp, Homo sapiens; identical to SEQ ID NO: 1225

SEQ ID NO: 1520 - DNA, 201 bp, Homo sapiens; identical to SEQ ID NO: 1226

SEQ ID NO: 1521 - DNA, 201 bp, Homo sapiens; identical to SEQ ID NO: 1227

SEQ ID NO: 1522 - DNA, 201 bp, Homo sapiens; identical to SEQ ID NO: 1228

SEQ ID NO: 1523 - DNA, 201 bp, Homo sapiens; identical to SEQ ID NO: 1240

SEQ ID NO: 1524 - DNA, 180 bp, Homo sapiens; identical to SEQ ID NO: 1217

SEQ ID NO: 1525 - DNA, 201 bp, Homo sapiens; identical to SEQ ID NO: 1219

SEQ ID NO: 1526 - DNA, 201 bp, Homo sapiens; identical to SEQ ID NO: 1220

SEQ ID NO: 1527 - DNA, 201 bp, Homo sapiens; identical to SEQ ID NO: 1465

SEQ ID NO: 1528 - DNA, 201 bp, Homo sapiens; identical to SEQ ID NO: 1222

SEQ ID NO: 1529 - DNA, 201 bp, Homo sapiens; identical to SEQ ID NO: 1223

SEQ ID NO: 1530 - DNA, 201 bp, Homo sapiens; identical to SEQ ID NO: 1224

SEQ ID NO: 1531 - DNA, 201 bp, Homo sapiens; identical to SEQ ID NO: 1225

SEQ ID NO: 1532 - DNA, 201 bp, Homo sapiens; identical to SEQ ID NO: 1226

SEQ ID NO: 1533 - DNA, 201 bp, Homo sapiens; identical to SEQ ID NO: 1227

SEQ ID NO: 1534 - DNA, 201 bp, Homo sapiens; identical to SEQ ID NO: 1228

SEQ ID NO: 1535 - DNA, 180 bp, Homo sapiens; identical to SEQ ID NO: 1217

SEQ ID NO: 1536 - DNA, 201 bp, Homo sapiens; identical to SEQ ID NO: 1219

SEQ ID NO: 1537 - DNA, 201 bp, Homo sapiens; identical to SEQ ID NO: 1220

SEQ ID NO: 1538 - DNA, 201 bp, Homo sapiens; identical to SEQ ID NO: 1453

SEQ ID NO: 1539 - DNA, 201 bp, Homo sapiens; identical to SEQ ID NO: 1222

SEQ ID NO: 1540 - DNA, 201 bp, Homo sapiens; identical to SEQ ID NO: 1223

SEQ ID NO: 1541 - DNA, 201 bp, Homo sapiens; identical to SEQ ID NO: 1224

SEQ ID NO: 1542 - DNA, 201 bp, Homo sapiens; identical to SEQ ID NO: 1225

SEQ ID NO: 1543 - DNA, 201 bp, Homo sapiens; identical to SEQ ID NO: 1226

SEQ ID NO: 1544 - DNA, 201 bp, Homo sapiens; identical to SEQ ID NO: 1227

SEQ ID NO: 1545 - DNA, 201 bp, Homo sapiens; identical to SEQ ID NO: 1228

SEQ ID NO: 1546 - DNA, 201 bp, Homo sapiens; identical to SEQ ID NO: 1216

SEQ ID NO: 1547 - DNA, 180 bp, Homo sapiens; identical to SEQ ID NO: 1217

SEQ ID NO: 1548 - DNA, 201 bp, Homo sapiens; identical to SEQ ID NO: 1218

SEQ ID NO: 1549 - DNA, 201 bp, Homo sapiens; identical to SEQ ID NO: 1279

SEQ ID NO: 1550 - DNA, 201 bp, Homo sapiens; identical to SEQ ID NO: 1220

SEQ ID NO: 1551 - DNA, 201 bp, Homo sapiens; identical to SEQ ID NO: 1244

SEQ ID NO: 1552 - DNA, 201 bp, Homo sapiens; identical to SEQ ID NO: 1222

SEQ ID NO: 1553 - DNA, 201 bp, Homo sapiens; identical to SEQ ID NO: 1223

SEQ ID NO: 1554 - DNA, 201 bp, Homo sapiens; identical to SEQ ID NO: 1224

SEQ ID NO: 1555 - DNA, 201 bp, Homo sapiens; identical to SEQ ID NO: 1225

SEQ ID NO: 1556 - DNA, 201 bp, Homo sapiens; identical to SEQ ID NO: 1226

SEQ ID NO: 1557 - DNA, 201 bp, Homo sapiens; identical to SEQ ID NO: 1227

SEQ ID NO: 1558 - DNA, 201 bp, Homo sapiens; identical to SEQ ID NO: 1228

SEQ ID NO: 1559 - DNA, 201 bp, Homo sapiens; identical to SEQ ID NO: 1240

SEQ ID NO: 1560 - DNA, 180 bp, Homo sapiens; identical to SEQ ID NO: 1217

SEQ ID NO: 1561 - DNA, 201 bp, Homo sapiens; identical to SEQ ID NO: 1219

SEQ ID NO: 1562 - DNA, 201 bp, Homo sapiens; identical to SEQ ID NO: 1220

SEQ ID NO: 1563 - DNA, 201 bp, Homo sapiens; identical to SEQ ID NO: 1244

SEQ ID NO: 1564 - DNA, 201 bp, Homo sapiens; identical to SEQ ID NO: 1222

SEQ ID NO: 1565 - DNA, 201 bp, Homo sapiens; identical to SEQ ID NO: 1223

SEQ ID NO: 1566 - DNA, 201 bp, Homo sapiens; identical to SEQ ID NO: 1224

SEQ ID NO: 1567 - DNA, 201 bp, Homo sapiens; identical to SEQ ID NO: 1225

SEQ ID NO: 1568 - DNA, 201 bp, Homo sapiens; identical to SEQ ID NO: 1226

SEQ ID NO: 1569 - DNA, 201 bp, Homo sapiens; identical to SEQ ID NO: 1227

SEQ ID NO: 1570 - DNA, 201 bp, Homo sapiens; identical to SEQ ID NO: 1228

SEQ ID NO: 1571 - DNA, 201 bp, Homo sapiens; identical to SEQ ID NO: 1216

SEQ ID NO: 1572 - DNA, 180 bp, Homo sapiens; identical to SEQ ID NO: 1217

SEQ ID NO: 1573 - DNA, 201 bp, Homo sapiens; identical to SEQ ID NO: 1218

SEQ ID NO: 1574 - DNA, 201 bp, Homo sapiens; identical to SEQ ID NO: 1219

SEQ ID NO: 1575 - DNA, 201 bp, Homo sapiens; identical to SEQ ID NO: 1220

SEQ ID NO: 1576 - DNA, 201 bp, Homo sapiens; identical to SEQ ID NO: 1244

SEQ ID NO: 1577 - DNA, 201 bp, Homo sapiens; identical to SEQ ID NO: 1222

SEQ ID NO: 1578 - DNA, 201 bp, Homo sapiens; identical to SEQ ID NO: 1223

SEQ ID NO: 1579 - DNA, 201 bp, Homo sapiens; identical to SEQ ID NO: 1224

SEQ ID NO: 1580 - DNA, 201 bp, Homo sapiens; identical to SEQ ID NO: 1225

SEQ ID NO: 1581 - DNA, 201 bp, Homo sapiens; identical to SEQ ID NO: 1226

SEQ ID NO: 1582 - DNA, 201 bp, Homo sapiens; identical to SEQ ID NO: 1227

SEQ ID NO: 1583 - DNA, 201 bp, Homo sapiens; identical to SEQ ID NO: 1228

SEQ ID NO: 1584 - DNA, 201 bp, Homo sapiens; identical to SEQ ID NO: 1216

SEQ ID NO: 1585 - DNA, 180 bp, Homo sapiens; identical to SEQ ID NO: 1217

SEQ ID NO: 1586 - DNA, 201 bp, Homo sapiens; identical to SEQ ID NO: 1218

SEQ ID NO: 1587 - DNA, 201 bp, Homo sapiens; identical to SEQ ID NO: 1219

SEQ ID NO: 1588 - DNA, 201 bp, Homo sapiens; identical to SEQ ID NO: 1220

SEQ ID NO: 1589 - DNA, 201 bp, Homo sapiens; identical to SEQ ID NO: 1244

SEQ ID NO: 1590 - DNA, 201 bp, Homo sapiens; identical to SEQ ID NO: 1222

SEQ ID NO: 1591 - DNA, 201 bp, Homo sapiens; identical to SEQ ID NO: 1223

SEQ ID NO: 1592 - DNA, 201 bp, Homo sapiens; identical to SEQ ID NO: 1224

SEQ ID NO: 1593 - DNA, 201 bp, Homo sapiens; identical to SEQ ID NO: 1225

SEQ ID NO: 1594 - DNA, 201 bp, Homo sapiens; identical to SEQ ID NO: 1226

SEQ ID NO: 1595 - DNA, 201 bp, Homo sapiens; identical to SEQ ID NO: 1227

SEQ ID NO: 1596 - DNA, 201 bp, Homo sapiens; identical to SEQ ID NO: 1228

SEQ ID NO: 1597 - DNA, 201 bp, Homo sapiens; identical to SEQ ID NO: 1216

SEQ ID NO: 1598 - DNA, 180 bp, Homo sapiens; identical to SEQ ID NO: 1217

SEQ ID NO: 1599 - DNA, 201 bp, Homo sapiens; identical to SEQ ID NO: 1218

SEQ ID NO: 1600 - DNA, 201 bp, Homo sapiens; identical to SEQ ID NO: 1219

SEQ ID NO: 1601 - DNA, 201 bp, Homo sapiens; identical to SEQ ID NO: 1220

SEQ ID NO: 1602 - DNA, 201 bp, Homo sapiens; identical to SEQ ID NO: 1244

SEQ ID NO: 1603 - DNA, 201 bp, Homo sapiens; identical to SEQ ID NO: 1222

SEQ ID NO: 1604 - DNA, 201 bp, Homo sapiens; identical to SEQ ID NO: 1223

SEQ ID NO: 1605 - DNA, 201 bp, Homo sapiens; identical to SEQ ID NO: 1224

SEQ ID NO: 1606 - DNA, 201 bp, Homo sapiens; identical to SEQ ID NO: 1225

SEQ ID NO: 1607 - DNA, 201 bp, Homo sapiens; identical to SEQ ID NO: 1226

SEQ ID NO: 1608 - DNA, 201 bp, Homo sapiens; identical to SEQ ID NO: 1227

SEQ ID NO: 1609 - DNA, 201 bp, Homo sapiens; identical to SEQ ID NO: 1228

SEQ ID NO: 1610 - DNA, 201 bp, Homo sapiens; identical to SEQ ID NO: 1216

SEQ ID NO: 1611 - DNA, 180 bp, Homo sapiens; identical to SEQ ID NO: 1217

SEQ ID NO: 1612 - DNA, 201 bp, Homo sapiens; identical to SEQ ID NO: 1218

SEQ ID NO: 1613 - DNA, 201 bp, Homo sapiens; identical to SEQ ID NO: 1219

SEQ ID NO: 1614 - DNA, 201 bp, Homo sapiens; identical to SEQ ID NO: 1220

SEQ ID NO: 1615 - DNA, 201 bp, Homo sapiens
atctccaggatgtaactgcccaccagggtcccactggaagacccggactcccaggggacaaaggtgccattgggatgcctggacgtgtgggtcaaccaggmactagaggtttccctggatttccgggtcccattgggctggacggcaaaccgggccacccaggaccaaagggcgacatgggtctgacgggtcccccaggac

SEQ ID NO: 1616 - DNA, 201 bp, Homo sapiens; identical to SEQ ID NO: 1222

SEQ ID NO: 1617 - DNA, 201 bp, Homo sapiens; identical to SEQ ID NO: 1223

SEQ ID NO: 1618 - DNA, 201 bp, Homo sapiens; identical to SEQ ID NO: 1224

SEQ ID NO: 1619 - DNA, 201 bp, Homo sapiens; identical to SEQ ID NO: 1225

SEQ ID NO: 1620 - DNA, 201 bp, Homo sapiens; identical to SEQ ID NO: 1226

SEQ ID NO: 1621 - DNA, 201 bp, Homo sapiens; identical to SEQ ID NO: 1227

SEQ ID NO: 1622 - DNA, 201 bp, Homo sapiens; identical to SEQ ID NO: 1228

SEQ ID NO: 1623 - DNA, 180 bp, Homo sapiens; identical to SEQ ID NO: 1217

SEQ ID NO: 1624 - DNA, 201 bp, Homo sapiens; identical to SEQ ID NO: 1266

SEQ ID NO: 1625 - DNA, 201 bp, Homo sapiens; identical to SEQ ID NO: 1279

SEQ ID NO: 1626 - DNA, 201 bp, Homo sapiens; identical to SEQ ID NO: 1220

SEQ ID NO: 1627 - DNA, 201 bp, Homo sapiens; identical to SEQ ID NO: 1417

SEQ ID NO: 1628 - DNA, 201 bp, Homo sapiens; identical to SEQ ID NO: 1222

SEQ ID NO: 1629 - DNA, 201 bp, Homo sapiens; identical to SEQ ID NO: 1223

SEQ ID NO: 1630 - DNA, 201 bp, Homo sapiens; identical to SEQ ID NO: 1224

SEQ ID NO: 1631 - DNA, 201 bp, Homo sapiens; identical to SEQ ID NO: 1225

SEQ ID NO: 1632 - DNA, 201 bp, Homo sapiens; identical to SEQ ID NO: 1226

SEQ ID NO: 1633 - DNA, 201 bp, Homo sapiens; identical to SEQ ID NO: 1227

SEQ ID NO: 1634 - DNA, 201 bp, Homo sapiens; identical to SEQ ID NO: 1228

SEQ ID NO: 1635 - DNA, 201 bp, Homo sapiens; identical to SEQ ID NO: 1216

SEQ ID NO: 1636 - DNA, 180 bp, Homo sapiens; identical to SEQ ID NO: 1217

SEQ ID NO: 1637 - DNA, 201 bp, Homo sapiens; identical to SEQ ID NO: 1218

SEQ ID NO: 1638 - DNA, 201 bp, Homo sapiens; identical to SEQ ID NO: 1219

SEQ ID NO: 1639 - DNA, 201 bp, Homo sapiens; identical to SEQ ID NO: 1220

SEQ ID NO: 1640 - DNA, 201 bp, Homo sapiens; identical to SEQ ID NO: 1244

SEQ ID NO: 1641 - DNA, 201 bp, Homo sapiens; identical to SEQ ID NO: 1222

SEQ ID NO: 1642 - DNA, 201 bp, Homo sapiens; identical to SEQ ID NO: 1223

SEQ ID NO: 1643 - DNA, 201 bp, Homo sapiens; identical to SEQ ID NO: 1224

SEQ ID NO: 1644 - DNA, 201 bp, Homo sapiens; identical to SEQ ID NO: 1225

SEQ ID NO: 1645 - DNA, 201 bp, Homo sapiens; identical to SEQ ID NO: 1226

SEQ ID NO: 1646 - DNA, 201 bp, Homo sapiens; identical to SEQ ID NO: 1227

SEQ ID NO: 1647 - DNA, 201 bp, Homo sapiens; identical to SEQ ID NO: 1228

SEQ ID NO: 1648 - DNA, 201 bp, Homo sapiens; identical to SEQ ID NO: 1216

SEQ ID NO: 1649 - DNA, 180 bp, Homo sapiens; identical to SEQ ID NO: 1217

SEQ ID NO: 1650 - DNA, 201 bp, Homo sapiens; identical to SEQ ID NO: 1218

SEQ ID NO: 1651 - DNA, 201 bp, Homo sapiens; identical to SEQ ID NO: 1219

SEQ ID NO: 1652 - DNA, 201 bp, Homo sapiens; identical to SEQ ID NO: 1220

SEQ ID NO: 1653 - DNA, 201 bp, Homo sapiens; identical to SEQ ID NO: 1367

SEQ ID NO: 1654 - DNA, 201 bp, Homo sapiens; identical to SEQ ID NO: 1222

SEQ ID NO: 1655 - DNA, 201 bp, Homo sapiens; identical to SEQ ID NO: 1223

SEQ ID NO: 1656 - DNA, 201 bp, Homo sapiens; identical to SEQ ID NO: 1224

SEQ ID NO: 1657 - DNA, 201 bp, Homo sapiens; identical to SEQ ID NO: 1225

SEQ ID NO: 1658 - DNA, 201 bp, Homo sapiens; identical to SEQ ID NO: 1226

SEQ ID NO: 1659 - DNA, 201 bp, Homo sapiens; identical to SEQ ID NO: 1227

SEQ ID NO: 1660 - DNA, 201 bp, Homo sapiens; identical to SEQ ID NO: 1228

SEQ ID NO: 1661 - DNA, 201 bp, Homo sapiens; identical to SEQ ID NO: 1216

SEQ ID NO: 1662 - DNA, 180 bp, Homo sapiens; identical to SEQ ID NO: 1217

SEQ ID NO: 1663 - DNA, 201 bp, Homo sapiens; identical to SEQ ID NO: 1218

SEQ ID NO: 1664 - DNA, 201 bp, Homo sapiens; identical to SEQ ID NO: 1219

SEQ ID NO: 1665 - DNA, 201 bp, Homo sapiens; identical to SEQ ID NO: 1220

SEQ ID NO: 1666 - DNA, 201 bp, Homo sapiens; identical to SEQ ID NO: 1244

SEQ ID NO: 1667 - DNA, 201 bp, Homo sapiens; identical to SEQ ID NO: 1222

SEQ ID NO: 1668 - DNA, 201 bp, Homo sapiens; identical to SEQ ID NO: 1223

SEQ ID NO: 1669 - DNA, 201 bp, Homo sapiens; identical to SEQ ID NO: 1224

SEQ ID NO: 1670 - DNA, 201 bp, Homo sapiens; identical to SEQ ID NO: 1225

SEQ ID NO: 1671 - DNA, 201 bp, Homo sapiens; identical to SEQ ID NO: 1226

SEQ ID NO: 1672 - DNA, 201 bp, Homo sapiens; identical to SEQ ID NO: 1227

SEQ ID NO: 1673 - DNA, 201 bp, Homo sapiens; identical to SEQ ID NO: 1228

SEQ ID NO: 1674 - DNA, 180 bp, Homo sapiens; identical to SEQ ID NO: 1217

SEQ ID NO: 1675 - DNA, 201 bp, Homo sapiens; identical to SEQ ID NO: 1266

SEQ ID NO: 1676 - DNA, 201 bp, Homo sapiens; identical to SEQ ID NO: 1279

SEQ ID NO: 1677 - DNA, 201 bp, Homo sapiens; identical to SEQ ID NO: 1220

SEQ ID NO: 1678 - DNA, 201 bp, Homo sapiens; identical to SEQ ID NO: 1244

SEQ ID NO: 1679 - DNA, 201 bp, Homo sapiens; identical to SEQ ID NO: 1222

SEQ ID NO: 1680 - DNA, 201 bp, Homo sapiens; identical to SEQ ID NO: 1223

SEQ ID NO: 1681 - DNA, 201 bp, Homo sapiens; identical to SEQ ID NO: 1224

SEQ ID NO: 1682 - DNA, 201 bp, Homo sapiens; identical to SEQ ID NO: 1225

SEQ ID NO: 1683 - DNA, 201 bp, Homo sapiens; identical to SEQ ID NO: 1226

SEQ ID NO: 1684 - DNA, 201 bp, Homo sapiens; identical to SEQ ID NO: 1227

SEQ ID NO: 1685 - DNA, 201 bp, Homo sapiens; identical to SEQ ID NO: 1228

SEQ ID NO: 1686 - DNA, 186 bp, Homo sapiens
agcaaagctttttctcgtgctctgaagggtcttgagaggggagtgggatgccttctgtgaggatttttatcgcagtgaagctcaagtggtacccaactgcrttgtaattaacatgattattggcatgtttttgactctcattttctacaaggctgcagtgggcccacccatgggctggcccataac

SEQ ID NO: 1687 - DNA, 201 bp, Homo sapiens
tccagtcatcagctaatacaaatgatttcccagagcagtgtttgtttcaagcttctgtcaaatagtttggcttttctgcagggtctctgtgatttccccayctatgtacttttctgtgttaactcacttattatggtataactcaggaacaggtctcaggatggagagaagcatacaacatgagcaaagctttttctcgtg

SEQ ID NO: 1688 - DNA, 201 bp, Homo sapiens
tatatgccttcttcaaccgggacctgaggaccacctatcgcagcctgctccagtgccagtaccggaatatcaaccggaagctctcagctgcaggcatgcaygaagccctgaagcttgctgagaggccagagagacctgagtttgtgctgtaagacaaaatgctgactactgtagaaaaaaaggtcatgattcatgattgaa

SEQ ID NO: 1689 - DNA, 201 bp, Homo sapiens
tcattaacccttttatatatgccttcttcaaccgggacctgaggaccacctatcgcagcctgctccagtgccagtaccggaatatcaaccggaagctctcrgctgcaggcatgcatgaagccctgaagcttgctgagaggccagagagacctgagtttgtgctgtaagacaaaatgctgactactgtagaaaaaaaggtca

SEQ ID NO: 1690 - DNA, 186 bp, Homo sapiens; identical to SEQ ID NO: 1686

SEQ ID NO: 1691 - DNA, 201 bp, Homo sapiens; identical to SEQ ID NO: 1687

SEQ ID NO: 1692 - DNA, 201 bp, Homo sapiens
tatatgccttcttcaaccgggacctgaggaccacctatcgcagcctgctccagtgccagtaccggaatatcaaccggaagctctcagctgcaggcatgcaygaagccctgaagcttgctgagaggccagagagacctgagtttgtgctgagggcctgcacaaggagggtgctgttgagaccagaaaagaggccaccggtat

SEQ ID NO: 1693 - DNA, 201 bp, Homo sapiens
atgcatgaagccctgaagcttgctgagaggccagagagacctgagtttgtgctgagggcctgcacaaggagggtgctgttgagaccagaaaagaggccacmggtatctgtgtgggtgctacaatctccagaccatcacaattggttagcagacaaaatgctgactactgtagaaaaaaaggtcatgattcatgattgaaag

SEQ ID NO: 1694 - DNA, 201 bp, Homo sapiens
tcattaacccttttatatatgccttcttcaaccgggacctgaggaccacctatcgcagcctgctccagtgccagtaccggaatatcaaccggaagctctcrgctgcaggcatgcatgaagccctgaagcttgctgagaggccagagagacctgagtttgtgctgagggcctgcacaaggagggtgctgttgagaccagaaa

SEQ ID NO: 1695 - DNA, 186 bp, Homo sapiens; identical to SEQ ID NO: 1686

SEQ ID NO: 1696 - DNA, 201 bp, Homo sapiens; identical to SEQ ID NO: 1687

SEQ ID NO: 1697 - DNA, 201 bp, Homo sapiens
tatatgccttcttcaaccgggacctgaggaccacctatcgcagcctgctccagtgccagtaccggaatatcaaccggaagctctcagctgcaggcatgcaygaagccctgaagcttgctgagaggccagagagacctgagtttgtgctacaaaatgctgactactgtagaaaaaaaggtcatgattcatgattgaaagcag

SEQ ID NO: 1698 - DNA, 201 bp, Homo sapiens
tcattaacccttttatatatgccttcttcaaccgggacctgaggaccacctatcgcagcctgctccagtgccagtaccggaatatcaaccggaagctctcrgctgcaggcatgcatgaagccctgaagcttgctgagaggccagagagacctgagtttgtgctacaaaatgctgactactgtagaaaaaaaggtcatgatt

SEQ ID NO: 1699 - DNA, 186 bp, Homo sapiens; identical to SEQ ID NO: 1686

SEQ ID NO: 1700 - DNA, 201 bp, Homo sapiens; identical to SEQ ID NO: 1687

SEQ ID NO: 1701 - DNA, 201 bp, Homo sapiens; identical to SEQ ID NO: 1697

SEQ ID NO: 1702 - DNA, 201 bp, Homo sapiens; identical to SEQ ID NO: 1698

SEQ ID NO: 1703 - DNA, 201 bp, Homo sapiens
ttatcattatcactcttaacccaccctaaaatttcctaaaggtatcccgttgacctcaggatacattaaagctacttagtggtgactggtttctgcctacyacttcctcccctaccacctaacactcacacatacaaatacttggttcaactgtttgctctccttgaaatgaatgcctcctctgtgcccagctagcagtta

SEQ ID NO: 1704 - DNA, 201 bp, Homo sapiens; identical to SEQ ID NO: 1703

SEQ ID NO: 1705 - DNA, 201 bp, Homo sapiens
aagaagtttctgagctttgtggcctaccaagggagaaactggctgcagcagagcgagtacttcgttccaacatggacatcctgaagccaatcctggtgagyagacttgctcactggagaaacttcaagcactaatgctttcggaatgtgaggcttttccttggacagcatgactttgttttgtagaaaagtacggctggct

SEQ ID NO: 1706 - DNA, 201 bp, Homo sapiens
tgcgcaaagttctgagaacattacagcagatcaagaaatccagctcaaacttgaagcttcaagatttcctggtggacaatgaaaccttctctgggttcctrtatcacaacctctctctcccaaagtctactgtggacaagatgctgagggctgatgtcattctccacaaggtatttttgcaaggctaccagttacatttga

SEQ ID NO: 1707 - DNA, 201 bp, Homo sapiens
aacagagttcttcatatttaaaaaaaaaaagtcttgaaaccattgatgggaagatggatatctatttatgtttaaaaacccatcataaagatgacattgtrggctgtcacagttggaaggccctggaattagatgagaccacactatttagcttacttagtaataacattgcaaagaaaaattccgacgaagttttttcag

SEQ ID NO: 1708 - DNA, 201 bp, Homo sapiens
  misc_feature (1)...(201): n = A,T,C or G, or insertion/deletion polymorphism (see Tables 1-2)
ggctaccagttacatttgacaagtctgtgcaatggatcaaaatcagaagagatgattcaacttggtgaccaagaagtttctgagctttgtggcctaccaanggagaaactggctgcagcagagcgagtacttcgttccaacatggacatcctgaagccaatcctggtgagtagacttgctcactggagaaacttcaagcac

SEQ ID NO: 1709 - DNA, 124 bp, Homo sapiens
tatccaggattctggttttctactcaccagatagattctcttaaaaccagggaaagattcctggaggaaggatgtatctggaaagagatgttccttattayaataaaatgaaattgtaatactc

SEQ ID NO: 1710 - DNA, 201 bp, Homo sapiens
gacgcaaacacaaaagtggaaaacagttaatgaccagccacggcgtccctgctgtgagctctggccgctgccttccagggctcccgagccacacgctgggsgtgctggctgagggaacatggcttgttggcctcagctgaggttgctgctgtggaagaacctcactttcagaagaagacaaacatgtcagctgctgctgga

SEQ ID NO: 1711 - DNA, 116 bp, Homo sapiens
attctggttttctactcaccagatagattctcttaaaaccagggaaagattcctggaggaaggatgtatctggaaagagatgttccttattataataaaaygaaattgtaatactc

SEQ ID NO: 1712 - DNA, 201 bp, Homo sapiens
atactggtgagcctgagcagtttggtcatcagagtgttttatatagttccagaacaaatatgtctctaggtgttctgagagctctggtgaaattcctctcsctaccccaaacatcatcatttaatatccaggattctggttttctactcaccagatagattctcttaaaaccagggaaagattcctggaggaaggatgtat

SEQ ID NO: 1713 - DNA, 201 bp, Homo sapiens
ggatatctatttatgtttaaaaacccatcataaagatgacattgtgggctgtcacagttggaaggccctggaattagatgagaccacactatttagcttayttagtaataacattgcaaagaaaaattccgacgaagttttttcagcctaggaatcaatagttcagagaagcactctatgagaatacccattcattcttaa

SEQ ID NO: 1714 - DNA, 201 bp, Homo sapiens
agatgacattgtgggctgtcacagttggaaggccctggaattagatgagaccacactatttagcttacttagtaataacattgcaaagaaaaattccgacraagttttttcagcctaggaatcaatagttcagagaagcactctatgagaatacccattcattcttaaccaaaaaatactggtgagcctgagcagtttggt

SEQ ID NO: 1715 - DNA, 201 bp, Homo sapiens
ctatgtggtgctcaccagcgtgaacctcttcattggcattaatggcagcgtggccacctttgtgctggagctgttcaccgacaataagctgaataatatcmatgatatcctgaagtccgtgttcttgatcttcccacatttttgcctgggacgagggctcatcgacatggtgaaaaaccaggcaatggctgatgccctgga

SEQ ID NO: 1716 - DNA, 201 bp, Homo sapiens
gttacgttgatgacatctttctgcgggtgatgagccggtcaatgcccctcttcatgacgctggcctggatttactcagtggctgtgatcatcaagggcatygtgtatgagaaggaggcacggctgaaagagaccatgcggatcatgggcctggacaacagcatcctctggtttagctggttcattagtagcctcattcctc

SEQ ID NO: 1717 - DNA, 201 bp, Homo sapiens
tcgatgtctctgctatctccaacctcatcaggaagcatgtgtctgaagcccggctggtggaagacatagggcatgagctgacctatgtgctgccatatgargctgctaaggagggagcctttgtggaactctttcatgagattgatgaccggctctcagacctgggcatttctagttatggcatctcagagacgaccctgg

SEQ ID NO: 1718 - DNA, 201 bp, Homo sapiens
  misc_feature (1)...(201): n = A,T,C or G, or insertion/deletion polymorphism (see Tables 1-2)
gccatcaaacaaatgaagaaacacctaaagctggccaaggacagttctgcagatcgatttctcaacagcttgggaagatttatgacaggactggacaccanaaataatgtcaaggtgtggttcaataacaagggctggcatgcaatcagctctttcctgaatgtcatcaacaatgccattctccgggccaacctgcaaaag

SEQ ID NO: 1719 - DNA, 201 bp, Homo sapiens
tcagttcctgcagaaacagtagtagcactgtgtcatacctgaaaaaggaggacagtgtttctcagagcagttctgatgctggcctgggcagcgaccatgasagtgacacgctgaccatcgatgtctctgctatctccaacctcatcaggaagcatgtgtctgaagcccggctggtggaagacatagggcatgagctgacct

SEQ ID NO: 1720 - DNA, 201 bp, Homo sapiens; identical to SEQ ID NO: 1706

SEQ ID NO: 1721 - DNA, 201 bp, Homo sapiens
ctatggggtgatgacctggtacattgaggctgtctttccaggccagtacggaattcccaggccctggtattttccttgcaccaagtcctactggtttggcraggaaagtgatgagaagagccaccctggttccaaccagaagagaatatcagaaatctgcatggaggaggaacccacccacttgaagctgggcgtgtccat

SEQ ID NO: 1722 - DNA, 201 bp, Homo sapiens
  misc_feature (1)...(201): n = A,T,C or G, or insertion/deletion polymorphism (see Tables 1-2)
ggctaccagttacatttgacaagtctgtgcaatggatcaaaatcagaagagatgattcaacttggtgaccaagaagtttctgagctttgtggcctaccaanggagaaactggctgcagcagagcgagtacttcgttccaacatggacatcctgaagccaatcctgagaacactaaactctacatctcccttcccgagcaag

SEQ ID NO: 1723 - DNA, 201 bp, Homo sapiens
cctggatttactcagtggctgtgatcatcaagggcatcgtgtatgagaaggaggcacggctgaaagagaccatgcggatcatgggcctggacaacagcatmctctggtttagctggttcattagtagcctcattcctcttcttgtgagcgctggcctgctagtggtcatcctgaagttaggaaacctgctgccctacagtg

SEQ ID NO: 1724 - DNA, 201 bp, Homo sapiens
aggaggtgatgtttctgaccaatgtgaacagctccagctcctccacccaaatctaccaggctgtgtctcgtattgtctgcgggcatcccgagggagggggrctgaagatcaagtctctcaactggtatgaggacaacaactacaaagccctctttggaggcaatggcactgaggaagatgctgaaaccttctatgacaact

SEQ ID NO: 1725 - DNA, 201 bp, Homo sapiens
ggctggtggaagacatagggcatgagctgacctatgtgctgccatatgaagctgctaaggagggagcctttgtggaactctttcatgagattgatgaccgrctctcagacctgggcatttctagttatggcatctcagagacgaccctggaagaaatattcctcaaggtggccgaagagagtggggtggatgctgagacct

SEQ ID NO: 1726 - DNA, 201 bp, Homo sapiens
ccctggttccaaccagaagagaatatcagaaatctgcatggaggaggaacccacccacttgaagctgggcgtgtccattcagaacctggtaaaagtctacygagatgggatgaaggtggctgtcgatggcctggcactgaatttttatgagggccagatcacctccttcctgggccacaatggagcggggaagacgaccac

SEQ ID NO: 1727 - DNA, 201 bp, Homo sapiens
agtatcttatcaaacatccatgaagtacatcagaacatgggctactgccctcagtttgatgccatcacagagctgttgactgggagagaacacgtggagtyctttgcccttttgagaggagtcccagagaaagaagttggcaaggttggtgagtgggcgattcggaaactgggcctcgtgaagtatggagaaaaatatgct

SEQ ID NO: 1728 - DNA, 201 bp, Homo sapiens
atgctgcctgtgtgtcccccaggggcaggggggctgcctcctccacaaagaaaacaaaacactgcagatatccttcaggacctgacaggaagaaacatttyggattatctggtgaagacgtatgtgcagatcatagccaaaagcttaaagaacaagatctgggtgaatgagtttaggtatggcggcttttccctgggtgtc

SEQ ID NO: 1729 - DNA, 201 bp, Homo sapiens
gtgacatgcgacaggaggtgatgtttctgaccaatgtgaacagctccagctcctccacccaaatctaccaggctgtgtctcgtattgtctgcgggcatccygagggaggggggctgaagatcaagtctctcaactggtatgaggacaacaactacaaagccctctttggaggcaatggcactgaggaagatgctgaaacct

SEQ ID NO: 1730 - DNA, 201 bp, Homo sapiens
ccatagcaacagaagtctggctcatcaacaagtccatggagctgctggatgagaggaagttctgggctggtattgtgttcactggaattactccaggcagyattgagctgccccatcatgtcaagtacaagatccgaatggacattgacaatgtggagaggacaaataaaatcaaggatgggtactgggaccctggtcctc

SEQ ID NO: 1731 - DNA, 201 bp, Homo sapiens
atgctcctgaggacacgggaaccctggaactcttaaacgccctcaccaaagaccctggcttcgggacccgctgtatggaaggaaacccaatcccagacacrccctgccaggcaggggaggaagagtggaccactgccccagttccccagaccatcatggacctcttccagaatgggaactggacaatgcagaacccttcac

SEQ ID NO: 1732 - DNA, 201 bp, Homo sapiens
atggtcaatggaaggttcaggtgccttggcagtgtccagcatctaaaaaataggtttggagatggttatacaatagttgtacgaatagcagggtccaaccyggacctgaagcctgtccaggatttctttggacttgcatttcctggaagtgttctaaaagagaaacaccggaacatgctacaataccagcttccatcttca

SEQ ID NO: 1733 - DNA, 201 bp, Homo sapiens
ctccagagccaacctggcagcagcctgtgggggcatcatctacttcacgctgtacctgccctacgtcctgtgtgtggcatggcaggactacgtgggcttcmcactcaagatcttcgctagcctgctgtctcctgtggcttttgggtttggctgtgagtactttgccctttttgaggagcagggcattggagtgcagtggga

SEQ ID NO: 1734 - DNA, 201 bp, Homo sapiens
gccctcattccaagcactttacgctgtctgtaatgggatctatttttgcactggaatatctgagaattgcaaaactagacaaaagtttcacaacagatttytaagttaaatcattttcattaaaaggaaaaaagaaaaaaaattttgtatgtcaataactttatatgaagtattaaaatgcatatttctatgttgtaatat

SEQ ID NO: 1735 - DNA, 201 bp, Homo sapiens
agggctcatcgacatggtgaaaaaccaggcaatggctgatgccctggaaaggtttggggagaatcgctttgtgtcaccattatcttgggacttggtgggaygaaacctcttcgccatggccgtggaaggggtggtgttcttcctcattactgttctgatccagtacagattcttcatcaggcccagacctgtaaatgcaaa

SEQ ID NO: 1736 - DNA, 201 bp, Homo sapiens
ccggcagaacctgggggtctgtccccagcataacgtgctgtttgacatgctgactgtcgaagaacacatctggttctatgcccgcttgaaagggctctctragaagcacgtgaaggcggagatggagcagatggccctggatgttggtttgccatcaagcaagctgaaaagcaaaacaagccagctgtcaggtggaatgca

SEQ ID NO: 1737 - DNA, 201 bp, Homo sapiens
cacactcttctccagagccaacctggcagcagcctgtgggggcatcatctacttcacgctgtacctgccctacgtcctgtgtgtggcatggcaggactacrtgggcttcacactcaagatcttcgctagcctgctgtctcctgtggcttttgggtttggctgtgagtactttgccctttttgaggagcagggcattggagt

SEQ ID NO: 1738 - DNA, 201 bp, Homo sapiens
ttcgcccgttcactgaagatgatgctgctgatccaaatgattctgacatagacccagaatccagagagacagacttgctcagtgggatggatggcaaaggrtcctaccaggtgaaaggctggaaacttacacagcaacagtttgtggcccttttgtggaagagactgctaattgccagacggagtcggaaaggattttttg

SEQ ID NO: 1739 - DNA, 201 bp, Homo sapiens
tggtcaatggaaggttcaggtgccttggcagtgtccagcatctaaaaaataggtttggagatggttatacaatagttgtacgaatagcagggtccaacccrgacctgaagcctgtccaggatttctttggacttgcatttcctggaagtgttctaaaagagaaacaccggaacatgctacaataccagcttccatcttcat

SEQ ID NO: 1740 - DNA, 201 bp, Homo sapiens
tgaatgatgaagatgaagatgtgaggcgggaaagacagagaattcttgatggtggaggccagaatgacatcttagaaatcaaggagttgacgaagatatayagaaggaagcggaagcctgctgttgacaggatttgcgtgggcattcctcctggtgagtgctttgggctcctgggagttaatggggctggaaaatcatcaa

SEQ ID NO: 1741 - DNA, 201 bp, Homo sapiens
acaccacatggatgaagcggacgtcctgggggacaggattgccatcatctcccatgggaagctgtgctgtgtgggctcctccctgtttctgaagaaccagytgggaacaggctactacctgaccttggtcaagaaagatgtggaatcctccctcagttcctgcagaaacagtagtagcactgtgtcatacctgaaaaagga

SEQ ID NO: 1742 - DNA, 201 bp, Homo sapiens
gggaagatttatgacaggactggacaccagaaataatgtcaaggtgtggttcaataacaagggctggcatgcaatcagctctttcctgaatgtcatcaacratgccattctccgggccaacctgcaaaagggagagaaccctagccattatggaattactgctttcaatcatcccctgaatctcaccaagcagcagctctc

SEQ ID NO: 1743 - DNA, 201 bp, Homo sapiens
acctcttccagaatgggaactggacaatgcagaacccttcacctgcatgccagtgtagcagcgacaaaatcaagaagatgctgcctgtgtgtcccccaggkgcaggggggctgcctcctccacaaagaaaacaaaacactgcagatatccttcaggacctgacaggaagaaacatttcggattatctggtgaagacgtatg

SEQ ID NO: 1744 - DNA, 201 bp, Homo sapiens
gttaactgtcttgagagaaaagaaaaatatgagagaactattgtttggggaagttcaagtgatctttcaatatcattactaacttcttccactttttccaraatttgaatattaacgctaaaggtgtaagacttcagatttcaaattaatctttctatattttttaaatttacagaatattatataacccactgctgaaaa

SEQ ID NO: 1745 - DNA, 201 bp, Homo sapiens
gtaatggttctgtgtacacctggagagaagctttcaacgagactaaccaggcaatccggaccatatctcgcttcatggagtgtgtcaacctgaacaagctrgaacccatagcaacagaagtctggctcatcaacaagtccatggagctgctggatgagaggaagttctgggctggtattgtgttcactggaattactccag

SEQ ID NO: 1746 - DNA, 201 bp, Homo sapiens
aagctgggcgtgtccattcagaacctggtaaaagtctaccgagatgggatgaaggtggctgtcgatggcctggcactgaatttttatgagggccagatcayctccttcctgggccacaatggagcggggaagacgaccaccatgtcaatcctgaccgggttgttccccccgacctcgggcaccgcctacatcctgggaaaa

SEQ ID NO: 1747 - DNA, 201 bp, Homo sapiens
taaaagtctaccgagatgggatgaaggtggctgtcgatggcctggcactgaatttttatgagggccagatcacctccttcctgggccacaatggagcgggraagacgaccaccatgtcaatcctgaccgggttgttccccccgacctcgggcaccgcctacatcctgggaaaagacattcgctctgagatgagcaccatcc

SEQ ID NO: 1748 - DNA, 201 bp, Homo sapiens
  misc_feature (1)...(201): n = A,T,C or G, or insertion/deletion polymorphism (see Tables 1-2)
tgagtactttgccctttttgaggagcagggcattggagtgcagtgggacaacctgtttgagagtcctgtggaggaagatggcttcaatctcaccacttcgntctccatgatgctgtttgacaccttcctctatggggtgatgacctggtacattgaggctgtctttccaggccagtacggaattcccaggccctggtattt

SEQ ID NO: 1749 - DNA, 201 bp, Homo sapiens
acggaattcccaggccctggtattttccttgcaccaagtcctactggtttggcgaggaaagtgatgagaagagccaccctggttccaaccagaagagaatrtcagaaatctgcatggaggaggaacccacccacttgaagctgggcgtgtccattcagaacctggtaaaagtctaccgagatgggatgaaggtggctgtcg

SEQ ID NO: 1750 - DNA, 201 bp, Homo sapiens
gtttgccatcaagcaagctgaaaagcaaaacaagccagctgtcaggtggaatgcagagaaagctatctgtggccttggcctttgtcgggggatctaaggtkgtcattctggatgaacccacagctggtgtggacccttactcccgcaggggaatatgggagctgctgctgaaataccgacaaggccgcaccattattctct

SEQ ID NO: 1751 - DNA, 201 bp, Homo sapiens
cgattcggaaactgggcctcgtgaagtatggagaaaaatatgctggtaactatagtggaggcaacaaacgcaagctctctacagccatggctttgatcggygggcctcctgtggtgtttctggatgaacccaccacaggcatggatcccaaagcccggcggttcttgtggaattgtgccctaagtgttgtcaaggagggga

SEQ ID NO: 1752 - DNA, 201 bp, Homo sapiens
actggctgcagcagagcgagtacttcgttccaacatggacatcctgaagccaatcctgagaacactaaactctacatctcccttcccgagcaaggagctgrctgaagccacaaaaacattgctgcatagtcttgggactctggcccaggagctgttcagcatgagaagctggagtgacatgcgacaggaggtgatgtttct

SEQ ID NO: 1753 - DNA, 201 bp, Homo sapiens
tgttcaagatccccagcacagcctatgtggtgctcaccagcgtgaacctcttcattggcattaatggcagcgtggccacctttgtgctggagctgttcacygacaataagctgaataatatcaatgatatcctgaagtccgtgttcttgatcttcccacatttttgcctgggacgagggctcatcgacatggtgaaaaacc

SEQ ID NO: 1754 - DNA, 201 bp, Homo sapiens
ttactcccgcaggggaatatgggagctgctgctgaaataccgacaaggccgcaccattattctctctacacaccacatggatgaagcggacgtcctggggkacaggattgccatcatctcccatgggaagctgtgctgtgtgggctcctccctgtttctgaagaaccagctgggaacaggctactacctgaccttggtcaa

SEQ ID NO: 1755 - DNA, 201 bp, Homo sapiens
tttatgagggccagatcacctccttcctgggccacaatggagcggggaagacgaccaccatgtcaatcctgaccgggttgttccccccgacctcgggcacygcctacatcctgggaaaagacattcgctctgagatgagcaccatccggcagaacctgggggtctgtccccagcataacgtgctgtttgacatgctgactg

SEQ ID NO: 1756 - DNA, 201 bp, Homo sapiens
tgaggagcagggcattggagtgcagtgggacaacctgtttgagagtcctgtggaggaagatggcttcaatctcaccacttcggtctccatgatgctgtttracaccttcctctatggggtgatgacctggtacattgaggctgtctttccaggccagtacggaattcccaggccctggtattttccttgcaccaagtccta

SEQ ID NO: 1757 - DNA, 201 bp, Homo sapiens
cgggccaacctgcaaaagggagagaaccctagccattatggaattactgctttcaatcatcccctgaatctcaccaagcagcagctctcagaggtggctcygatgaccacatcagtggatgtccttgtgtccatctgtgtcatctttgcaatgtccttcgtcccagccagctttgtcgtattcctgatccaggagcgggtc

SEQ ID NO: 1758 - DNA, 201 bp, Homo sapiens
agacaacacttgaccaagtatttgtgaactttgccaaggaccaaagtgatgatgaccacttaaaagacctctcattacacaaaaaccagacagtagtggamgttgcagttctcacatcttttctacaggatgagaaagtgaaagaaagctatgtatgaagaatcctgttcatacggggtggctgaaagtaaagaggaacta

SEQ ID NO: 1759 - DNA, 201 bp, Homo sapiens
cctctttcccgcattatctggaaagctctgaagccgctgctcgttgggaagatcctgtatacacctgacactccagccacaaggcaggtcatggctgaggygaacaagaccttccaggaactggctgtgttccatgatctggaaggcatgtgggaggaactcagccccaagatctggaccttcatggagaacagccaagaa

SEQ ID NO: 1760 - DNA, 201 bp, Homo sapiens
gagaggacaaataaaatcaaggatgggtactgggaccctggtcctcgagctgacccctttgaggacatgcggtacgtctgggggggcttcgcctacttgcrggatgtggtggagcaggcaatcatcagggtgctgacgggcaccgagaagaaaactggtgtctatatgcaacagatgccctatccctgttacgttgatgac

SEQ ID NO: 1761 - DNA, 201 bp, Homo sapiens
cgaatggacattgacaatgtggagaggacaaataaaatcaaggatgggtactgggaccctggtcctcgagctgacccctttgaggacatgcggtacgtctsggggggcttcgcctacttgcaggatgtggtggagcaggcaatcatcagggtgctgacgggcaccgagaagaaaactggtgtctatatgcaacagatgccc

SEQ ID NO: 1762 - DNA, 201 bp, Homo sapiens
aagaacaagatctgggtgaatgagtttaggtatggcggcttttccctgggtgtcagtaatactcaagcacttcctccgagtcaagaagttaatgatgccaycaaacaaatgaagaaacacctaaagctggccaaggacagttctgcagatcgatttctcaacagcttgggaagatttatgacaggactggacaccagaaat

SEQ ID NO: 1763 - DNA, 201 bp, Homo sapiens
ttctgcgggtgatgagccggtcaatgcccctcttcatgacgctggcctggatttactcagtggctgtgatcatcaagggcatcgtgtatgagaaggaggcrcggctgaaagagaccatgcggatcatgggcctggacaacagcatcctctggtttagctggttcattagtagcctcattcctcttcttgtgagcgctggcc

SEQ ID NO: 1764 - DNA, 201 bp, Homo sapiens
cctacttgcaggatgtggtggagcaggcaatcatcagggtgctgacgggcaccgagaagaaaactggtgtctatatgcaacagatgccctatccctgttasgttgatgacatctttctgcgggtgatgagccggtcaatgcccctcttcatgacgctggcctggatttactcagtggctgtgatcatcaagggcatcgtgt

SEQ ID NO: 1765 - DNA, 201 bp, Homo sapiens
ctggtaaaagtctaccgagatgggatgaaggtggctgtcgatggcctggcactgaatttttatgagggccagatcacctccttcctgggccacaatggagyggggaagacgaccaccatgtcaatcctgaccgggttgttccccccgacctcgggcaccgcctacatcctgggaaaagacattcgctctgagatgagcacc

SEQ ID NO: 1766 - DNA, 201 bp, Homo sapiens; identical to SEQ ID NO: 1706

SEQ ID NO: 1767 - DNA, 201 bp, Homo sapiens
  misc_feature (1)...(201): n = A,T,C or G, or insertion/deletion polymorphism (see Tables 1-2)
ggctaccagttacatttgacaagtctgtgcaatggatcaaaatcagaagagatgattcaacttggtgaccaagaagtttctgagctttgtggcctaccaanggagaaactggctgcagcagagcgagtacttcgttccaacatggacatcctgaagccaatcctgatggatgtgacatgtgatgacattgcacatgggcag

SEQ ID NO: 1768 - DNA, 201 bp, Homo sapiens; identical to SEQ ID NO: 1710

SEQ ID NO: 1769 - DNA, 201 bp, Homo sapiens; identical to SEQ ID NO: 1715

SEQ ID NO: 1770 - DNA, 201 bp, Homo sapiens; identical to SEQ ID NO: 1716

SEQ ID NO: 1771 - DNA, 201 bp, Homo sapiens; identical to SEQ ID NO: 1717

SEQ ID NO: 1772 - DNA, 201 bp, Homo sapiens; identical to SEQ ID NO: 1718
  misc_feature (1)...(201): n = A,T,C or G, or insertion/deletion polymorphism (see Tables 1-2)

SEQ ID NO: 1773 - DNA, 201 bp, Homo sapiens; identical to SEQ ID NO: 1719

SEQ ID NO: 1774 - DNA, 201 bp, Homo sapiens; identical to SEQ ID NO: 1706

SEQ ID NO: 1775 - DNA, 201 bp, Homo sapiens; identical to SEQ ID NO: 1721

SEQ ID NO: 1776 - DNA, 201 bp, Homo sapiens; identical to SEQ ID NO: 1722
  misc_feature (1)...(201): n = A,T,C or G, or insertion/deletion polymorphism (see Tables 1-2)

SEQ ID NO: 1777 - DNA, 201 bp, Homo sapiens; identical to SEQ ID NO: 1723

SEQ ID NO: 1778 - DNA, 201 bp, Homo sapiens; identical to SEQ ID NO: 1724

SEQ ID NO: 1779 - DNA, 201 bp, Homo sapiens; identical to SEQ ID NO: 1725

SEQ ID NO: 1780 - DNA, 201 bp, Homo sapiens; identical to SEQ ID NO: 1726

SEQ ID NO: 1781 - DNA, 201 bp, Homo sapiens; identical to SEQ ID NO: 1727

SEQ ID NO: 1782 - DNA, 201 bp, Homo sapiens; identical to SEQ ID NO: 1728

SEQ ID NO: 1783 - DNA, 201 bp, Homo sapiens; identical to SEQ ID NO: 1729

SEQ ID NO: 1784 - DNA, 201 bp, Homo sapiens; identical to SEQ ID NO: 1730

SEQ ID NO: 1785 - DNA, 201 bp, Homo sapiens; identical to SEQ ID NO: 1731

SEQ ID NO: 1786 - DNA, 201 bp, Homo sapiens; identical to SEQ ID NO: 1732

SEQ ID NO: 1787 - DNA, 201 bp, Homo sapiens; identical to SEQ ID NO: 1733

SEQ ID NO: 1788 - DNA, 201 bp, Homo sapiens; identical to SEQ ID NO: 1734

SEQ ID NO: 1789 - DNA, 201 bp, Homo sapiens; identical to SEQ ID NO: 1735

SEQ ID NO: 1790 - DNA, 201 bp, Homo sapiens; identical to SEQ ID NO: 1736

SEQ ID NO: 1791 - DNA, 201 bp, Homo sapiens; identical to SEQ ID NO: 1737

SEQ ID NO: 1792 - DNA, 201 bp, Homo sapiens; identical to SEQ ID NO: 1738

SEQ ID NO: 1793 - DNA, 201 bp, Homo sapiens; identical to SEQ ID NO: 1710

SEQ ID NO: 1794 - DNA, 201 bp, Homo sapiens; identical to SEQ ID NO: 1739

SEQ ID NO: 1795 - DNA, 201 bp, Homo sapiens; identical to SEQ ID NO: 1740

SEQ ID NO: 1796 - DNA, 201 bp, Homo sapiens; identical to SEQ ID NO: 1741

SEQ ID NO: 1797 - DNA, 201 bp, Homo sapiens; identical to SEQ ID NO: 1742

SEQ ID NO: 1798 - DNA, 201 bp, Homo sapiens; identical to SEQ ID NO: 1743

SEQ ID NO: 1799 - DNA, 201 bp, Homo sapiens; identical to SEQ ID NO: 1744

SEQ ID NO: 1800 - DNA, 201 bp, Homo sapiens; identical to SEQ ID NO: 1745

SEQ ID NO: 1801 - DNA, 201 bp, Homo sapiens; identical to SEQ ID NO: 1746

SEQ ID NO: 1802 - DNA, 201 bp, Homo sapiens; identical to SEQ ID NO: 1747

SEQ ID NO: 1803 - DNA, 201 bp, Homo sapiens; identical to SEQ ID NO: 1748
  misc_feature (1)...(201): n = A,T,C or G, or insertion/deletion polymorphism (see Tables 1-2)

SEQ ID NO: 1804 - DNA, 201 bp, Homo sapiens; identical to SEQ ID NO: 1749

SEQ ID NO: 1805 - DNA, 201 bp, Homo sapiens; identical to SEQ ID NO: 1750

SEQ ID NO: 1806 - DNA, 201 bp, Homo sapiens; identical to SEQ ID NO: 1751

SEQ ID NO: 1807 - DNA, 201 bp, Homo sapiens; identical to SEQ ID NO: 1752

SEQ ID NO: 1808 - DNA, 201 bp, Homo sapiens; identical to SEQ ID NO: 1753

SEQ ID NO: 1809 - DNA, 201 bp, Homo sapiens; identical to SEQ ID NO: 1754

SEQ ID NO: 1810 - DNA, 201 bp, Homo sapiens; identical to SEQ ID NO: 1755

SEQ ID NO: 1811 - DNA, 201 bp, Homo sapiens; identical to SEQ ID NO: 1756

SEQ ID NO: 1812 - DNA, 201 bp, Homo sapiens; identical to SEQ ID NO: 1757

SEQ ID NO: 1813 - DNA, 201 bp, Homo sapiens; identical to SEQ ID NO: 1758

SEQ ID NO: 1814 - DNA, 201 bp, Homo sapiens; identical to SEQ ID NO: 1759

SEQ ID NO: 1815 - DNA, 201 bp, Homo sapiens; identical to SEQ ID NO: 1760

SEQ ID NO: 1816 - DNA, 201 bp, Homo sapiens; identical to SEQ ID NO: 1761

SEQ ID NO: 1817 - DNA, 201 bp, Homo sapiens; identical to SEQ ID NO: 1762

SEQ ID NO: 1818 - DNA, 201 bp, Homo sapiens; identical to SEQ ID NO: 1763

SEQ ID NO: 1819 - DNA, 201 bp, Homo sapiens; identical to SEQ ID NO: 1764

SEQ ID NO: 1820 - DNA, 201 bp, Homo sapiens; identical to SEQ ID NO: 1765

SEQ ID NO: 1821 - DNA, 201 bp, Homo sapiens; identical to SEQ ID NO: 1715

SEQ ID NO: 1822 - DNA, 201 bp, Homo sapiens; identical to SEQ ID NO: 1716

SEQ ID NO: 1823 - DNA, 201 bp, Homo sapiens; identical to SEQ ID NO: 1717

SEQ ID NO: 1824 - DNA, 201 bp, Homo sapiens; identical to SEQ ID NO: 1718
  misc_feature (1)...(201): n = A,T,C or G, or insertion/deletion polymorphism (see Tables 1-2)

SEQ ID NO: 1825 - DNA, 201 bp, Homo sapiens; identical to SEQ ID NO: 1719

SEQ ID NO: 1826 - DNA, 201 bp, Homo sapiens; identical to SEQ ID NO: 1706

SEQ ID NO: 1827 - DNA, 201 bp, Homo sapiens; identical to SEQ ID NO: 1721

SEQ ID NO: 1828 - DNA, 201 bp, Homo sapiens; identical to SEQ ID NO: 1722
  misc_feature (1)...(201): n = A,T,C or G, or insertion/deletion polymorphism (see Tables 1-2)

SEQ ID NO: 1829 - DNA, 201 bp, Homo sapiens; identical to SEQ ID NO: 1723

SEQ ID NO: 1830 - DNA, 201 bp, Homo sapiens; identical to SEQ ID NO: 1724

SEQ ID NO: 1831 - DNA, 201 bp, Homo sapiens; identical to SEQ ID NO: 1725

SEQ ID NO: 1832 - DNA, 201 bp, Homo sapiens; identical to SEQ ID NO: 1726

SEQ ID NO: 1833 - DNA, 201 bp, Homo sapiens; identical to SEQ ID NO: 1727

SEQ ID NO: 1834 - DNA, 201 bp, Homo sapiens; identical to SEQ ID NO: 1728

SEQ ID NO: 1835 - DNA, 201 bp, Homo sapiens; identical to SEQ ID NO: 1729

SEQ ID NO: 1836 - DNA, 201 bp, Homo sapiens; identical to SEQ ID NO: 1730

SEQ ID NO: 1837 - DNA, 201 bp, Homo sapiens; identical to SEQ ID NO: 1731

SEQ ID NO: 1838 - DNA, 201 bp, Homo sapiens; identical to SEQ ID NO: 1732

SEQ ID NO: 1839 - DNA, 201 bp, Homo sapiens; identical to SEQ ID NO: 1733

SEQ ID NO: 1840 - DNA, 201 bp, Homo sapiens; identical to SEQ ID NO: 1734

SEQ ID NO: 1841 - DNA, 201 bp, Homo sapiens; identical to SEQ ID NO: 1735

SEQ ID NO: 1842 - DNA, 201 bp, Homo sapiens; identical to SEQ ID NO: 1736

SEQ ID NO: 1843 - DNA, 201 bp, Homo sapiens; identical to SEQ ID NO: 1737

SEQ ID NO: 1844 - DNA, 201 bp, Homo sapiens; identical to SEQ ID NO: 1738

SEQ ID NO: 1845 - DNA, 201 bp, Homo sapiens; identical to SEQ ID NO: 1739

SEQ ID NO: 1846 - DNA, 201 bp, Homo sapiens; identical to SEQ ID NO: 1740

SEQ ID NO: 1847 - DNA, 201 bp, Homo sapiens; identical to SEQ ID NO: 1741

SEQ ID NO: 1848 - DNA, 201 bp, Homo sapiens; identical to SEQ ID NO: 1742

SEQ ID NO: 1849 - DNA, 201 bp, Homo sapiens; identical to SEQ ID NO: 1743

SEQ ID NO: 1850 - DNA, 201 bp, Homo sapiens; identical to SEQ ID NO: 1744

SEQ ID NO: 1851 - DNA, 201 bp, Homo sapiens; identical to SEQ ID NO: 1745

SEQ ID NO: 1852 - DNA, 201 bp, Homo sapiens; identical to SEQ ID NO: 1746

SEQ ID NO: 1853 - DNA, 201 bp, Homo sapiens; identical to SEQ ID NO: 1747

SEQ ID NO: 1854 - DNA, 201 bp, Homo sapiens; identical to SEQ ID NO: 1748
  misc_feature (1)...(201): n = A,T,C or G, or insertion/deletion polymorphism (see Tables 1-2)

SEQ ID NO: 1855 - DNA, 201 bp, Homo sapiens; identical to SEQ ID NO: 1749

SEQ ID NO: 1856 - DNA, 201 bp, Homo sapiens; identical to SEQ ID NO: 1750

SEQ ID NO: 1857 - DNA, 201 bp, Homo sapiens; identical to SEQ ID NO: 1751

SEQ ID NO: 1858 - DNA, 201 bp, Homo sapiens; identical to SEQ ID NO: 1752

SEQ ID NO: 1859 - DNA, 201 bp, Homo sapiens; identical to SEQ ID NO: 1753

SEQ ID NO: 1860 - DNA, 201 bp, Homo sapiens; identical to SEQ ID NO: 1754

SEQ ID NO: 1861 - DNA, 201 bp, Homo sapiens; identical to SEQ ID NO: 1755

SEQ ID NO: 1862 - DNA, 201 bp, Homo sapiens; identical to SEQ ID NO: 1756

SEQ ID NO: 1863 - DNA, 201 bp, Homo sapiens; identical to SEQ ID NO: 1757

SEQ ID NO: 1864 - DNA, 201 bp, Homo sapiens; identical to SEQ ID NO: 1758

SEQ ID NO: 1865 - DNA, 201 bp, Homo sapiens; identical to SEQ ID NO: 1759

SEQ ID NO: 1866 - DNA, 201 bp, Homo sapiens; identical to SEQ ID NO: 1760

SEQ ID NO: 1867 - DNA, 201 bp, Homo sapiens; identical to SEQ ID NO: 1761

SEQ ID NO: 1868 - DNA, 201 bp, Homo sapiens; identical to SEQ ID NO: 1762

SEQ ID NO: 1869 - DNA, 201 bp, Homo sapiens; identical to SEQ ID NO: 1763

SEQ ID NO: 1870 - DNA, 201 bp, Homo sapiens; identical to SEQ ID NO: 1764

SEQ ID NO: 1871 - DNA, 201 bp, Homo sapiens; identical to SEQ ID NO: 1765

SEQ ID NO: 1872 - DNA, 201 bp, Homo sapiens
ggctagccctgagtcaccaccacctgcgtccccggacggtgtcactgagatccgaggcctgctggcccaaggtctgcggcctgagagccccccaccagccrgccccctgctcaacggggcccccgctggggagagtccccagcctaaggccgcccccgaggcctcctcgccgcctgcctcacccctccagcatctcctgcc

SEQ ID NO: 1873 - DNA, 201 bp, Homo sapiens
gagctgggccctgagctgaaggcagagctcggcccgcggctgaaggggaaaccgcaggagcggcagcggcagtggatccagatctcggacgccgtgtaccrcatggtgtacgagcaggccaaggcgcgcttcgaggaggtgctgtccaaggtgcagcaggtgcagccggccatgcaggccgtcatccgaactgacatggac

SEQ ID NO: 1874 - DNA, 201 bp, Homo sapiens
ccgaggtggggtcccctcccagccctgcatcctccgtgccctagacctgctccccagaggaggggccttgacccacaggacgtgtggtggcccctggtctytggcgcatctcttccctcttgtcccgaagatctgcgcctctagtgccttttgaggggttcccatcatccctccctgatattgtattgaaaatattatgca

SEQ ID NO: 1875 - DNA, 201 bp, Homo sapiens
tgttcctgggacaagggtcaagccaggatgggcccaggcctgggatcccccaccccaggacccccaggccccctcccctgctgctttgcggggggcagggmagaaatggactccttttgggtccccgaggtggggtcccctcccagccctgcatcctccgtgccctagacctgctccccagaggaggggccttgacccaca

SEQ ID NO: 1876 - DNA, 201 bp, Homo sapiens
tccgtgccctagacctgctccccagaggaggggccttgacccacaggacgtgtggtggcccctggtctctggcgcatctcttccctcttgtcccgaagatytgcgcctctagtgccttttgaggggttcccatcatccctccctgatattgtattgaaaatattatgcacactgttcatgcttctactaatcaataaacgc

SEQ ID NO: 1877 - DNA, 201 bp, Homo sapiens
caggccccctcccctgctgctttgcggggggcagggcagaaatggactccttttgggtccccgaggtggggtcccctcccagccctgcatcctccgtgccstagacctgctccccagaggaggggccttgacccacaggacgtgtggtggcccctggtctctggcgcatctcttccctcttgtcccgaagatctgcgcctc

SEQ ID NO: 1878 - DNA, 201 bp, Homo sapiens
tgggtggagagatgagatttagggggtgtctgcggaggggaagtgtcctgagtgaaggaggggacccccatcctgggggatgctgggagtgagtgagtgakatggctgagtgagggttatggggagcctgaggttttatgggcctgtgtatccccttctcccggccccagcctgcctccctcctgcccgcctggcccacag

SEQ ID NO: 1879 - DNA, 201 bp, Homo sapiens
actgagatccgaggcctgctggcccaaggtctgcggcctgagagccccccaccagccggccccctgctcaacggggcccccgctggggagagtccccagcytaaggccgcccccgaggcctcctcgccgcctgcctcacccctccagcatctcctgcctggaaaggctgtggaccttgggccccccaagcccagcgaccag

SEQ ID NO: 1880 - DNA, 201 bp, Homo sapiens
agcagcgatttgatgtgtccagcacgtccgtgttcaagcagcgagcccagatccacatgcgggagcaaatggacaatgccgtgtatacgttcgagaccctyctgcaccaggagctggggaaggggcccaccaaggaggagctgtgcaagtccatccagcgggtcctggagcgggtgctgaagaaatacgactacgacagca

SEQ ID NO: 1881 - DNA, 201 bp, Homo sapiens
tgctcaagaagctggcccctacctgcaagtcggagctgccccggttccaggagctgatcttcgaggactttgccaggttcatcctggtggaaaacacgtaygaggaggtggtgctgcagaccgtcatgaaggacatcctgcaggctgtgaaggaggccgcggtgcagaggaagcacaacctctaccgggacagcatggtca

SEQ ID NO: 1882 - DNA, 201 bp, Homo sapiens; identical to SEQ ID NO: 1872

SEQ ID NO: 1883 - DNA, 201 bp, Homo sapiens; identical to SEQ ID NO: 1873

SEQ ID NO: 1884 - DNA, 201 bp, Homo sapiens; identical to SEQ ID NO: 1874

SEQ ID NO: 1885 - DNA, 201 bp, Homo sapiens; identical to SEQ ID NO: 1875

SEQ ID NO: 1886 - DNA, 201 bp, Homo sapiens; identical to SEQ ID NO: 1876

SEQ ID NO: 1887 - DNA, 201 bp, Homo sapiens; identical to SEQ ID NO: 1877

SEQ ID NO: 1888 - DNA, 201 bp, Homo sapiens; identical to SEQ ID NO: 1878

SEQ ID NO: 1889 - DNA, 201 bp, Homo sapiens; identical to SEQ ID NO: 1879

SEQ ID NO: 1890 - DNA, 201 bp, Homo sapiens; identical to SEQ ID NO: 1880

SEQ ID NO: 1891 - DNA, 201 bp, Homo sapiens; identical to SEQ ID NO: 1881

SEQ ID NO: 1892 - DNA, 201 bp, Homo sapiens
atccttgccctgaagcttcaggatgaaggacaggaagctgaaggagaaaagcacactgaaaaagctctaatcagtatgtcttcacagacctatgtttttckatatgcagcccagttttatcaaagaagaggcaatatagataaagctcttctgctcttaaaaatggccttgcagggaacacccacttctgccttcctgcat

SEQ ID NO: 1893 - DNA, 201 bp, Homo sapiens
tagcagcctcttcatgaattacagctgagggggggcggaggaggggggggtaccacacaacaccccagcaaacctccgggcccccaggcatggctagctcktgtgccgtgcaggtgaagctggagctggggcaccgcgcccaggtgaggaaaaaacccaccgtggagggcttcacccacgactggatggtgttcgtacgcg

SEQ ID NO: 1894 - DNA, 201 bp, Homo sapiens
ctttcaacaaccccacagaggactttaggagaaagttgctgaaggcaggaggggaccctaataggagtattcataccagcagcagcagcagcagcagcagyagcagcagcagcagcagcagcagcagcagcagtagcagcagcagcagcagcagcagcagcagcagtagcagcagcagtagcagcagcagcagcagcagta

SEQ ID NO: 1895 - DNA, 201 bp, Homo sapiens
ataggagtattcataccagcagcagcagcagcagcagcagtagcagcagcagcagcagcagcagcagcagcagtagcagcagcagcagcagcagcagcagyagcagtagcagcagcagtagcagcagcagcagcagcagtagtaccagtttttcaaagcctcacaaattaatgaaggagcacaaggaaaaaccttctaaag

SEQ ID NO: 1896 - DNA, 201 bp, Homo sapiens
gcagcagcagcagcagcagtagcagcagcagcagcagcagcagcagcagcagtagcagcagcagcagcagcagcagcagcagcagtagcagcagcagtagyagcagcagcagcagcagtagtaccagtttttcaaagcctcacaaattaatgaaggagcacaaggaaaaaccttctaaagactccagagaacataaaagtg

SEQ ID NO: 1897 - DNA, 201 bp, Homo sapiens
cccaagcccagtgaccttactcgtataccgtgccactttccaccaactttttccaagtcctttaactcgttgcagtctgtattttccaccttttgtttttycagttccaggacacagattatcaactggggggaccaaatagccaccttgattttcttctttgtggtctttttcctgaaagttggggcccagtccttggct

SEQ ID NO: 1898 - DNA, 201 bp, Homo sapiens
catctggaacatcctgaggatataacaactggatgcatcaagaactattgtgttttttttttttggttttttttttttttggttgtgattttttgttcttkttgtttatatgaaaacactcaaaatgatgcaaccaaaagggaaaaaataaaaatcaaacaaccttcagctttatttttctttaaagccagtcatcatctc

SEQ ID NO: 1899 - DNA, 201 bp, Homo sapiens; identical to SEQ ID NO: 1893

SEQ ID NO: 1900 - DNA, 201 bp, Homo sapiens
aaacatctggaacatcctgaggatataacaactggatgcatcaagaactattgtgttttttttttttggttttttttttttttggttgtgattttttgttyttgttgtttatatgaaaacactcaaaatgatgcaaccaaaagggaaaaaataaaaatcaaacaaccttcagctttatttttctttaaagccagtcatcat

SEQ ID NO: 1901 - DNA, 201 bp, Homo sapiens; identical to SEQ ID NO: 1894

SEQ ID NO: 1902 - DNA, 201 bp, Homo sapiens; identical to SEQ ID NO: 1895

SEQ ID NO: 1903 - DNA, 201 bp, Homo sapiens; identical to SEQ ID NO: 1896

SEQ ID NO: 1904 - DNA, 201 bp, Homo sapiens; identical to SEQ ID NO: 1897

SEQ ID NO: 1905 - DNA, 201 bp, Homo sapiens; identical to SEQ ID NO: 1894

SEQ ID NO: 1906 - DNA, 201 bp, Homo sapiens; identical to SEQ ID NO: 1895

SEQ ID NO: 1907 - DNA, 201 bp, Homo sapiens; identical to SEQ ID NO: 1896

SEQ ID NO: 1908 - DNA, 201 bp, Homo sapiens; identical to SEQ ID NO: 1897

SEQ ID NO: 1909 - DNA, 201 bp, Homo sapiens
aatgtccaagctgcagagtgagctggagtacaagaagggattcgaggacaccaaatcccaatgccacgtctccctggacatggtccacctcgtgcatgccygcaaagctcagcatttagccacagacgtaggctacaagacagcggaacatcactttacggctttgcccacagacatgaaggtggaatgggccaagaaggc

SEQ ID NO: 1910 - DNA, 201 bp, Homo sapiens
tgaggttgaatataagaaaggctttgaagagagtaagacccggtttcacctgcccatggatatggtaaacatcaggcatgctaagaaggcccaaactctckccagtgacctggactacaggaagaaactgcatgaatacactgtgctgcctgaagatatgaagactcagtgggccaagaaggtctatgggcttcagagcga

SEQ ID NO: 1911 - DNA, 201 bp, Homo sapiens
gtcagcaaaggaaagtggaagttggattctgaaagatcgaggtgcccataggaattttatggtcgtcggattttgaagacttgaactagactgggggttckccttgcatttcttgcctgttgcctatctttgtcctctctcttccggcttcgagatgaatgtgcagccctgttctaggtgtgggtatggggtttatcctgc

SEQ ID NO: 1912 - DNA, 201 bp, Homo sapiens
aagagggtgatgttcagcggacactcatccaagtggactttggcgatggtatcgcggtgtcttacgtcaatctcagctccatggaagatgggatcaaacaygtctatcagaacgtgggcattttccgtgtgaccgtgcaggtggacaacagtctgggttctgacagcgccgtcctgtacttacatgtaacttgtcccttgg

SEQ ID NO: 1913 - DNA, 201 bp, Homo sapiens
tggagcacgtgcacctgtctcttccctttgtcaccacaaagaacaaagaggtcaatgcgacggcagtgctgtggcccagccaagtgggcaccctcacttaygtgtggtggtacggaaacaacacggagcctttgatcaccttggagggaagcatatccttcagatttacttcagaaggaatgaataccatcacagtgcagg

SEQ ID NO: 1914 - DNA, 201 bp, Homo sapiens
acaacccggacatccctgagtggaggagggacatcggtcgagtcatcaaaaaatccctggtggaagccacaggggttccaggccagcacatcctggtggcrgtgctccctggcttacccaccactgctgaactctttgtcctaccctatcaggatccagctggagaaaacaaaaggtcaactgatgacctggagcagatat

SEQ ID NO: 1915 - DNA, 201 bp, Homo sapiens
cccggctgagcgcgctcctcgccggcgcggggctcttgatcctctgcgccccgggcgtctgcggcggcggctcctgctgcccctcgccgcaccccagctcsgctccacgctcggcctcgacccctaggggcttttcccaccaggggcggccaggcagggctcctgccacgcccctgcccctcgtagtgcgtcccctgttct

SEQ ID NO: 1916 - DNA, 201 bp, Homo sapiens
cggctgatggaaagctgacagcggaacaaggacacaacgtcactctcatggtgcaattagaagagggtgatgttcagcggacactcatccaagtggacttyggcgatggtatcgcggtgtcttacgtcaatctcagctccatggaagatgggatcaaacacgtctatcagaacgtgggcattttccgtgtgaccgtgcagg

SEQ ID NO: 1917 - DNA, 201 bp, Homo sapiens
gagagcagtggggtgcttggcagctgttctgtgttttccaggaatccaactgagcattgaaatctctcatttgccgacttatttttataggaagccaattwaaaaaaaaaaaagttttcttatagtattggaactacttctaattttaaaatgacttttttgatgtattttttgttaaatactatgtagtgtaatgtataa

SEQ ID NO: 1918 - DNA, 201 bp, Homo sapiens
ctgggtacaggaaggtggtttccaataattgcactgatggcgtaagggaacagtacactgccaaaccgcagaagtgcccagggaaagccccgcgggggctrcggatagtcacggctgatggaaagctgacagcggaacaaggacacaacgtcactctcatggtgcaattagaagagggtgatgttcagcggacactcatcc

SEQ ID NO: 1919 - DNA, 201 bp, Homo sapiens
gattgcagcttgggacagagttacctcaatagtactgggtacaggaaggtggtttccaataattgcactgatggcgtaagggaacagtacactgccaaacmgcagaagtgcccagggaaagccccgcgggggctgcggatagtcacggctgatggaaagctgacagcggaacaaggacacaacgtcactctcatggtgcaa

SEQ ID NO: 1920 - DNA, 201 bp, Homo sapiens
gcttatccaagaaggggttgtaccaaacaggttctactggtctgtgatggggtcaaataaagaaccagaccttgtgcatcttgaggccagaactgtggatsgtcattcacattatctaacttgccgaatgcagaactgtacagaggccaacaggaatcagccttttccaggctacattgacccagactctttgattgttca

SEQ ID NO: 1921 - DNA, 201 bp, Homo sapiens; identical to SEQ ID NO: 1915

SEQ ID NO: 1922 - DNA, 201 bp, Homo sapiens
cgggtaccccgcaaggagatgtttacagcttcgccattctgatgagggagctgatctaccattgggaccacgggccttttgatgacctccacgaggcaccrgatgaaatcatcaaccaaatcaaagaccctgcagcagcagtcccactgcaaccttccctgcccgaggagaagggcaatgaaaagatcgtggccatggtga

SEQ ID NO: 1923 - DNA, 201 bp, Homo sapiens
agctgctgcagttcccggagatgccctggtcgggtaccccgcaaggagatgtttacagcttcgccattctgatgagggagctgatctaccattgggaccaygggccttttgatgacctccacgaggcaccggatgaaatcatcaaccaaatcaaagaccctgcagcagcagtcccactgcaaccttccctgcccgaggaga

SEQ ID NO: 1924 - DNA, 201 bp, Homo sapiens
cctacagaaaaggccgtggagacgaaggcttttggaaacaagtctaccaaacaccgaggaggtcgcccttccgcagcaccatctcctgggaggagcaggtragcccttactctgcctaccttcacgacgccgtcctgctctatgctgagaccgtgaagcaggtggtaaaggctggaggcgacttccaggatgggtggcagc

SEQ ID NO: 1925 - DNA, 201 bp, Homo sapiens
gtccttcttcaagagcatctttggaggatatcatcaattgccagggttatcatcttaacgtgcagctcagaggatgcaaaaattattcttctggctgcagyaaacctgggactcaacactggagaatttgttttcatcattttgcagcagttggaggaccgtttttggaaggaagtactgacaaatcagaaaatgatgcac

SEQ ID NO: 1926 - DNA, 201 bp, Homo sapiens
actctgtctatgccctgcagaagtctgaaaatgggccccttttactttcttttcttcattatgacagttatcaaaggaatttctccaatatgacctggccscatggctcccttcctgaagacagacctggctgtggattttataatgagctctgtgaaactcagtctgcttttacgggcgtgactgctgtgcttctgacat

SEQ ID NO: 1927 - DNA, 201 bp, Homo sapiens
catctttggaggatatcatcaattgccagggttatcatcttaacgtgcagctcagaggatgcaaaaattattcttctggctgcagcaaacctgggactcarcactggagaatttgttttcatcattttgcagcagttggaggaccgtttttggaaggaagtactgacaaatcagaaaatgatgcacctccaaaaggtgtat

SEQ ID NO: 1928 - DNA, 201 bp, Homo sapiens
agaccattggagatgcatacatggtggctagtggactccctaccacaatggaagccagcatgtggctgagattgccaccatgtccctgcacttcctcagtkccaccatctgcttccaaattgggcacatgccccaggagaagctccagcttcgtattggcctctacacaggtcctgtggtggctggtgtgctggggattac

SEQ ID NO: 1929 - DNA, 201 bp, Homo sapiens
ggtctgattttaaggatgcagaggcaaaacaaagacatctggtggcaaatcaattttgatgatatcaccattcttccccagaacaagccatcccagagagscacacctgtgtcaaaaggcatcaacagtaactcatctagtgtgatgatttctgtggacctcagctcttttgtcaagagccagcagtgggaagagctcttc

SEQ ID NO: 1930 - DNA, 201 bp, Homo sapiens
tgaaactcagtctgcttttacgggcgtgactgctgtgcttctgacattgatgatcctcattcctgtcttgggagctgccatcataggtctgattttaaggmtgcagaggcaaaacaaagacatctggtggcaaatcaattttgatgatatcaccattcttccccagaacaagccatcccagagagccacacctgtgtcaaa

SEQ ID NO: 1931 - DNA, 201 bp, Homo sapiens
tttttggaaggaagtactgacaaatcagaaaatgatgcacctccaaaaggtgtatgggtcactgcttctcattgccctcagctcctacagaaaaggccgtsgagacgaaggcttttggaaacaagtctaccaaacaccgaggaggtcgcccttccgcagcaccatctcctgggaggagcaggtgagcccttactctgccta

SEQ ID NO: 1932 - DNA, 201 bp, Homo sapiens
ccgtttttggaaggaagtactgacaaatcagaaaatgatgcacctccaaaaggtgtatgggtcactgcttctcattgccctcagctcctacagaaaaggcygtggagacgaaggcttttggaaacaagtctaccaaacaccgaggaggtcgcccttccgcagcaccatctcctgggaggagcaggtgagcccttactctgc

SEQ ID NO: 1933 - DNA, 201 bp, Homo sapiens
ctgatgggtgaattaaggcacgagagcattgttcccttctttggtatttgcaccgaaccacctaacatctgcattgtcacccagtattgcaaaaaaggaawttttcaggatgttttgagaaactcggatcatgaaatggattggatattcaaactctcatttgcatacgacatagtcaatggcatgctgttcctccacagg

SEQ ID NO: 1934 - DNA, 201 bp, Homo sapiens
tgtggattttataatgagctctgtgaaactcagtctgcttttacgggcgtgactgctgtgcttctgacattgatgatcctcattcctgtcttgggagctgscatcataggtctgattttaaggatgcagaggcaaaacaaagacatctggtggcaaatcaattttgatgatatcaccattcttccccagaacaagccatcc

SEQ ID NO: 1935 - DNA, 201 bp, Homo sapiens
agatcgtggccatggtgagggtgtgttgggatgaatctctggagaaaagacccagtttctcttccatcaagaaaactttacgagaggccagtcccagaggycatgtgagcatactggccagtgtgatgagcaagctggaagtgtatgccaattacctggaggaagtggtgcaagagaggaccagccagctgactgcagaga

SEQ ID NO: 1936 - DNA, 201 bp, Homo sapiens
gccagcatgtggctgagattgccaccatgtccctgcacttcctcagtgccaccatctgcttccaaattgggcacatgccccaggagaagctccagcttcgkattggcctctacacaggtcctgtggtggctggtgtgctggggattaccatgtccagatactgtctatttggagacactgtcaacatggcatccagaatgg

SEQ ID NO: 1937 - DNA, 201 bp, Homo sapiens
caggctctgaaccgctgtgtcagctgcctacctggccagcgcgatgtggataatgccctgagggcagttggagatgccagcaagcgactcctgagtgactygcttcctcctagcactgggacatttcaagaagctcagagccggttgaatgaagctgctgctgggctgaatcaggcagccacagaactggtgcaggcctct

SEQ ID NO: 1938 - DNA, 201 bp, Homo sapiens
caaagccgtggagggctgtgtgtctgcctcccaggcagctacagaggatgggcaactgttgcgaggggtaggagcagcagccacagctgtcacccaggccytaaatgagctgctgcagcatgtgaaagcccatgccacaggggctgggcctgctggccgttatgaccaggctactgacaccatcctaaccgtcactgagaa

SEQ ID NO: 1939 - DNA, 201 bp, Homo sapiens
ggtgcagagctgcaaggcagtggcagagcagattccactgctggtgcagggcgtccgaggaagccaagcccagcctgacagccccagcgctcagcttgccytcattgctgccagccagagcttcctgcaggcaagtgggaagatggtggcagctgcaaaggcctcagtgccaacgattcaggaccaggcttcagccatgca

SEQ ID NO: 1940 - DNA, 201 bp, Homo sapiens
ttgctatacactgccaaggaggctggtggtaacccaaagcaagcagctcacacccaggaagccctggaggaggctgtgcagatgatgaccgaggccgtagrggacctgacaacaaccctcaacgaggcagccagtgctgctggggtcgtgggtggcatggtggactccatcacccaggccatcaaccagctagatgaagga

SEQ ID NO: 1941 - DNA, 201 bp, Homo sapiens
aacgctgctgtacctcgatctgaatctgccggggccccagcccactccaccctgccagcagcttccagccagtccccacagcctcatcagctctcttcacygttttttgatactatcttcccccacccccagctacccataggggctgcagagttataagccccaaacaggtcatgctccaataaaaatgattctacctac

SEQ ID NO: 1942 - DNA, 201 bp, Homo sapiens
ctgccctgcagttgctatacactgccaaggaggctggtggtaacccaaagcaagcagctcacacccaggaagccctggaggaggctgtgcagatgatgacygaggccgtagaggacctgacaacaaccctcaacgaggcagccagtgctgctggggtcgtgggtggcatggtggactccatcacccaggccatcaaccagc

SEQ ID NO: 1943 - DNA, 201 bp, Homo sapiens
ccatcaaccagctagatgaaggaccaatgggtgaaccagaaggttccttcgtggattaccaaacaactatggtgcggacagccaaggccattgcagtgacygttcaggagatggttaccaagtcaaacaccagcccagaggagctgggccctcttgctaaccagctgaccagtgactatggccgtctggcctcggaggcca

SEQ ID NO: 1944 - DNA, 201 bp, Homo sapiens
aggcaagtgggaagatggtggcagctgcaaaggcctcagtgccaacgattcaggaccaggcttcagccatgcagctgagtcagtgtgccaagaacctgggyaccgcgctggctgaactccggacggctgcccagaaggctcaggaagcatgtggacctttggagatggattctgcactgagtgtggtacagaatctagaga

SEQ ID NO: 1945 - DNA, 201 bp, Homo sapiens
aagagatctcccatctcattgagccgctggccaatgctgcccgggctgaagcctcccagctgggacacaaggtgtcccagatggcgcagtactttgagccrctcaccctggctgcagtgggtgctgcctccaagaccctgagccacccgcagcagatggcactcctggaccagactaaaacattggcagagtctgccctgc

SEQ ID NO: 1946 - DNA, 201 bp, Homo sapiens
agctcatcactatgtgcacccagcaggcacccggccagaaggagtgtgataacgccctgcgggaattggagacggtccgggaactcctggagaacccagtscagcccatcaatgacatgtcctactttggttgcctggacagtgtaatggagaactcaaaggtgctgggcgaggccatgactggcatctcccaaaatgcca

SEQ ID NO: 1947 - DNA, 201 bp, Homo sapiens
caagtgggaagatggtggcagctgcaaaggcctcagtgccaacgattcaggaccaggcttcagccatgcagctgagtcagtgtgccaagaacctgggcacygcgctggctgaactccggacggctgcccagaaggctcaggaagcatgtggacctttggagatggattctgcactgagtgtggtacagaatctagagaaag

SEQ ID NO: 1948 - DNA, 201 bp, Homo sapiens
catagagtgtgcccggagagtctctgagaaggtctcccacgtcctggctgcgctccaggctgggaatcgtggcacccaggcctgcatcacagcagccagcrctgtgtctggtatcattgctgacctcgacaccaccatcatgttcgccactgctggcacgctcaatcgtgagggtactgaaactttcgctgaccaccggga

SEQ ID NO: 1949 - DNA, 201 bp, Homo sapiens
ccaacctgcccaaccccagcactccccaaagtgcctgccaaaccccagggcctggccccgcccagtcccgcagtacatcccctgtcccctccccaaccccmagtgccttcatgccctagggccccccaagtgcctgcccctccccagagtattaacgctccaagagtattattaacgctgctgtacctcgatctgaatctg

SEQ ID NO: 1950 - DNA, 201 bp, Homo sapiens
ctgacctcgacaccaccatcatgttcgccactgctggcacgctcaatcgtgagggtactgaaactttcgctgaccaccgggagggcatcctgaagactgcraaggtgctggtggaggacaccaaggtcctggtgcaaaacgcagctgggagccaggagaagttggcgcaggctgcccagtcctccgtggcgaccatcaccc

SEQ ID NO: 1951 - DNA, 201 bp, Homo sapiens
tctcggggaacccctcaggacctggctcgagcctcaggccgatttggacaggacttcagcaccttcctggaagctggtgtggagatggcaggccaggctcygagccaggaggaccgagcccaagttgtgtccaacttgaagggcatctccatgtcttcaagcaaacttcttctggctgccaaggccctgtccacggaccct

SEQ ID NO: 1952 - DNA, 201 bp, Homo sapiens
ctccccagagtattaacgctccaagagtattattaacgctgctgtacctcgatctgaatctgccggggccccagcccactccaccctgccagcagcttccrgccagtccccacagcctcatcagctctcttcaccgttttttgatactatcttcccccacccccagctacccataggggctgcagagttataagccccaaa

SEQ ID NO: 1953 - DNA, 201 bp, Homo sapiens
gaccctaaagttatccaatggggaagttgtgcctgagaagtcatactcctgttatcctcacctccctggccagcacctaagcctcacaaagtgtcgttctkctgctgctgggacagcagctaccacagttccttgtggctaccaggacattctgttcttcatagctactcagggtatgtcaacaaatccagtccttgacca

SEQ ID NO: 1954 - DNA, 201 bp, Homo sapiens
cagcctcaaaggcactttgtggcttcaccgaggcagctgcacaggctgcatatctggttggtgtctctgaccccaatagccaagctggacagcaagggctrgtggagcccacacagtttgcccgtgcaaaccaggcaattcagatggcctgccagagtttgggagagcctggctgtacccaggcccaggtgctctctgcag

SEQ ID NO: 1955 - DNA, 149 bp, Homo sapiens
aactcgggcgtcgtcctggcgtcctctccggattgcgccgcaccctcgyttcctgccagggaggggctgccgggctttggcggctcccgagcatcgagaacggggccagagcagcttcctgcctgccccccgcgaccatagagcgcggg

SEQ ID NO: 1956 - DNA, 201 bp, Homo sapiens; identical to SEQ ID NO: 1937

SEQ ID NO: 1957 - DNA, 201 bp, Homo sapiens; identical to SEQ ID NO: 1938

SEQ ID NO: 1958 - DNA, 201 bp, Homo sapiens
ggtgcagagctgcaaggcagtggcagagcagattccactgctggtgcagggcgtccgaggaagccaagcccagcctgacagccccagcgctcagcttgccytcattgctgccagccagagcttcctgcagccaggtgggaagatggtggcagctgcaaaggcctcagtgccaacgattcaggaccaggcttcagccatgca

SEQ ID NO: 1959 - DNA, 201 bp, Homo sapiens; identical to SEQ ID NO: 1940

SEQ ID NO: 1960 - DNA, 201 bp, Homo sapiens; identical to SEQ ID NO: 1941

SEQ ID NO: 1961 - DNA, 201 bp, Homo sapiens; identical to SEQ ID NO: 1942

SEQ ID NO: 1962 - DNA, 201 bp, Homo sapiens; identical to SEQ ID NO: 1943

SEQ ID NO: 1963 - DNA, 201 bp, Homo sapiens
agccaggtgggaagatggtggcagctgcaaaggcctcagtgccaacgattcaggaccaggcttcagccatgcagctgagtcagtgtgccaagaacctgggyaccgcgctggctgaactccggacggctgcccagaaggctcaggaagcatgtggacctttggagatggattctgcactgagtgtggtacagaatctagaga

SEQ ID NO: 1964 - DNA, 201 bp, Homo sapiens; identical to SEQ ID NO: 1945

SEQ ID NO: 1965 - DNA, 201 bp, Homo sapiens; identical to SEQ ID NO: 1946

SEQ ID NO: 1966 - DNA, 201 bp, Homo sapiens
caggtgggaagatggtggcagctgcaaaggcctcagtgccaacgattcaggaccaggcttcagccatgcagctgagtcagtgtgccaagaacctgggcacygcgctggctgaactccggacggctgcccagaaggctcaggaagcatgtggacctttggagatggattctgcactgagtgtggtacagaatctagagaaag

SEQ ID NO: 1967 - DNA, 201 bp, Homo sapiens; identical to SEQ ID NO: 1948

SEQ ID NO: 1968 - DNA, 201 bp, Homo sapiens; identical to SEQ ID NO: 1949

SEQ ID NO: 1969 - DNA, 201 bp, Homo sapiens; identical to SEQ ID NO: 1950

SEQ ID NO: 1970 - DNA, 201 bp, Homo sapiens; identical to SEQ ID NO: 1951

SEQ ID NO: 1971 - DNA, 201 bp, Homo sapiens; identical to SEQ ID NO: 1952

SEQ ID NO: 1972 - DNA, 201 bp, Homo sapiens; identical to SEQ ID NO: 1953

SEQ ID NO: 1973 - DNA, 201 bp, Homo sapiens; identical to SEQ ID NO: 1954

SEQ ID NO: 1974 - DNA, 149 bp, Homo sapiens; identical to SEQ ID NO: 1955

SEQ ID NO: 1975 - DNA, 201 bp, Homo sapiens
cccacaactgcctccccagccagcagtaaagcaaaacttggtgtacttaataacacagctgagcctggaaaattcccactactgggtaatgctggattaastagcctgacggaaggggtcttggatctttttgcagtgaaggctgtatacatgggccaccctggcattgatatacacactgtgtgtgttcagaacaaactg

SEQ ID NO: 1976 - DNA, 201 bp, Homo sapiens
agatgaggaaattccctgaccaaagacagcagtggctgcggaaacagtacgtcagcctttatcaggaggatggacggtatgaaggcccaactttggctcaygctgtggagttgtttggtggcagacggtggagtgctcgaaaccccagccccggaacatcagcaaagaatgctgagaagcccaatatgcagagaaacaata

SEQ ID NO: 1977 - DNA, 201 bp, Homo sapiens
tctccactagaaagagatctggacagcatggatcctgcagtctattctttaactattgtctctggtcagaatgtgtgccccagtaatagcatgggaagccygtgcattgaagtcgacgtcctgggcatgcctctggacagctgccatttccgcacaaagcccatccatcgaaacaccctgaaccccatgtggaacgagcag

SEQ ID NO: 1978 - DNA, 201 bp, Homo sapiens
catcagacgccagtggatatcttaaagcaaaaggctcatcagttagcatctatgcaagtgcaggcttataatggtgggaatgccaacccccgacctgccartaatgaggaagaggaagatgaggaggacgaatatgattatgactatgaatccctttctgatgacaacattctggaagacagacctgaaaataaatcatgt

SEQ ID NO: 1979 - DNA, 201 bp, Homo sapiens
cccggaacatcagcaaagaatgctgagaagcccaatatgcagagaaacaataccctgggcataagcactaccaagaaaaagaagaaaatcctcatgagggktgagagtggagaggtaactgacgatgagatggcaacccgaaaggccaagatgcacaaagagtgtcgaagccggagtggttctgatcctcaagacattaat

SEQ ID NO: 1980 - DNA, 201 bp, Homo sapiens
aggagaacattaaagaactgcagctacccctctcatactattacatcgaatcttcgcacaatacctacctcacgggccatcagctcaaaggagaatcctcrgtagaactctacagccaggtccttttgcaaggctgtcgaagtgtagaattggactgctgggacggagacgatgggatgcccatcatttatcatggacata

SEQ ID NO: 1981 - DNA, 201 bp, Homo sapiens
tgatggaattggccaaaaattgtgataataagaatgagcagctgcagtgtgatcattgtgacaccttgaatgataaatacttttgctttgaaggctcttgygagaaggttgacatggtatattcaggtgatagcttttgtaggaaagactttactgacagtcaagctgccaagacctttttgagccattttgaggacttcc

SEQ ID NO: 1982 - DNA, 201 bp, Homo sapiens
tccctcagtgctatcattagaactcccaaatgttatcatatctcgtcgctgaatgaaaatgccgccaaacgtctgtgtcgcaggtattctcagaaactgayccagcacaccgcctgtcagctgctgagaacttaccctgctgccacccgcatcgactcttccaacccgaaccccctcatgttctggctccatgggatacag

SEQ ID NO: 1983 - DNA, 201 bp, Homo sapiens
ccttctcagctcttgacctcagaaagtatccaaaccaaggaggagaaacctgtgggtggcttgtcctccagtgacacaatggattaccgacagtgactaasggcagcatgtttaacccaggtgaagatctttaagcaagaagttaaagagtgaacatggtggaaaaaatataattattttcatcagacttaaactggaaat

SEQ ID NO: 1984 - DNA, 201 bp, Homo sapiens
tcagctgggatcagcaaggagctgatcgatctgcagcctctcatccagttcccagaggaagtcgccagcatcctgatggagcaagagcagactatttacckcagggtcttgccagtcgactacctttgcttcttaacacgggacttgggcactcctgaatgccagagctccttgccctgcctcaaagcatccatctcagcg

SEQ ID NO: 1985 - DNA, 201 bp, Homo sapiens
ttactgacagtcaagctgccaagacctttttgagccattttgaggacttccctgataattgtgatgatgtagaagaagacgcttttaaaagcaaaaaggarcgatccactttgttagtcaggagattctgtaaaaatgacagagaagttaagaaatctgtgtatactggaacaagagcaattgtgagaactctgccttctg

SEQ ID NO: 1986 - DNA, 201 bp, Homo sapiens
gataagcgttggtccatgcttaaagcaatgtgtccgagacactgtatgtgagtatcgcgccaccctccaaaggacttcaatatcgcagtacatcaccggtwctctcctagaagcaaccacgtctttgggagcaagaagtggccttctcagtacttttggaggatccactggacgaatgatgctgaaagaacgccagccagg

SEQ ID NO: 1987 - DNA, 201 bp, Homo sapiens
  misc_feature (1)...(201): n = A,T,C or G, or insertion/deletion polymorphism (see Tables 1-2)
gtcgacgtcctgggcatgcctctggacagctgccatttccgcacaaagcccatccatcgaaacaccctgaaccccatgtggaacgagcagtttctgttccncgttcacttcgaagatcttgtatttcttcgttttgcagttgtggaaaacaatagttcagcggtaactgctcagagaatcattccactgaaagctttaaaa

SEQ ID NO: 1988 - DNA, 201 bp, Homo sapiens
atctaccaccttaaaaccctgatctagaaaaaatatatattcatgataggaagttataactaagaaaatttatttgcctcttaatgctcctgaatgaaagraattatccctttgttctttgggaggacttgtgtatctgagattgttgtaataatcagtcattttattaaaaccttgacatgatcaccagggaggaaaaat

SEQ ID NO: 1989 - DNA, 201 bp, Homo sapiens
gtaggaaacaaccattccagagagccattggtccagaagaggagatcatgcaaattttaagcagctggtttccagaagagggatacatgggcaggattgtsttaaaaacccagcaggaaaacctagaagagaaaaacattgttcaagatgacaaagaggtgatcttgagctcagaggaggagagtttctttgtccaagtgc

SEQ ID NO: 1990 - DNA, 201 bp, Homo sapiens
ctaaaagcccatcagacgccagtggatatcttaaagcaaaaggctcatcagttagcatctatgcaagtgcaggcttataatggtgggaatgccaacccccsacctgccaataatgaggaagaggaagatgaggaggacgaatatgattatgactatgaatccctttctgatgacaacattctggaagacagacctgaaaat

SEQ ID NO: 1991 - DNA, 201 bp, Homo sapiens; identical to SEQ ID NO: 1975

SEQ ID NO: 1992 - DNA, 201 bp, Homo sapiens; identical to SEQ ID NO: 1976

SEQ ID NO: 1993 - DNA, 201 bp, Homo sapiens; identical to SEQ ID NO: 1977

SEQ ID NO: 1994 - DNA, 201 bp, Homo sapiens; identical to SEQ ID NO: 1978

SEQ ID NO: 1995 - DNA, 201 bp, Homo sapiens; identical to SEQ ID NO: 1979

SEQ ID NO: 1996 - DNA, 201 bp, Homo sapiens; identical to SEQ ID NO: 1989

SEQ ID NO: 1997 - DNA, 201 bp, Homo sapiens; identical to SEQ ID NO: 1980

SEQ ID NO: 1998 - DNA, 201 bp, Homo sapiens; identical to SEQ ID NO: 1982

SEQ ID NO: 1999 - DNA, 201 bp, Homo sapiens; identical to SEQ ID NO: 1984

SEQ ID NO: 2000 - DNA, 201 bp, Homo sapiens; identical to SEQ ID NO: 1983

SEQ ID NO: 2001 - DNA, 201 bp, Homo sapiens; identical to SEQ ID NO: 1990

SEQ ID NO: 2002 - DNA, 201 bp, Homo sapiens; identical to SEQ ID NO: 1986

SEQ ID NO: 2003 - DNA, 201 bp, Homo sapiens; identical to SEQ ID NO: 1987
  misc_feature (1)...(201): n = A,T,C or G, or insertion/deletion polymorphism (see Tables 1-2)

SEQ ID NO: 2004 - DNA, 201 bp, Homo sapiens
ccttctcagctcttgacctcagaaagtatccaaaccaaggaggagaaacctgtgggtggcttgtctccagtgacacaatggattaccgacagtgactaagsgcagcatgtttaacccaggtggagatctttaagcaagaagttaaagagtgaacatggtggaaaaaatataattattttcatcagacttaaactggaaatt

SEQ ID NO: 2005 - DNA, 201 bp, Homo sapiens; identical to SEQ ID NO: 1985

SEQ ID NO: 2006 - DNA, 201 bp, Homo sapiens; identical to SEQ ID NO: 1986

SEQ ID NO: 2007 - DNA, 201 bp, Homo sapiens; identical to SEQ ID NO: 1981

SEQ ID NO: 2008 - DNA, 201 bp, Homo sapiens; identical to SEQ ID NO: 1984

SEQ ID NO: 2009 - DNA, 201 bp, Homo sapiens; identical to SEQ ID NO: 1990

SEQ ID NO: 2010 - DNA, 201 bp, Homo sapiens; identical to SEQ ID NO: 1987
  misc_feature (1)...(201): n = A,T,C or G, or insertion/deletion polymorphism (see Tables 1-2)

SEQ ID NO: 2011 - DNA, 201 bp, Homo sapiens; identical to SEQ ID NO: 1988

SEQ ID NO: 2012 - DNA, 201 bp, Homo sapiens; identical to SEQ ID NO: 1975

SEQ ID NO: 2013 - DNA, 201 bp, Homo sapiens; identical to SEQ ID NO: 1976

SEQ ID NO: 2014 - DNA, 201 bp, Homo sapiens; identical to SEQ ID NO: 1979

SEQ ID NO: 2015 - DNA, 201 bp, Homo sapiens; identical to SEQ ID NO: 1980

SEQ ID NO: 2016 - DNA, 201 bp, Homo sapiens; identical to SEQ ID NO: 1978

SEQ ID NO: 2017 - DNA, 201 bp, Homo sapiens; identical to SEQ ID NO: 1989

SEQ ID NO: 2018 - DNA, 201 bp, Homo sapiens; identical to SEQ ID NO: 1982

SEQ ID NO: 2019 - DNA, 201 bp, Homo sapiens; identical to SEQ ID NO: 1977

SEQ ID NO: 2020 - DNA, 201 bp, Homo sapiens
caaattcaaggaaaagaagaggcaacatgtgcagtgttgatccttgagttgaacaaagagtggtcaggagaagaaaccaacaagaaatgtaacctacctcyagaactcaggaactcaggtacccttaaggatatcagaaacaatgaaatatggattggcagaagcatcttcaccaccatcttcagatgtaattaatgcagc

SEQ ID NO: 2021 - DNA, 201 bp, Homo sapiens
gcagtgttgatccttgagttgaacaaagagtggtcaggagaagaaaccaacaagaaatgtaacctacctccagaactcaggaactcaggtacccttaaggrtatcagaaacaatgaaatatggattggcagaagcatcttcaccaccatcttcagatgtaattaatgcagctgttgaatttggttgactatccacctataa

SEQ ID NO: 2022 - DNA, 201 bp, Homo sapiens
tcctgacagccgcccttccagccttctcctgccttccatagagagatgctatggactcttggtccagagactcaaattcaaggaaaagaagaggcaacatktgcagtgttgatccttgagttgaacaaagagtggtcaggagaagaaaccaacaagaaatgtaacctacctccagaactcaggaactcaggtacccttaag

SEQ ID NO: 2023 - DNA, 155 bp, Homo sapiens
ggcctaacttatgtgtcatgcaaaggatggctcttggaaaaatgcaaagaagcargggccgctaagggagagatgtgaaggtcaaggaagctctgagctcctgacagccgcccttccagccttctcctgccttccatagagagatgctatggact

SEQ ID NO: 2024 - DNA, 201 bp, Homo sapiens
agtatgagcgccgggaagattttgaggctcggctcttaactcagtttccaaacgccgagaaaatgaagacaacatctccaccaggcgacgatattaaaaaytctcctggccagtatattcagtgcttcacagtgaagcccaaactcgatctgcctcctaagtttcacaggccagtgtcagagcagattgtaagtttttaca

SEQ ID NO: 2025 - DNA, 201 bp, Homo sapiens
gccaacacctccacctccccctccacaccagaggcatctgccacctccactgcccagcaaaactccgcctcctccccctccaaagacaactcgcaagcagrcatcggtggactccgggatcgtgcagtgacatcgcaaggctctctggaaagagtgtgctgcccctccccatctccatgccctctccttctgtgtcccctg

SEQ ID NO: 2026 - DNA, 201 bp, Homo sapiens
aggcatctgccacctccactgcccagcaaaactccgcctcctccccctccaaagacaactcgcaagcagacatcggtggactccgggatcgtgcagtgacrtcgcaaggctctctggaaagagtgtgctgcccctccccatctccatgccctctccttctgtgtcccctgagtctgctgtttacctcattgggcctgtgat

SEQ ID NO: 2027 - DNA, 201 bp, Homo sapiens
ggtttgccctggagcctctcctgccaaagaaaatgcactccaggtcccaggacaagctggacaaggatgacctggagaaggagaagaaggacaagaagaargaaaaaaggaacagcaaacatcaagagatatttgagaaagaatttaaacccaccgacatttccctgcagcagtctgaggctgtgatcctttcggaaacga

SEQ ID NO: 2028 - DNA, 201 bp, Homo sapiens
gcgtgggtcgcatggagctgagggacaacaacaccaggaaactgacctcggggttgcggcgaccttttggagtggctgtgatggatgtaacagatataatmaatggaaaagtagatgatgaagataagcagcatttcattccctttcagccggtggcaggggagaatgacttccttcagactgttataaacaaagtcatcg

SEQ ID NO: 2029 - DNA, 201 bp, Homo sapiens
gccacctccactgcccagcaaaactccgcctcctccccctccaaagacaactcgcaagcagacatcggtggactccgggatcgtgcagtgacatcgcaagsctctctggaaagagtgtgctgcccctccccatctccatgccctctccttctgtgtcccctgagtctgctgtttacctcattgggcctgtgatgttaacat

SEQ ID NO: 2030 - DNA, 201 bp, Homo sapiens
tataataggcgtccaccaatgattatccatatgtgttcttaatttttaactgctggaagtgttaaaacacacacacacacacacacacacatttttttttycagaactccaaagtcctgaaaattttggtggacaatgatttttaaaaaactaactttgtataacctaatatttgtattctctcatctatatttttttatt

SEQ ID NO: 2031 - DNA, 201 bp, Homo sapiens
ttctgtttattataataggcgtccaccaatgattatccatatgtgttcttaatttttaactgctggaagtgttaaaacacacacacacacacacacacacattttttttttcagaactccaaagtcctgaaaattttggtggacaatgatttttaaaaaactaactttgtataacctaatatttgtattctctcatctata

SEQ ID NO: 2032 - DNA, 201 bp, Homo sapiens
cttctgtttattataataggcgtccaccaatgattatccatatgtgttcttaatttttaactgctggaagtgttaaaacacacacacacacacacacacacattttttttttcagaactccaaagtcctgaaaattttggtggacaatgatttttaaaaaactaactttgtataacctaatatttgtattctctcatctat

SEQ ID NO: 2033 - DNA, 201 bp, Homo sapiens
aaggagttcagttctcaccatggagtgagtggcctttagcgtcatggagcaaggtgggtctgggaggtagatatgggtccgggatgtgctatcgtagttaycagagttgggggcctctgagtgtgtctggctctgagagagtctgagtcttgcccaaacattctttctttttgtgccaaatgacttgcatttgcaaagagc

SEQ ID NO: 2034 - DNA, 201 bp, Homo sapiens
tgcccaaacattctttctttttgtgccaaatgacttgcatttgcaaagagctcaattgctctgagctcagccaagtaggagaggctaggccatcactcttrggaagctgtgtagtgatgatgtataagaatcctcctcactgtcatgggatgttgtatccagcccctccttgttccagccggtggtgtgacttcgttggtt

SEQ ID NO: 2035 - DNA, 201 bp, Homo sapiens
ataataggcgtccaccaatgattatccatatgtgttcttaatttttaactgctggaagtgttaaaacacacacacacacacacacacacattttttttttsagaactccaaagtcctgaaaattttggtggacaatgatttttaaaaaactaactttgtataacctaatatttgtattctctcatctatatttttttattc

SEQ ID NO: 2036 - DNA, 201 bp, Homo sapiens
agatatttgagaaagaatttaaacccaccgacatttccctgcagcagtctgaggctgtgatcctttcggaaacgataagtcccctgcggccccagagaccraagagccaggtgatgaacgtcattggaagcgaaaggcgcttctcggtgtccccctcgtcaccgtcctcccagcaaacaccccctccagttacaccaaggg

SEQ ID NO: 2037 - DNA, 201 bp, Homo sapiens
ataaagtcttcctgcgagcaattaatcagtatgcagatatgctgaacaaaaaatttctggatcaagccaactttgagctacagctgtggaacaactacttycacctggctgttgctttccttactcaagagtccctgcaactggagaatttttcaagtgccaagagagccaaaatccttaacaagtacggagatatgagga

SEQ ID NO: 2038 - DNA, 201 bp, Homo sapiens
agtctgaggctgtgatcctttcggaaacgataagtcccctgcggccccagagaccgaagagccaggtgatgaacgtcattggaagcgaaaggcgcttctcrgtgtccccctcgtcaccgtcctcccagcaaacaccccctccagttacaccaagggccaagctcagcttcagcatgcagtcgagcttggagctgaacggca

SEQ ID NO: 2039 - DNA, 201 bp, Homo sapiens
cgaagagccaggtgatgaacgtcattggaagcgaaaggcgcttctcggtgtccccctcgtcaccgtcctcccagcaaacaccccctccagttacaccaagrgccaagctcagcttcagcatgcagtcgagcttggagctgaacggcatgacggggacggacgtggccgatgtcccaccccctctgcctctcaaaggcagcg

SEQ ID NO: 2040 - DNA, 201 bp, Homo sapiens
tgtttgatcccaaagagctcagcaaaatgtttactgaattcatcctcaatgttcccatgggcttgctgaccatccagaaactctactgcttgatcgaaatygtccacagtgacctcttcacacagcatgactgcagagagatcctgcttcccatgatgaccgatcagctcaagtaccatctggagagacaggaggacctgg

SEQ ID NO: 2041 - DNA, 201 bp, Homo sapiens
accgagggaaagagtatgagcgccgggaagattttgaggctcggctcttaactcagtttccaaacgccgagaaaatgaagacaacatctccaccaggcgaygatattaaaaactctcctggccagtatattcagtgcttcacagtgaagcccaaactcgatctgcctcctaagtttcacaggccagtgtcagagcagattg

SEQ ID NO: 2042 - DNA, 201 bp, Homo sapiens
tggtgggcccaatattagaaatgacattaattcccgagacggagctgcgcaaagccaccatccccatcttctttgatatgatgcagtgtgaattccattcracccgaagcttccaaatgtttgaaaatgagatcatcaccaagctggatcatgaagtcgaaggaggcagaggagacgaacagtacaaagtgttatttgata

SEQ ID NO: 2043 - DNA, 201 bp, Homo sapiens
gcaaaacaacagcgaagaacgtggaggtcacggtgtctgtgtacgatgaggatgggaaacgattagagcatgtgattttcccgggtgctggtgatgaagcratttcagagtacaaatctgtgatttactaccaagtaaagcagccacgctggtttgagactgttaaggtggccattcccatcgaggacgttaaccgcagtc

SEQ ID NO: 2044 - DNA, 201 bp, Homo sapiens
tccagcgatttgaatattctcggccaatccggaagggagagaaaaacccagacaatgaatttgcgaatatgtggatcgagagaaccatatatacaactgcmtataaattacctggaattttaaggtggtttgaggtcaagtctgttttcatggtggaaatcagccccctggagaatgccattgagaccatgcagctgacga

SEQ ID NO: 2045 - DNA, 201 bp, Homo sapiens
tgctgtacaggaaggacgtggggccaacccagaggcacgtccagattatcatggagaaacttctccggaccgtgaaccgaaccgtcatttccatgggacgrgattctgaactcattggaaacttcgtggcttgcatgacagctattttacgacaaatggaagattaccattatgcccacttgatcaagacttttgggaaaa

SEQ ID NO: 2046 - DNA, 201 bp, Homo sapiens
ctcgtcaccgtcctcccagcaaacaccccctccagttacaccaagggccaagctcagcttcagcatgcagtcgagcttggagctgaacggcatgacggggrcggacgtggccgatgtcccaccccctctgcctctcaaaggcagcgtggcagattacgggaatttgatggaaaaccaggacttgctgggctcgccaacacc

SEQ ID NO: 2047 - DNA, 201 bp, Homo sapiens
ctgagaaaatatttgcactagcatttgtcaagctgatgagatacgatggtaccaccctgcgagacggagagcacgatcttatcgtctataaggccgaagcraagaagctggaagatgctgccacgtacttgagtctgccctccacgaaggcagagttggaagaaaagggccactcggccaccggcaagagcatgcagagcc

SEQ ID NO: 2048 - DNA, 201 bp, Homo sapiens
gtttgccctggagcctctcctgccaaagaaaatgcactccaggtcccaggacaagctggacaaggatgacctggagaaggagaagaaggacaagaagaagraaaaaaggaacagcaaacatcaagagatatttgagaaagaatttaaacccaccgacatttccctgcagcagtctgaggctgtgatcctttcggaaacgat

SEQ ID NO: 2049 - DNA, 201 bp, Homo sapiens
ccgacgggtttgccctggagcctctcctgccaaagaaaatgcactccaggtcccaggacaagctggacaaggatgacctggagaaggagaagaaggacaaraagaaggaaaaaaggaacagcaaacatcaagagatatttgagaaagaatttaaacccaccgacatttccctgcagcagtctgaggctgtgatcctttcgg

SEQ ID NO: 2050 - DNA, 201 bp, Homo sapiens
acgggtttgccctggagcctctcctgccaaagaaaatgcactccaggtcccaggacaagctggacaaggatgacctggagaaggagaagaaggacaagaaraaggaaaaaaggaacagcaaacatcaagagatatttgagaaagaatttaaacccaccgacatttccctgcagcagtctgaggctgtgatcctttcggaaa

SEQ ID NO: 2051 - DNA, 201 bp, Homo sapiens
ccatgcagctgacgaacgacaagatcaacagcatggtgcagcagcacctggatgaccccagcctgcccatcaacccgctctccatgctcctgaacggcatygtggacccagctgtcatggggggcttcgcaaactacgaaaaggccttctttacagaccggtacctgcaggagcaccctgaggcccatgaaaagatcgaga

SEQ ID NO: 2052 - DNA, 201 bp, Homo sapiens
gaaccatatatacaactgcatataaattacctggaattttaaggtggtttgaggtcaagtctgttttcatggtggaaatcagccccctggagaatgccatygagaccatgcagctgacgaacgacaagatcaacagcatggtgcagcagcacctggatgaccccagcctgcccatcaacccgctctccatgctcctgaacg

SEQ ID NO: 2053 - DNA, 201 bp, Homo sapiens
tgaaggaaaaggtggagaaagagtacggcgtccgaatcatgccctcaagtctggatgatagaagaggcagccgcccccggtccatggtgcggtccttcacratgccttcctcatcccgccctctgtctgtggcctctgtctcttccctctcatcggacagcaccccttccagaccaggctccgacgggtttgccctggagc

SEQ ID NO: 2054 - DNA, 201 bp, Homo sapiens
aaggaaaaaaggaacagcaaacatcaagagatatttgagaaagaatttaaacccaccgacatttccctgcagcagtctgaggctgtgatcctttcggaaaygataagtcccctgcggccccagagaccgaagagccaggtgatgaacgtcattggaagcgaaaggcgcttctcggtgtccccctcgtcaccgtcctcccag

SEQ ID NO: 2055 - DNA, 201 bp, Homo sapiens
ggcttgctgaccatccagaaactctactgcttgatcgaaatcgtccacagtgacctcttcacacagcatgactgcagagagatcctgcttcccatgatgascgatcagctcaagtaccatctggagagacaggaggacctggaggcctgctgtcagctgctcagccacatcctggaggtgctgtacaggaaggacgtgggg

SEQ ID NO: 2056 - DNA, 201 bp, Homo sapiens
ctccccctccacaccagaggcatctgccacctccactgcccagcaaaactccgcctcctccccctccaaagacaactcgcaagcagacatcggtggactcygggatcgtgcagtgacatcgcaaggctctctggaaagagtgtgctgcccctccccatctccatgccctctccttctgtgtcccctgagtctgctgtttac

SEQ ID NO: 2057 - DNA, 201 bp, Homo sapiens
tccaaatgtttgaaaatgagatcatcaccaagctggatcatgaagtcgaaggaggcagaggagacgaacagtacaaagtgttatttgataaaatccttctrgaacactgcaggaagcacaaatacctcgccaaaacaggagaaacttttgtaaaactcgttgtgcgcttaatggaaaggcttttggattatagaaccatca

SEQ ID NO: 2058 - DNA, 201 bp, Homo sapiens
ctttttcttcaaaggagttcagttctcaccatggagtgagtggcctttagcgtcatggagcaaggtgggtctgggaggtagatatgggtccgggatgtgcyatcgtagttatcagagttgggggcctctgagtgtgtctggctctgagagagtctgagtcttgcccaaacattctttctttttgtgccaaatgacttgcat

SEQ ID NO: 2059 - DNA, 201 bp, Homo sapiens
tattgaatggcgatcacaaattctttctggaactctgcctcaggatgaactcaaagaactgaagaagaaggtcacagccaaaattgattatggaaacagarttctagatttggacctggtggttagagatgaagatgggaatattttggatccagaattaactagcacgattagtctcttcagagctcatgaaatagcttc

SEQ ID NO: 2060 - DNA, 201 bp, Homo sapiens
cagtctgaggctgtgatcctttcggaaacgataagtcccctgcggccccagagaccgaagagccaggtgatgaacgtcattggaagcgaaaggcgcttctyggtgtccccctcgtcaccgtcctcccagcaaacaccccctccagttacaccaagggccaagctcagcttcagcatgcagtcgagcttggagctgaacggc

SEQ ID NO: 2061 - DNA, 201 bp, Homo sapiens
gaaaagagtttccgcatttagtggacaggaccacagctgtggctcgaaaaacagggtttccggagataatcatgcctggtgatgttcgaaatgatatctaygtaacattagttcaaggagattttgataaaggaagcaaaacaacagcgaagaacgtggaggtcacggtgtctgtgtacgatgaggatgggaaacgattag

SEQ ID NO: 2062 - DNA, 201 bp, Homo sapiens
gaaagagtgtgctgcccctccccatctccatgccctctccttctgtgtcccctgagtctgctgtttacctcattgggcctgtgatgttaacatttcgtgckactgctttttcttcaaaggagttcagttctcaccatggagtgagtggcctttagcgtcatggagcaaggtgggtctgggaggtagatatgggtccgggat

SEQ ID NO: 2063 - DNA, 201 bp, Homo sapiens
tgcagcagcacctggatgaccccagcctgcccatcaacccgctctccatgctcctgaacggcatcgtggacccagctgtcatggggggcttcgcaaactaygaaaaggccttctttacagaccggtacctgcaggagcaccctgaggcccatgaaaagatcgagaagctcaaggacctgattgcttggcagattccttttc

SEQ ID NO: 2064 - DNA, 201 bp, Homo sapiens
tgaacgaggtccagcgatttgaatattctcggccaatccggaagggagagaaaaacccagacaatgaatttgcgaatatgtggatcgagagaaccatatayacaactgcatataaattacctggaattttaaggtggtttgaggtcaagtctgttttcatggtggaaatcagccccctggagaatgccattgagaccatgc

SEQ ID NO: 2065 - DNA, 201 bp, Homo sapiens
aactcgttgtgcgcttaatggaaaggcttttggattatagaaccatcatgcacgacgagaacaaagaaaaccgcatgagctgcaccgtcaatgtgctgaayttctacaaagaaattgaaagagaagaaatgtatataaggtatttgtacaagctctgtgacctgcacaaggagtgtgataactacaccgaagcggcttaca

SEQ ID NO: 2066 - DNA, 201 bp, Homo sapiens
tcggtttaccttccgccacaggtcatcacaggactctaaggataaatctgagaaaatatttgcactagcatttgtcaagctgatgagatacgatggtaccmccctgcgagacggagagcacgatcttatcgtctataaggccgaagcaaagaagctggaagatgctgccacgtacttgagtctgccctccacgaaggcaga

SEQ ID NO: 2067 - DNA, 201 bp, Homo sapiens
agaccagaccgtccgggtgaagggggcagcactgaaatacttaccaacgatcgtcaacgatgtgaaattggtgtttgatcccaaagagctcagcaaaatgwttactgaattcatcctcaatgttcccatgggcttgctgaccatccagaaactctactgcttgatcgaaatcgtccacagtgacctcttcacacagcatga

SEQ ID NO: 2068 - DNA, 201 bp, Homo sapiens; identical to SEQ ID NO: 2063

SEQ ID NO: 2069 - DNA, 201 bp, Homo sapiens; identical to SEQ ID NO: 2045

SEQ ID NO: 2070 - DNA, 201 bp, Homo sapiens; identical to SEQ ID NO: 2049

SEQ ID NO: 2071 - DNA, 201 bp, Homo sapiens; identical to SEQ ID NO: 2050

SEQ ID NO: 2072 - DNA, 201 bp, Homo sapiens; identical to SEQ ID NO: 2056

SEQ ID NO: 2073 - DNA, 201 bp, Homo sapiens
ctttttcttcaaaggagttcagttctcaccatggagtgagtggcctttagcgtcatggagcaaggtgggtctgggaggtagatatgggtccgggatgtgcyatcgtagttaccagagttgggggcctctgagtgtgtctggctctgagagagtctgagtcttgcccaaacattctttctttttgtgccaaatgacttgcat

SEQ ID NO: 2074 - DNA, 201 bp, Homo sapiens
tcggtttaccttccgccacaggtcatcacaggactctaaggataaatctgagaaaatatttgcactagcatttgtcaagctgatgagatacgatggtaccmccctgcgagacggagagcacgatcttatcgtctataaggccgaagcgaagaagctggaagatgctgccacgtacttgagtctgccctccacgaaggcaga

SEQ ID NO: 2075 - DNA, 201 bp, Homo sapiens
aaggagttcagttctcaccatggagtgagtggcctttagcgtcatggagcaaggtgggtctgggaggtagatatgggtccgggatgtgccatcgtagttaycagagttgggggcctctgagtgtgtctggctctgagagagtctgagtcttgcccaaacattctttctttttgtgccaaatgacttgcatttgcaaagagc

SEQ ID NO: 2076 - DNA, 201 bp, Homo sapiens; identical to SEQ ID NO: 2034

SEQ ID NO: 2077 - DNA, 201 bp, Homo sapiens; identical to SEQ ID NO: 2052

SEQ ID NO: 2078 - DNA, 201 bp, Homo sapiens; identical to SEQ ID NO: 2061

SEQ ID NO: 2079 - DNA, 201 bp, Homo sapiens; identical to SEQ ID NO: 2040

SEQ ID NO: 2080 - DNA, 201 bp, Homo sapiens; identical to SEQ ID NO: 2055

SEQ ID NO: 2081 - DNA, 201 bp, Homo sapiens; identical to SEQ ID NO: 2037

SEQ ID NO: 2082 - DNA, 201 bp, Homo sapiens; identical to SEQ ID NO: 2057

SEQ ID NO: 2083 - DNA, 201 bp, Homo sapiens; identical to SEQ ID NO: 2065

SEQ ID NO: 2084 - DNA, 201 bp, Homo sapiens; identical to SEQ ID NO: 2041

SEQ ID NO: 2085 - DNA, 201 bp, Homo sapiens
tccagcgatttgaatattctcggccaatccggaagggagagaaaaacccagacaatgaatttgcgaatatgtggatcgagagaaccatatatacaactgcmtataaattacctggaattttaaggtggtttgaggtcaagtctgttttcatggtggaaatcagccccctggagaatgccatcgagaccatgcagctgacga

SEQ ID NO: 2086 - DNA, 201 bp, Homo sapiens
tgaacgaggtccagcgatttgaatattctcggccaatccggaagggagagaaaaacccagacaatgaatttgcgaatatgtggatcgagagaaccatatayacaactgcatataaattacctggaattttaaggtggtttgaggtcaagtctgttttcatggtggaaatcagccccctggagaatgccatcgagaccatgc

SEQ ID NO: 2087 - DNA, 201 bp, Homo sapiens; identical to SEQ ID NO: 2051

SEQ ID NO: 2088 - DNA, 201 bp, Homo sapiens
tgaaggaaaaggtggagaaagagtacggcgtccgaatcatgccctcaagtctggatgatagaagaggcagccgcccccggtccatggtgcggtccttcacratgccttcctcatcccgccctctgtctgtggcctctgtctcttccctctcatcggacagcaccccctccagaccaggctccgacgggtttgccctggagc

SEQ ID NO: 2089 - DNA, 201 bp, Homo sapiens; identical to SEQ ID NO: 2054

SEQ ID NO: 2090 - DNA, 201 bp, Homo sapiens
agatatttgagaaagaatttaaacccaccgacatttccctgcagcagtctgaggctgtgatcctttcggaaacgataagtcccctgcggccccagagaccraagagccaggtgatgaacgtcattggaagcgaaaggcgcttctcggtgtccccctcgtcaccgtcctcccagcaaacaccccctccagttacaccaagag

SEQ ID NO: 2091 - DNA, 201 bp, Homo sapiens
agtctgaggctgtgatcctttcggaaacgataagtcccctgcggccccagagaccgaagagccaggtgatgaacgtcattggaagcgaaaggcgcttctcrgtgtccccctcgtcaccgtcctcccagcaaacaccccctccagttacaccaagagccaagctcagcttcagcatgcagtcgagcttggagctgaacggca

SEQ ID NO: 2092 - DNA, 201 bp, Homo sapiens; identical to SEQ ID NO: 2059

SEQ ID NO: 2093 - DNA, 201 bp, Homo sapiens; identical to SEQ ID NO: 2062

SEQ ID NO: 2094 - DNA, 201 bp, Homo sapiens; identical to SEQ ID NO: 2043

SEQ ID NO: 2095 - DNA, 201 bp, Homo sapiens; identical to SEQ ID NO: 2028

SEQ ID NO: 2096 - DNA, 201 bp, Homo sapiens; identical to SEQ ID NO: 2042

SEQ ID NO: 2097 - DNA, 201 bp, Homo sapiens; identical to SEQ ID NO: 2047

SEQ ID NO: 2098 - DNA, 201 bp, Homo sapiens; identical to SEQ ID NO: 2024

SEQ ID NO: 2099 - DNA, 201 bp, Homo sapiens
gccaacacctccacctccccctccacaccagaggcatctgccacctccactgcccagcaaaactccgcctcctccccctccaaagacaactcgcaagcagrcatcggtggactctgggatcgtgcagtgacatcgcaaggctctctggaaagagtgtgctgcccctccccatctccatgccctctccttctgtgtcccctg

SEQ ID NO: 2100 - DNA, 201 bp, Homo sapiens
aggcatctgccacctccactgcccagcaaaactccgcctcctccccctccaaagacaactcgcaagcagacatcggtggactctgggatcgtgcagtgacrtcgcaaggctctctggaaagagtgtgctgcccctccccatctccatgccctctccttctgtgtcccctgagtctgctgtttacctcattgggcctgtgat

SEQ ID NO: 2101 - DNA, 201 bp, Homo sapiens
gccacctccactgcccagcaaaactccgcctcctccccctccaaagacaactcgcaagcagacatcggtggactctgggatcgtgcagtgacatcgcaagsctctctggaaagagtgtgctgcccctccccatctccatgccctctccttctgtgtcccctgagtctgctgtttacctcattgggcctgtgatgttaacat

SEQ ID NO: 2102 - DNA, 201 bp, Homo sapiens
cagtctgaggctgtgatcctttcggaaacgataagtcccctgcggccccagagaccgaagagccaggtgatgaacgtcattggaagcgaaaggcgcttctyggtgtccccctcgtcaccgtcctcccagcaaacaccccctccagttacaccaagagccaagctcagcttcagcatgcagtcgagcttggagctgaacggc

SEQ ID NO: 2103 - DNA, 201 bp, Homo sapiens; identical to SEQ ID NO: 2067

SEQ ID NO: 2104 - DNA, 201 bp, Homo sapiens
cgaagagccaggtgatgaacgtcattggaagcgaaaggcgcttctcggtgtccccctcgtcaccgtcctcccagcaaacaccccctccagttacaccaagrgccaagctcagcttcagcatgcagtcgagcttggagctgaacggcatgacgggggcggacgtggccgatgtcccaccccctctgcctctcaaaggcagcg

SEQ ID NO: 2105 - DNA, 201 bp, Homo sapiens
ctcgtcaccgtcctcccagcaaacaccccctccagttacaccaagagccaagctcagcttcagcatgcagtcgagcttggagctgaacggcatgacggggrcggacgtggccgatgtcccaccccctctgcctctcaaaggcagcgtggcagattacgggaatttgatggaaaaccaggacttgctgggctcgccaacacc

SEQ ID NO: 2106 - DNA, 201 bp, Homo sapiens; identical to SEQ ID NO: 2048

SEQ ID NO: 2107 - DNA, 201 bp, Homo sapiens; identical to SEQ ID NO: 2027

SEQ ID NO: 2108 - DNA, 201 bp, Homo sapiens
accgccagttggccgggctgagcgaggcgccagagggaagcctgcaaggtacgtctgcgagagccgggtgcgggcgcggcaggggaaaaggggggcgctcrctctcttaccgccaggtccggattgcggctgtccctgtgtgacacggctcggatgacccccgctcgccagcttcgccagccgcgtccgctctcccagcgc

SEQ ID NO: 2109 - DNA, 201 bp, Homo sapiens
tatcccgggagtcctgctccgacaccacctccacaggggaagccgctcggagagacgcagggacccaggcaagggatgcgggcaaacgcgccaagggttcrgcagaggggcgtgaccgccagttggccgggctgagcgaggcgccagagggaagcctgcaaggtacgtctgcgagagccgggtgcgggcgcggcaggggaa

SEQ ID NO: 2110 - DNA, 201 bp, Homo sapiens
ggtttgatgttcagagcacacagcgcccgccgcctgagttagcctgaattagcagtcccgcagtaacagcagcagagcaggacaacacttctactgaaaastaagccccaaagtcacagcagaaccaaccgttcatgacttcaagggaaaacgagggggaaaatgtgatcctttcattcttctcatttgtggtgatactaa

SEQ ID NO: 2111 - DNA, 123 bp, Homo sapiens
gccgcggtcgacccctccgggakgggggccagggcagcctccgcggctatcccgggagtcctgctccgacaccacctccacaggggaagccgctcggagagacgcagggacccaggcaaggga

SEQ ID NO: 2112 - DNA, 201 bp, Homo sapiens
aacgtgcctcgtcgccgaccgccacacacaggaaccgcttacccaccagctctgcccgcgtctctaccgccatagctgtcgctgccgaagcggccgctgcytcctccagtgcgagggaaccgatgaaacctcactcctaccggccgctcatgctgaggagagcggaccgggacacagcagcggacccgaaagagcgcagac

SEQ ID NO: 2113 - DNA, 201 bp, Homo sapiens
gaccgccagttggccgggctgagcgaggcgccagagggaagcctgcaaggtacgtctgcgagagccgggtgcgggcgcggcaggggaaaaggggggcgctsgctctcttaccgccaggtccggattgcggctgtccctgtgtgacacggctcggatgacccccgctcgccagcttcgccagccgcgtccgctctcccagcg

SEQ ID NO: 2114 - DNA, 201 bp, Homo sapiens
ttggttacccaccacacccccaacaattccacaagcattgaatataatcacagcacattcagaaaaaatacttgcttcagaatctatacgagctgctgtgrataggcgcatcagagggtaggtcacattcactaaatgtctatatgcacaattggtgcaacaaaggtttgtgccagaccggcggagtggatacaggctgcc

SEQ ID NO: 2115 - DNA, 201 bp, Homo sapiens
caatatacccttggagtaattctaaatatttaaatttctcccttactgctattcatcctcagatcaaaatttcaagttgacaaatttggatttgaaaactsattcactttttcaatttttttaatgaggcataacatgcatatggttaagtgcacaaatcttaagtgtacagtcagtgaatttttgcatgtatgtatgtac

SEQ ID NO: 2116 - DNA, 201 bp, Homo sapiens
aaatttctcccttactgctattcatcctcagatcaaaatttcaagttgacaaatttggatttgaaaactcattcactttttcaatttttttaatgaggcayaacatgcatatggttaagtgcacaaatcttaagtgtacagtcagtgaatttttgcatgtatgtatgtacctgaagcaagatatagaacttatttacttgt

SEQ ID NO: 2117 - DNA, 201 bp, Homo sapiens
aagggagcagagctgcctcgagaaccttctgaggctccaatcacttttgatgcagattcttttcttaattattttgataagattttagggccaaggcctartgagtcagattctgatgatctggatgatgaagactttgaatgtttagatagtgatgatgacttggactttgaaacacacgaacctggcgaagaggcttcc

SEQ ID NO: 2118 - DNA, 201 bp, Homo sapiens
  misc_feature (1)...(201): n = A,T,C or G, or insertion/deletion polymorphism (see Tables 1-2)
gacacagtggagtactgcctgttcctgataccagatgagtcaagggactcagataaacataaagagattcttcagaagtacattgagagaataatcactcngtttgcacctatgctggtcccctacatctggcagaatcagcctttcaatcttaaatataaacctgggaaaggaggtgttcctgctcatatgtttggcgtg

SEQ ID NO: 2119 - DNA, 201 bp, Homo sapiens
gtttcaaatatattggaatcctatagctcccaagctggactggcaggacctgcttccaatcttttacaaagcatgggagtgcagctgcctgacaacaccgrtcacagaccaacaagtaagccaacaaaaaattaaccagcacatttagcttctcttttttctttttaaataaatattgaatatgattctgttcatttctag

SEQ ID NO: 2120 - DNA, 201 bp, Homo sapiens
aagccaacaaaaaattaaccagcacatttagcttctcttttttctttttaaataaatattgaatatgattctgttcatttctagtttagattactcatttrgtaaaaatgtttcttcattacaagttttacagattgacttctccatgagccccaaatgtggccctcttggcacaagtctttgtgatctcagctgtgggtt

SEQ ID NO: 2121 - DNA, 201 bp, Homo sapiens
agcagaactatgacttaactgaagtctcagagagcatgaaagctttcatatccaaagtctcaacccacaagggagcagagctgcctcgagaaccttctgargctccaatcacttttgatgcagattcttttcttaattattttgataagattttagggccaaggcctaatgagtcagattctgatgatctggatgatgaag

SEQ ID NO: 2122 - DNA, 201 bp, Homo sapiens
ccaggaactagcacacacctgcatcagcaaaagtttcaccactaggaaccaagtggaacctgtatcccagactaccgataacaattcagatgaggaagatkctggtacgggagaatctgttatggcaccagtagatgtagacctgaacctggtttcaaatatattggaatcctatagctcccaagctggactggcaggacc

SEQ ID NO: 2123 - DNA, 201 bp, Homo sapiens
tgttaatagaagctgctgactttctccctaaatggctggatcctgaaaatagcaccaatagggtatttttctgccatggggaattgtgtattatccctgcwccaagaaaatctggagcagaatcttggttacccaccacacccccaacaattccacaagcattgaatataatcacagcacattcagaaaaaatacttgctt

SEQ ID NO: 2124 - DNA, 201 bp, Homo sapiens
ctcaccagatcagctggaccagctgctgcaggaagctgttggcaaaaaagaatccgagtctgtttccaaggaggagaaggagcagaactatgacttaactsaagtctcagagagcatgaaagctttcatatccaaagtctcaacccacaagggagcagagctgcctcgagaaccttctgaggctccaatcacttttgatgc

SEQ ID NO: 2125 - DNA, 201 bp, Homo sapiens
agtcggagaggcggctaaggaaaggtgccacagcagagacgcgaaggagaggccctagaaccttttcaaagaagaatggaagaaaccatgaagcttgctamgatggaagacacagtggagtactgcctgttcctgataccagatgagtcaagggactcagataaacataaagagattcttcagaagtacattgagagaata

SEQ ID NO: 2126 - DNA, 201 bp, Homo sapiens
ggaggagaaggagcagaactatgacttaactgaagtctcagagagcatgaaagctttcatatccaaagtctcaacccacaagggagcagagctgcctcgaraaccttctgaggctccaatcacttttgatgcagattcttttcttaattattttgataagattttagggccaaggcctaatgagtcagattctgatgatct

SEQ ID NO: 2127 - DNA, 201 bp, Homo sapiens
ttcccccagaggatgatgaccagtggttagatctctcaccagatcagctggaccagctgctgcaggaagctgttggcaaaaaagaatccgagtctgtttcyaaggaggagaaggagcagaactatgacttaactgaagtctcagagagcatgaaagctttcatatccaaagtctcaacccacaagggagcagagctgcctc

SEQ ID NO: 2128 - DNA, 201 bp, Homo sapiens
aagcagctaatcttcccccagaggatgatgaccagtggttagatctctcaccagatcagctggaccagctgctgcaggaagctgttggcaaaaaagaatcygagtctgtttccaaggaggagaaggagcagaactatgacttaactgaagtctcagagagcatgaaagctttcatatccaaagtctcaacccacaagggag

SEQ ID NO: 2129 - DNA, 201 bp, Homo sapiens
tgctgcaggaagctgttggcaaaaaagaatccgagtctgtttccaaggaggagaaggagcagaactatgacttaactgaagtctcagagagcatgaaagcyttcatatccaaagtctcaacccacaagggagcagagctgcctcgagaaccttctgaggctccaatcacttttgatgcagattcttttcttaattattttg

SEQ ID NO: 2130 - DNA, 144 bp, Homo sapiens
aattgtgcaaccatccctaccatctaattctagaatattagaaaccccatactcactaatagtctctcattcccttctactcccagcccctagaaaccacwagtctactttctgtctctatggatttgcctattttggatattt

SEQ ID NO: 2131 - DNA, 201 bp, Homo sapiens
ccactaggaaccaagtggaacctgtatcccagactaccgataacaattcagatgaggaagattctggtacgggagaatctgttatggcaccagtagatgtwgacctgaacctggtttcaaatatattggaatcctatagctcccaagctggactggcaggacctgcttccaatcttttacaaagcatgggagtgcagctgc

SEQ ID NO: 2132 - DNA, 201 bp, Homo sapiens
ttggttacccaccacacccccaacaattccacaagcattgaatataatcacagcacattcagaaaaaatacttgcttcagaatctatacgagctgctgtgrataggcgcatcagaggggtcacattcactaaatgtctatatgcacaattggtgcaacaaaggtttgtgccagaccggcggagtggatacaggctgcctcc

SEQ ID NO: 2133 - DNA, 201 bp, Homo sapiens; identical to SEQ ID NO: 2115

SEQ ID NO: 2134 - DNA, 201 bp, Homo sapiens; identical to SEQ ID NO: 2116

SEQ ID NO: 2135 - DNA, 201 bp, Homo sapiens; identical to SEQ ID NO: 2118
  misc_feature (1)...(201): n = A,T,C or G, or insertion/deletion polymorphism (see Tables 1-2)

SEQ ID NO: 2136 - DNA, 201 bp, Homo sapiens; identical to SEQ ID NO: 2117

SEQ ID NO: 2137 - DNA, 201 bp, Homo sapiens; identical to SEQ ID NO: 2119

SEQ ID NO: 2138 - DNA, 201 bp, Homo sapiens; identical to SEQ ID NO: 2120

SEQ ID NO: 2139 - DNA, 201 bp, Homo sapiens; identical to SEQ ID NO: 2121

SEQ ID NO: 2140 - DNA, 201 bp, Homo sapiens; identical to SEQ ID NO: 2122

SEQ ID NO: 2141 - DNA, 201 bp, Homo sapiens; identical to SEQ ID NO: 2123

SEQ ID NO: 2142 - DNA, 201 bp, Homo sapiens; identical to SEQ ID NO: 2124

SEQ ID NO: 2143 - DNA, 201 bp, Homo sapiens; identical to SEQ ID NO: 2125

SEQ ID NO: 2144 - DNA, 201 bp, Homo sapiens; identical to SEQ ID NO: 2126

SEQ ID NO: 2145 - DNA, 201 bp, Homo sapiens; identical to SEQ ID NO: 2127

SEQ ID NO: 2146 - DNA, 201 bp, Homo sapiens; identical to SEQ ID NO: 2128

SEQ ID NO: 2147 - DNA, 201 bp, Homo sapiens; identical to SEQ ID NO: 2129

SEQ ID NO: 2148 - DNA, 144 bp, Homo sapiens; identical to SEQ ID NO: 2130

SEQ ID NO: 2149 - DNA, 201 bp, Homo sapiens; identical to SEQ ID NO: 2131

SEQ ID NO: 2150 - DNA, 201 bp, Homo sapiens
caaatggtacaacaaccagagcctgggccatggctcccactccttcatctactatgagaacatgctgctgggggttccgaggctgcggcagctaaaggtcygcaatgactcctgtgtggtgcatgaagacttccgggaggacattctgagctgctatgatgtctactctccagacaaagaagaacaactcccctttgggcc

SEQ ID NO: 2151 - DNA, 201 bp, Homo sapiens
atttggaagcacccgcagccagccccagctgtgaccccagacccctggggagtccagggtgggcaggagagtgaggttccctataaaagagaagaggaaghcttagaggagaggagactctcccgtggtgagattccaacgttgcagaggagttaagtgtgaggcactcccggagcaaagtctatgaaggatcttctgcaa

SEQ ID NO: 2152 - DNA, 201 bp, Homo sapiens
ggacgctgagagtctgcaccatctccagcacggggcctctccagccccaacccaagaagcctgaagatgaaccccaggagacggcatacaggacccaggtrtccagctgctgcctccatatctgtcaaggcatcagaggactttggggaacaaccctgactgagaacacagctgagaaccgggaactttatatcaagacca

SEQ ID NO: 2153 - DNA, 201 bp, Homo sapiens
ttcaagtacatcagcttcaacaaaaccatgacccagctctcctccacgctggcccgctgtgccaaggacatcctgggcttcgccgtcatgttcttcattgktttcttcgcctatgcccaactcggctacctgcttttcgggacccaagtggaaaactttagcactttcatcaagtgcattttcactcagttccggataatc

SEQ ID NO: 2154 - DNA, 201 bp, Homo sapiens
ctgcgtcttcatcttctactatgtggtggaagagatcctggagctccacattcaccggcttcgctacctcagcagcatctggaacatactggacctggtgrtcatcttgctctccattgtggctgtgggcttccacatattccgaaccctcgaggtgaatcggctcatggggaagctcctgcagcagccaaacacgtatgc

SEQ ID NO: 2155 - DNA, 201 bp, Homo sapiens
tgtcagcaactgggacttctttatcgttggctgtgaggtcatcttctgcgtcttcatcttctactatgtggtggaagagatcctggagctccacattcacyggcttcgctacctcagcagcatctggaacatactggacctggtggtcatcttgctctccattgtggctgtgggcttccacatattccgaaccctcgaggt

SEQ ID NO: 2156 - DNA, 201 bp, Homo sapiens
cagtcaagctgatccgctatgtcagcaactgggacttctttatcgttggctgtgaggtcatcttctgcgtcttcatcttctactatgtggtggaagagatmctggagctccacattcaccggcttcgctacctcagcagcatctggaacatactggacctggtggtcatcttgctctccattgtggctgtgggcttccaca

SEQ ID NO: 2157 - DNA, 201 bp, Homo sapiens
tggacataccactcgcaggatgagttggggggcttctcccactggggcaggctcacaagctacagcggaggtggctactacctggaccttccaggatcccracagggtagtgcagaggctctccgggcccttcaggaggggctgtggctggacaggggcactcgagtggtgttcatcgacttctcagtctacaatgccaat

SEQ ID NO: 2158 - DNA, 201 bp, Homo sapiens
gatgggaatcgtattctggatgagaaggaacaggaaaaaatgcgacaggacctggaggaagagagggtggccctcaacactgagattgagaaactaggccdatctattgtgagcagcccacaaggcaaatcgggtccagaggctgccagagcaggaggctgggtttcaggagaagaattctacatgctcacaaggagagtt

SEQ ID NO: 2159 - DNA, 201 bp, Homo sapiens; identical to SEQ ID NO: 2150

SEQ ID NO: 2160 - DNA, 201 bp, Homo sapiens; identical to SEQ ID NO: 2151

SEQ ID NO: 2161 - DNA, 201 bp, Homo sapiens; identical to SEQ ID NO: 2152

SEQ ID NO: 2162 - DNA, 201 bp, Homo sapiens; identical to SEQ ID NO: 2153

SEQ ID NO: 2163 - DNA, 201 bp, Homo sapiens; identical to SEQ ID NO: 2154

SEQ ID NO: 2164 - DNA, 201 bp, Homo sapiens; identical to SEQ ID NO: 2155

SEQ ID NO: 2165 - DNA, 201 bp, Homo sapiens; identical to SEQ ID NO: 2156

SEQ ID NO: 2166 - DNA, 201 bp, Homo sapiens; identical to SEQ ID NO: 2157

SEQ ID NO: 2167 - DNA, 201 bp, Homo sapiens; identical to SEQ ID NO: 2158

SEQ ID NO: 2168 - DNA, 201 bp, Homo sapiens
atcgaaaccatatcattctacaggaaaatgcacagcatgccacccggtttatagctctggcaaatgttggaaatccagaaaagaaaaagtatctttacgcrttcagtattgttcccatgaagctaatggatgcagcagaactggtaaaacagcctccggatgtcactgaaaacccttacagaaaatctgggcaggaagcat

SEQ ID NO: 2169 - DNA, 201 bp, Homo sapiens
tgagacaaagtctcgctctgtcacccaagcaggattgcagtggcataactgtggctcactgtagcctcaacctcctgggctctagagttcctcccacctcrgcctcatgagtagctgggaccacaggcgcatgctaccatgcctggcaaacttttttgattttttatagagacaggagggtctccctgtgttgcccaggct

SEQ ID NO: 2170 - DNA, 201 bp, Homo sapiens
ggattgcagtggcataactgtggctcactgtagcctcaacctcctgggctctagagttcctcccacctcagcctcatgagtagctgggaccacaggcgcawgctaccatgcctggcaaacttttttgattttttatagagacaggagggtctccctgtgttgcccaggctggtctgtaatgcctaggctcaagggatcctc

SEQ ID NO: 2171 - DNA, 201 bp, Homo sapiens
gtcctggccagtgaagccatccttaatgttcctgataagtctgactggaggcagtgtcagatcagcaaggaagacgaggagaccctggctcgccgcttccrgaaagactttgagccctatgactttactctggatgactaaaacaaagggaagaactttttatgaactccacaggaagtagtaaagctttttttttttttt

SEQ ID NO: 2172 - DNA, 201 bp, Homo sapiens
cctggccaacatggtgaaaccccgtctttactaaagctacaaaaattagctgggcgtggtgccaggcacttgtaatcccagctactcaggaggctgaggcrggagaattgcttgagcctgggaggtggaggttgcagtgagccaagatcgctccattgcactccagcctgggtgacagtgaaactccatctcaaaaataaa

SEQ ID NO: 2173 - DNA, 201 bp, Homo sapiens
gaaaatctgggcaggaagcatccataggaaagcaaattcttgcccctgtggaagaatcagcctgtcagtttttctttgatttaaatgaaaagcagggaagraagcgttcatccacaggtagagatagcaaatcttctcctcatccaaagcagcctcgcaaacctcctcagcctccaggaccctgctggttttgccttgcta

SEQ ID NO: 2174 - DNA, 201 bp, Homo sapiens
ggaagggaggtcctggccagtgaagccatccttaatgttcctgataagtctgactggaggcagtgtcagatcagcaaggaagacgaggagaccctggctcrccgcttccggaaagactttgagccctatgactttactctggatgactaaaacaaagggaagaactttttatgaactccacaggaagtagtaaagcttttt

SEQ ID NO: 2175 - DNA, 201 bp, Homo sapiens
agttttagtcccaaggatgtgtcttctctgagaatgatgctgtgtacaacctcccagtttaagggtgttgatatcttgctcacatccccatggcccaagtrtgtggggaactttgggaattcttctggagaagtggataccaaaaaatgtggttctgctttggtttccagtcttgccacgggcttgaaaccaagataccat

SEQ ID NO: 2176 - DNA, 201 bp, Homo sapiens
ctggcaaatgttggaaatccagaaaagaaaaagtatctttacgcgttcagtattgttcccatgaagctaatggatgcagcagaactggtaaaacagcctcyggatgtcactgaaaacccttacagaaaatctgggcaggaagcatccataggaaagcaaattcttgcccctgtggaagaatcagcctgtcagtttttcttt

SEQ ID NO: 2177 - DNA, 201 bp, Homo sapiens
aggaggctgaggcaggagaattgcttgagcctgggaggtggaggttgcagtgagccaagatcgctccattgcactccagcctgggtgacagtgaaactccrtctcaaaaataaaagaataaaagtatgtctgtcatccagctcctatgtctgttatccagctccaagtacagcttgtgtatatcaacattttcaaaaacct

SEQ ID NO: 2178 - DNA, 201 bp, Homo sapiens
cgttattggctggagggcgctgacgtctgattgttgcgcggtcgcatttttccggggaacgcggattcgcattcccaattttaggtggcagtcgcaacccrtactattcggacagatggcacagaaaccgctgcgcctcttggcttgtggagatgttgaaggaaagtttgatattttattcaatagagttcaagcaattca

SEQ ID NO: 2179 - DNA, 201 bp, Homo sapiens
gtggatcacctgaggtgaggagtttgagaccagcctggccaacatggtgaaaccccgtctttactaaagctacaaaaattagctgggcgtggtgccaggcrcttgtaatcccagctactcaggaggctgaggcaggagaattgcttgagcctgggaggtggaggttgcagtgagccaagatcgctccattgcactccagcc

SEQ ID NO: 2180 - DNA, 201 bp, Homo sapiens
ctggctcgccgcttccggaaagactttgagccctatgactttactctggatgactaaaacaaagggaagaactttttatgaactccacaggaagtagtaargcttttttttttttttaattaaaagaattttttttgagacaaagtctcgctctgtcacccaagcaggattgcagtggcataactgtggctcactgtagcc

SEQ ID NO: 2181 - DNA, 201 bp, Homo sapiens
gaggagtttgagaccagcctggccaacatggtgaaaccccgtctttactaaagctacaaaaattagctgggcgtggtgccaggcacttgtaatcccagctrctcaggaggctgaggcaggagaattgcttgagcctgggaggtggaggttgcagtgagccaagatcgctccattgcactccagcctgggtgacagtgaaac

SEQ ID NO: 2182 - DNA, 201 bp, Homo sapiens
acctgaggtgaggagtttgagaccagcctggccaacatggtgaaaccccgtctttactaaagctacaaaaattagctgggcgtggtgccaggcacttgtartcccagctactcaggaggctgaggcaggagaattgcttgagcctgggaggtggaggttgcagtgagccaagatcgctccattgcactccagcctgggtga

SEQ ID NO: 2183 - DNA, 201 bp, Homo sapiens
aggtgaggagtttgagaccagcctggccaacatggtgaaaccccgtctttactaaagctacaaaaattagctgggcgtggtgccaggcacttgtaatcccrgctactcaggaggctgaggcaggagaattgcttgagcctgggaggtggaggttgcagtgagccaagatcgctccattgcactccagcctgggtgacagtg

SEQ ID NO: 2184 - DNA, 201 bp, Homo sapiens; identical to SEQ ID NO: 2168

SEQ ID NO: 2185 - DNA, 201 bp, Homo sapiens; identical to SEQ ID NO: 2169

SEQ ID NO: 2186 - DNA, 201 bp, Homo sapiens; identical to SEQ ID NO: 2170

SEQ ID NO: 2187 - DNA, 201 bp, Homo sapiens; identical to SEQ ID NO: 2171

SEQ ID NO: 2188 - DNA, 201 bp, Homo sapiens; identical to SEQ ID NO: 2172

SEQ ID NO: 2189 - DNA, 201 bp, Homo sapiens; identical to SEQ ID NO: 2173

SEQ ID NO: 2190 - DNA, 201 bp, Homo sapiens; identical to SEQ ID NO: 2174

SEQ ID NO: 2191 - DNA, 201 bp, Homo sapiens; identical to SEQ ID NO: 2176

SEQ ID NO: 2192 - DNA, 201 bp, Homo sapiens; identical to SEQ ID NO: 2177

SEQ ID NO: 2193 - DNA, 201 bp, Homo sapiens; identical to SEQ ID NO: 2178

SEQ ID NO: 2194 - DNA, 201 bp, Homo sapiens; identical to SEQ ID NO: 2179

SEQ ID NO: 2195 - DNA, 201 bp, Homo sapiens; identical to SEQ ID NO: 2180

SEQ ID NO: 2196 - DNA, 201 bp, Homo sapiens; identical to SEQ ID NO: 2181

SEQ ID NO: 2197 - DNA, 201 bp, Homo sapiens; identical to SEQ ID NO: 2182

SEQ ID NO: 2198 - DNA, 201 bp, Homo sapiens; identical to SEQ ID NO: 2183

SEQ ID NO: 2199 - DNA, 201 bp, Homo sapiens; identical to SEQ ID NO: 2168

SEQ ID NO: 2200 - DNA, 201 bp, Homo sapiens; identical to SEQ ID NO: 2171

SEQ ID NO: 2201 - DNA, 201 bp, Homo sapiens; identical to SEQ ID NO: 2173

SEQ ID NO: 2202 - DNA, 201 bp, Homo sapiens; identical to SEQ ID NO: 2174

SEQ ID NO: 2203 - DNA, 201 bp, Homo sapiens; identical to SEQ ID NO: 2175

SEQ ID NO: 2204 - DNA, 201 bp, Homo sapiens; identical to SEQ ID NO: 2176

SEQ ID NO: 2205 - DNA, 201 bp, Homo sapiens
agaattttttttgagacaaagtctcgctctgtcacccaagcaggattgcatgagccaagatcgctccattgcactccagcctgggtgacagtgaaactccrtctcaaaaataaaagaataaaagtatgtctgtcatccagctcctatgtctgttatccagctccaagtacagcttgtgtatatcaacattttcaaaaacct

SEQ ID NO: 2206 - DNA, 201 bp, Homo sapiens; identical to SEQ ID NO: 2178

SEQ ID NO: 2207 - DNA, 201 bp, Homo sapiens
ctggctcgccgcttccggaaagactttgagccctatgactttactctggatgactaaaacaaagggaagaactttttatgaactccacaggaagtagtaargcttttttttttttttaattaaaagaattttttttgagacaaagtctcgctctgtcacccaagcaggattgcatgagccaagatcgctccattgcactcc

SEQ ID NO: 2208 - DNA, 201 bp, Homo sapiens
aagacgtgaaagaaaaaagagaagacttaccaagtttgagtgatgtccaacacaacatccagaagacagtgcagactctctggcagcagctggtggcacaraggcagcagaccctggaggatgccttcaagatcgatctctctgtgaaacctggagagagggaagtgaagattgaagaggtcacaccgctctgggaggaga

SEQ ID NO: 2209 - DNA, 201 bp, Homo sapiens
gaaacctggagagagggaagtgaagattgaagaggtcacaccgctctgggaggagacgatgctcaaggcctggcagcattacttagcatctgagaagaagycactggcaagtcgttcaaatgttgcacaccacagcaaagtcactttgtggagtggaagcctgtcctcagccatgaagctgatgcccgggcggcaggccaa

SEQ ID NO: 2210 - DNA, 201 bp, Homo sapiens
cttctgcgctctgcagggcggaagcttcgacgtggcagacagaatgttccacagtgtgaagagcacgtgggagtcggcctccagagagaacatgagtgacrtcagggagctgaccccagagttcttctacctgcctgagttcttaaccaactgcaacggggtagagttcggctgcatgcaggacgggactgtgctaggaga

SEQ ID NO: 2211 - DNA, 201 bp, Homo sapiens
catgagtgacgtcagggagctgaccccagagttcttctacctgcctgagttcttaaccaactgcaacggggtagagttcggctgcatgcaggacgggactrtgctaggagacgtgcagctccctccctgggctgatggggaccctcggaaattcatcagcctgcacagaaaggccctggaaagtgactttgtcagtgccaa

SEQ ID NO: 2212 - DNA, 201 bp, Homo sapiens
ttctcaaagggacactgtcctcagcactttatacagcagtttaaataaagtcattctttattgcctatccaagccccagcagtccctctccgaatgcctcrgccttctcagcatcctgggctttctgcaggagcactgggatgttgtctttgccacctacaattccaacatcagcttcctcctgtgtctcatgcattgcct

SEQ ID NO: 2213 - DNA, 201 bp, Homo sapiens
ccctggtgattgtgcagggccacctggtgtcagaaggggtcctgctttttggccaccaacacttctacatctgcgagaacttcacactgtctcccacgggwgatgtctactgtacccgtcactgcttatccaacatcagcgatccgttcattttcaacctgtgcagcaaagacaggtccactgaccattactcgtgccagt

SEQ ID NO: 2214 - DNA, 201 bp, Homo sapiens
ttccaagtttcttgtcttctacaacaatgatcggagtaaggcctttaaaagcttctgctctttccaacccagcctgaaggggaaagccacctcggaggacmccctcaatctaaggagataccccggctctgacaggatcatgctgcagaagtggcagaaaagggacatcagcaattttgagtatctcatgtacctcaacac

SEQ ID NO: 2215 - DNA, 201 bp, Homo sapiens
tccctggtgattgtgcagggccacctggtgtcagaaggggtcctgctttttggccaccaacacttctacatctgcgagaacttcacactgtctcccacggstgatgtctactgtacccgtcactgcttatccaacatcagcgatccgttcattttcaacctgtgcagcaaagacaggtccactgaccattactcgtgccag

SEQ ID NO: 2216 - DNA, 201 bp, Homo sapiens
atggggaccctcggaaattcatcagcctgcacagaaaggccctggaaagtgactttgtcagtgccaacctccaccattggatagaccttatttttgggtayaagcagcaggggccagccgcagtggatgctgttaatatcttccacccctacttctacggtgacagaatggacctcagcagcatcactgaccccctcatca

SEQ ID NO: 2217 - DNA, 201 bp, Homo sapiens
cggcaggctcgcttcctcctgcaggacatcgccctggagatcttcttccacaatggatattccaagtttcttgtcttctacaacaatgatcggagtaaggyctttaaaagcttctgctctttccaacccagcctgaaggggaaagccacctcggaggacaccctcaatctaaggagataccccggctctgacaggatcatg

SEQ ID NO: 2218 - DNA, 201 bp, Homo sapiens
tgagaagaagtcactggcaagtcgttcaaatgttgcacaccacagcaaagtcactttgtggagtggaagcctgtcctcagccatgaagctgatgcccgggmggcaggccaaggaccctgagtgcaagacagaggattttgtgtcatgtatagagaactacagaagaagaggacaagagctatatgcatctttatacaaaga

SEQ ID NO: 2219 - DNA, 171 bp, Homo sapiens
cgagacttccagtccgaggtcctgctttctgctatggaactattccacatgacaagtggaggtgatgcagygatgttcagagacggcaaagagcctcagccaagtgcagaagctgctgctgccccttctcttgccaacatctcctgcttcacccagaagctggtggagaag

SEQ ID NO: 2220 - DNA, 201 bp, Homo sapiens
tatatgcatctttatacaaagaccatgtgcaaaggcgaaaatgtggcaacatcaaggcagccaacgcctgggccaggatccaggagcagctttttggggasctgggcttgtggagccagggggaagaaaccaagccctgttccccatgggaactcgactggagagaaggaccagctcgaatgaggaaacgcatcaaacgct

SEQ ID NO: 2221 - DNA, 201 bp, Homo sapiens
tctggcagcagctggtggcacaaaggcagcagaccctggaggatgccttcaagatcgatctctctgtgaaacctggagagagggaagtgaagattgaagasgtcacaccgctctgggaggagacgatgctcaaggcctggcagcattacttagcatctgagaagaagtcactggcaagtcgttcaaatgttgcacaccaca

SEQ ID NO: 2222 - DNA, 201 bp, Homo sapiens
tttcttgtcttctacaacaatgatcggagtaaggcctttaaaagcttctgctctttccaacccagcctgaaggggaaagccacctcggaggacaccctcartctaaggagataccccggctctgacaggatcatgctgcagaagtggcagaaaagggacatcagcaattttgagtatctcatgtacctcaacaccgcggct

SEQ ID NO: 2223 - DNA, 201 bp, Homo sapiens
aagttctgcactcggtcctgaccagtaatgccatgtgtgacttcctgatgcaacacatctgtgggtaccagataatggcgtttctcctgaggaagaaggcytctctcctgaaccatcgaatttttcagctgatcctctcagtggctggcactgtggagctgggcttcaggtcatctgctatcaccaacactggtgtcttcc

SEQ ID NO: 2224 - DNA, 201 bp, Homo sapiens
tttttcagctgatcctctcagtggctggcactgtggagctgggcttcaggtcatctgctatcaccaacactggtgtcttccagcacatcctctgcaatttygagctctggatgaatactgcagacaatctggagctcagcctcttttcccatcttttggaaatccttcaatcaccaagggaaggacccaggaatgctgaag

SEQ ID NO: 2225 - DNA, 111 bp, Homo sapiens
tcgtcggtgaatgagaggcagatctgcatggacggagccctggacccttccctgcctggtgagaagacctttgccagttcgaaggcagtaggacggccctyacggaacccc

SEQ ID NO: 2226 - DNA, 201 bp, Homo sapiens
aagggaaggacccaggaatgctgaagctgcccaccaggcacagcttatacccaagctcatcttcctattcaatgagccgagcctcatcccctccaagatcyccaccatcattggcatcctggcctgtcagctgaggggccacttcagcacccaggacttgctcaggattgggctgtttgttgtgtacaccctcaagccttc

SEQ ID NO: 2227 - DNA, 201 bp, Homo sapiens
ctacagaagaaacccccagggcctccttccccacagttctcaaggaagggcctctggcaatcacagctctgcagcccaaccctctccatggccgatgggayttctatgaaaaggatgagcacacacactcggagggctgagcagcacgctggaaactgtgacttggtgatgcccagctgcacacgaaattacacatgactc

SEQ ID NO: 2228 - DNA, 201 bp, Homo sapiens; identical to SEQ ID NO: 2213

SEQ ID NO: 2229 - DNA, 201 bp, Homo sapiens; identical to SEQ ID NO: 2215

SEQ ID NO: 2230 - DNA, 201 bp, Homo sapiens; identical to SEQ ID NO: 2218

SEQ ID NO: 2231 - DNA, 201 bp, Homo sapiens; identical to SEQ ID NO: 2220

SEQ ID NO: 2232 - DNA, 201 bp, Homo sapiens; identical to SEQ ID NO: 2221

SEQ ID NO: 2233 - DNA, 201 bp, Homo sapiens
ctgatggagggcccagcatgggacacaagccagatcatcatcaccgggagtcaagacggcatggtccgggtttggaagactgaggatgtgaagatgtctgytcctggacggccagcaggagaggagcccctggctcagcctccaagcccaagaggccacaagtgggagaagaacctggccttgagtcgagagctggacgtt

SEQ ID NO: 2234 - DNA, 201 bp, Homo sapiens; identical to SEQ ID NO: 2222

SEQ ID NO: 2235 - DNA, 201 bp, Homo sapiens; identical to SEQ ID NO: 2208

SEQ ID NO: 2236 - DNA, 201 bp, Homo sapiens
cagatcatcatcaccgggagtcaagacggcatggtccgggtttggaagactgaggatgtgaagatgtctgttcctggacggccagcaggagaggagccccyggctcagcctccaagcccaagaggccacaagtgggagaagaacctggccttgagtcgagagctggacgttagcattgctttgacagggaagcccagcaaa

SEQ ID NO: 2237 - DNA, 201 bp, Homo sapiens
gcttggggagctacggctccgacaaggtcctgatgacattcgagaacctggctgcctggggccgctgtctgtgcgccgtgtgcccatccccaacaacgatygtcacctctgggaccagcactgtggtgtgtgtgtgggagctcagcatgaccaaaggccgcccgaggggcttgcgcctccggcaggccttgtatggacaca

SEQ ID NO: 2238 - DNA, 201 bp, Homo sapiens
ttgtctcctgtgcgggagcacacttgtccctgtggaatgtcaatggacagcccctggccagcatcaccacagcctggggcccagaaggagccataacctgytgctgcctgatggagggcccagcatgggacacaagccagatcatcatcaccgggagtcaagacggcatggtccgggtttggaagactgaggatgtgaaga

SEQ ID NO: 2239 - DNA, 201 bp, Homo sapiens; identical to SEQ ID NO: 2209

SEQ ID NO: 2240 - DNA, 201 bp, Homo sapiens; identical to SEQ ID NO: 2210

SEQ ID NO: 2241 - DNA, 201 bp, Homo sapiens; identical to SEQ ID NO: 2212

SEQ ID NO: 2242 - DNA, 201 bp, Homo sapiens; identical to SEQ ID NO: 2211

SEQ ID NO: 2243 - DNA, 201 bp, Homo sapiens; identical to SEQ ID NO: 2214

SEQ ID NO: 2244 - DNA, 201 bp, Homo sapiens; identical to SEQ ID NO: 2217

SEQ ID NO: 2245 - DNA, 201 bp, Homo sapiens; identical to SEQ ID NO: 2216

SEQ ID NO: 2246 - DNA, 201 bp, Homo sapiens
tggctgtagagaggaacaaagtgctgctgcctcctctctggaacaggaccttcagctggggctttgatgacttcagctgctgcttggggagctacggctcygacaaggtcctgatgacattcgagaacctggctgcctggggccgctgtctgtgcgccgtgtgcccatccccaacaacgattgtcacctctgggaccagca

SEQ ID NO: 2247 - DNA, 171 bp, Homo sapiens; identical to SEQ ID NO: 2219

SEQ ID NO: 2248 - DNA, 201 bp, Homo sapiens
ggcagcgtcagtcaccttcagcctcctggtgagcggctcccaggactgcacctgtatcctgtgggatctggaccacctcacccacgtgacccgcctgcccrcccatcgggaaggcatctcagccatcaccatcagtgacgtctcaggcaccattgtctcctgtgcgggagcacacttgtccctgtggaatgtcaatggaca

SEQ ID NO: 2249 - DNA, 201 bp, Homo sapiens
ccaaaggggccattggccacattgtctctactgagaagaccattctggctgtagagaggaacaaagtgctgctgcctcctctctggaacaggaccttcagytggggctttgatgacttcagctgctgcttggggagctacggctccgacaaggtcctgatgacattcgagaacctggctgcctggggccgctgtctgtgcg

SEQ ID NO: 2250 - DNA, 201 bp, Homo sapiens; identical to SEQ ID NO: 2208

SEQ ID NO: 2251 - DNA, 201 bp, Homo sapiens; identical to SEQ ID NO: 2218

SEQ ID NO: 2252 - DNA, 171 bp, Homo sapiens; identical to SEQ ID NO: 2219

SEQ ID NO: 2253 - DNA, 201 bp, Homo sapiens; identical to SEQ ID NO: 2220

SEQ ID NO: 2254 - DNA, 201 bp, Homo sapiens; identical to SEQ ID NO: 2209

SEQ ID NO: 2255 - DNA, 201 bp, Homo sapiens; identical to SEQ ID NO: 2221

SEQ ID NO: 2256 - DNA, 201 bp, Homo sapiens; identical to SEQ ID NO: 2212

SEQ ID NO: 2257 - DNA, 201 bp, Homo sapiens; identical to SEQ ID NO: 2227

SEQ ID NO: 2258 - DNA, 201 bp, Homo sapiens
gtcttgtcagtcatcaggaccatgtgggcctggaatgctcgaaacttcttcctgctggagtggaccctgcagcccatctcgcagtttgtagagatcatgcmcctgaagccggccccagtgcaggaacacttcttccagcttctagaggccctggtgttcgagctgcactacgtgcctcatgagatcctgcgaaaggtacag

SEQ ID NO: 2259 - DNA, 201 bp, Homo sapiens
acccagcgtggcaagccccggagttcctccagaccttggccatagccgccttccccctgggagcccaaaagggggttggggctgagtccacccggaacacyagcagtcctgaggccgcagctgaaggcgacagcacagtggagggtctccaggctcccaccaaggcacatcccgcccggaggaagctgagggagttcacgc

SEQ ID NO: 2260 - DNA, 201 bp, Homo sapiens
aagggaaggacccaggaatgctgaagctgcccaccaggcacagcttatacccaagctcatcttcctattcaatgagccgagcctcatcccctccaagatcyccaccatcattggcatcctggcctgtcagctgaggggccacttcagcacccaggacttgctcagcaaatattatgtctctttacatccattttctctcaa

SEQ ID NO: 2261 - DNA, 201 bp, Homo sapiens
gcagttcctcagcctcgtccaccgcacctacccccaggacccagcgtggcaagccccggagttcctccagaccttggccatagccgccttccccctgggakcccaaaagggggttggggctgagtccacccggaacaccagcagtcctgaggccgcagctgaaggcgacagcacagtggagggtctccaggctcccaccaa

SEQ ID NO: 2262 - DNA, 201 bp, Homo sapiens; identical to SEQ ID NO: 2213

SEQ ID NO: 2263 - DNA, 201 bp, Homo sapiens; identical to SEQ ID NO: 2215

SEQ ID NO: 2264 - DNA, 201 bp, Homo sapiens; identical to SEQ ID NO: 2224

SEQ ID NO: 2265 - DNA, 201 bp, Homo sapiens; identical to SEQ ID NO: 2218

SEQ ID NO: 2266 - DNA, 201 bp, Homo sapiens; identical to SEQ ID NO: 2220

SEQ ID NO: 2267 - DNA, 201 bp, Homo sapiens; identical to SEQ ID NO: 2221

SEQ ID NO: 2268 - DNA, 201 bp, Homo sapiens; identical to SEQ ID NO: 2222

SEQ ID NO: 2269 - DNA, 201 bp, Homo sapiens; identical to SEQ ID NO: 2233

SEQ ID NO: 2270 - DNA, 201 bp, Homo sapiens; identical to SEQ ID NO: 2208

SEQ ID NO: 2271 - DNA, 201 bp, Homo sapiens; identical to SEQ ID NO: 2236

SEQ ID NO: 2272 - DNA, 201 bp, Homo sapiens
gcaggttctgaggatggtgcctgggcacagaccttcccggccagcgtgctgcagttcctcagcctcgtccaccgcacctacccccaggacccagcgtggcragccccggagttcctccagaccttggccatagccgccttccccctgggagcccaaaagggggttggggctgagtccacccggaacaccagcagtcctgag

SEQ ID NO: 2273 - DNA, 201 bp, Homo sapiens; identical to SEQ ID NO: 2237

SEQ ID NO: 2274 - DNA, 201 bp, Homo sapiens
attgaagctgctgctgtactttctggcaagcccctccctccgcacacggtttagagatggcctgtgtgcaggatcctgggtggaacgcagcactgagggcrtggatattgtaatggacaacctgaagagccagtcaccactgcctgagcaaagcccatgcctgcttcctgggttccgtgtcttgaatgactttctggccca

SEQ ID NO: 2275 - DNA, 201 bp, Homo sapiens; identical to SEQ ID NO: 2238

SEQ ID NO: 2276 - DNA, 201 bp, Homo sapiens; identical to SEQ ID NO: 2209

SEQ ID NO: 2277 - DNA, 201 bp, Homo sapiens; identical to SEQ ID NO: 2210

SEQ ID NO: 2278 - DNA, 201 bp, Homo sapiens; identical to SEQ ID NO: 2211

SEQ ID NO: 2279 - DNA, 201 bp, Homo sapiens; identical to SEQ ID NO: 2212

SEQ ID NO: 2280 - DNA, 201 bp, Homo sapiens; identical to SEQ ID NO: 2214

SEQ ID NO: 2281 - DNA, 201 bp, Homo sapiens; identical to SEQ ID NO: 2223

SEQ ID NO: 2282 - DNA, 201 bp, Homo sapiens; identical to SEQ ID NO: 2216

SEQ ID NO: 2283 - DNA, 201 bp, Homo sapiens; identical to SEQ ID NO: 2217

SEQ ID NO: 2284 - DNA, 201 bp, Homo sapiens; identical to SEQ ID NO: 2246

SEQ ID NO: 2285 - DNA, 201 bp, Homo sapiens
tctccagaccacgccaccagccaacagaagcgagacttccagtccgaggtcctgctttctgctatggaactattccacatgacaagtggaggtgatgcagygatgttcagagacggcaaagagcctcagccaagtgcagaagctgctgctgccccttctcttgccaacatctcctgcttcacccagaagctggtggagaag

SEQ ID NO: 2286 - DNA, 201 bp, Homo sapiens; identical to SEQ ID NO: 2249

SEQ ID NO: 2287 - DNA, 201 bp, Homo sapiens; identical to SEQ ID NO: 2248

SEQ ID NO: 2288 - DNA, 201 bp, Homo sapiens
ctccccagcagtgagggtctctctcttcctcttgtgctcttgctggggctggtggtccaggggtcttactccttggaggccatgtgggccatgaggtccaycaccctgttgctgtagccaaattcgttgtcatacctagaaatgagcttgacaaagtggtcgttgagggcaatgccagccccagcgtcaaaggtggaggag

SEQ ID NO: 2289 - DNA, 200 bp, Homo sapiens
ggggagattcagtgtggtgggggactgagtgtggcagggactccccagcagtgagggtctctctcttcctcttgtgctcttgctggggctggtggtccargggtcttactccttggaggccatgtgggccatgaggtccaccaccctgttgctgtagccaaattcgttgtcatacctagaaatgagcttgacaaagtggt

SEQ ID NO: 2290 - DNA, 201 bp, Homo sapiens
gaggtccaccaccctgttgctgtagccaaattcgttgtcatacctagaaatgagcttgacaaagtggtcgttgagggcaatgccagccccagcgtcaaagrtggaggagtgggtcaggtccaccactgacacgttggcagtggggacacggaaggccatgccagtgagcttcccgttcagctcagggatgaccttgcccac

SEQ ID NO: 2291 - DNA, 201 bp, Homo sapiens
tgtggcagggactccccagcagtgagggtctctctcttcctcttgtgctcttgctggggctggtggtccaggggtcttactccttggaggccatgtgggcmatgaggtccaccaccctgttgctgtagccaaattcgttgtcatacctagaaatgagcttgacaaagtggtcgttgagggcaatgccagccccagcgtcaa

SEQ ID NO: 2292 - DNA, 201 bp, Homo sapiens
ccatgaggtccaccaccctgttgctgtagccaaattcgttgtcatacctagaaatgagcttgacaaagtggtcgttgagggcaatgccagccccagcgtcraaggtggaggagtgggtcaggtccaccactgacacgttggcagtggggacacggaaggccatgccagtgagcttcccgttcagctcagggatgaccttgc

SEQ ID NO: 2293 - DNA, 201 bp, Homo sapiens
tgaccttgcccacagccttggcagcgccagtagaggcagggatgatgttctggctgttgtcatacttctcatggttcacacccatgacgaacatgggggcrtcagcagagggggcagagatgatgacccttttggctcccccttgcctccccaaagcacatttcttccattctgtcttccactcactcctggaagatggtg

SEQ ID NO: 2294 - DNA, 157 bp, Homo sapiens
gttttgagaccccattgctttcaggctgccccttctgggtctgttactcggcccctactcacatttccttgggttggagcaacagtcccagagagggccayggtgggagctgcgccctccttaaaagatgactttacataaaatgttgatcttcagc

SEQ ID NO: 2295 - DNA, 201 bp, Homo sapiens
ctgtctgctccaacctcccttatgcctcctggtttgagtctttctgccagttcactcactaccgttgctccaaccacgtctactatgccaagagagtcctrtgttcccagccagtctctattctctcacctaacactctcaaggagatagaagcttcagctgaagtctcacccaccacgatgacctcccccatctcacccc

SEQ ID NO: 2296 - DNA, 201 bp, Homo sapiens
cccttatgcctcctggtttgagtctttctgccagttcactcactaccgttgctccaaccacgtctactatgccaagagagtcctgtgttcccagccagtcwctattctctcacctaacactctcaaggagatagaagcttcagctgaagtctcacccaccacgatgacctcccccatctcaccccacttcacagtgacaga

SEQ ID NO: 2297 - DNA, 201 bp, Homo sapiens
gcctcctgcagctgccccacacagaggccttgctggtgctgtgctattcgatcgtggagaatacctgcatcataacccccacagccaaggcctggaagtayatggaggaggagatccttggtttcgggaagtcggtctgtgacagccttgggcggcgacacatgtctacctgtgccctctgtgacttctgctccttgaagc

SEQ ID NO: 2298 - DNA, 201 bp, Homo sapiens
tgatgagaactcctactggagaaaccaaaaccctggcagcctcctgcagctgccccacacagaggccttgctggtgctgtgctattcgatcgtggagaatrcctgcatcataacccccacagccaaggcctggaagtacatggaggaggagatccttggtttcgggaagtcggtctgtgacagccttgggcggcgacacat

SEQ ID NO: 2299 - DNA, 201 bp, Homo sapiens
ttctataaattgagcccgcagcctcccgcttcgctctctgctcctcctgttcgacagtcagccgcatcttcttttgcgtcgccagccgagccacatcgctsagacaccatggggaaggtgaaggtcggagtcaacggatttggtcgtattgggcgcctggtcaccagggctgcttttaactctggtaaagtggatattgtt

SEQ ID NO: 2300 - DNA, 201 bp, Homo sapiens
ctcctccacctttgacgctggggctggcattgccctcaacgaccactttgtcaagctcatttcctggtatgacaacgaatttggctacagcaacagggtgrtggacctcatggcccacatggcctccaaggagtaagacccctggaccaccagccccagcaagagcacaagaggaagagagagaccctcactgctggggag

SEQ ID NO: 2301 - DNA, 201 bp, Homo sapiens
gcaaggtcatccctgagctgaacgggaagctcactggcatggccttccgtgtccccactgccaacgtgtcagtggtggacctgacctgccgtctagaaaamcctgccaaatatgatgacatcaagaaggtggtgaagcaggcgtcggagggccccctcaagggcatcctgggctacactgagcaccaggtggtctcctctg

SEQ ID NO: 2302 - DNA, 201 bp, Homo sapiens
accactttgtcaagctcatttcctggtatgacaacgaatttggctacagcaacagggtggtggacctcatggcccacatggcctccaaggagtaagacccytggaccaccagccccagcaagagcacaagaggaagagagagaccctcactgctggggagtccctgccacactcagtcccccaccacactgaatctcccct

SEQ ID NO: 2303 - DNA, 201 bp, Homo sapiens
gtcagtggtggacctgacctgccgtctagaaaaacctgccaaatatgatgacatcaagaaggtggtgaagcaggcgtcggagggccccctcaagggcatcytgggctacactgagcaccaggtggtctcctctgacttcaacagcgacacccactcctccacctttgacgctggggctggcattgccctcaacgaccactt

SEQ ID NO: 2304 - DNA, 170 bp, Homo sapiens
aggaagagagagaccctcactgctggggagtccctgccacactcagtcccccaccacactgaatctcccctcctcacagttgccatgtagaccccttgaaraggggaggggcctagggagccgcaccttgtcatgtaccatcaataaagtaccctgtgctcaaccagtta

SEQ ID NO: 2305 - DNA, 201 bp, Homo sapiens
gtggtgaagcaggcgtcggagggccccctcaagggcatcctgggctacactgagcaccaggtggtctcctctgacttcaacagcgacacccactcctccayctttgacgctggggctggcattgccctcaacgaccactttgtcaagctcatttcctggtatgacaacgaatttggctacagcaacagggtggtggacctc

SEQ ID NO: 2306 - DNA, 201 bp, Homo sapiens
ttgacgctggggctggcattgccctcaacgaccactttgtcaagctcatttcctggtatgacaacgaatttggctacagcaacagggtggtggacctcatkgcccacatggcctccaaggagtaagacccctggaccaccagccccagcaagagcacaagaggaagagagagaccctcactgctggggagtccctgccaca

SEQ ID NO: 2307 - DNA, 201 bp, Homo sapiens
tgaagcaggcgtcggagggccccctcaagggcatcctgggctacactgagcaccaggtggtctcctctgacttcaacagcgacacccactcctccaccttygacgctggggctggcattgccctcaacgaccactttgtcaagctcatttcctggtatgacaacgaatttggctacagcaacagggtggtggacctcatgg

SEQ ID NO: 2308 - DNA, 201 bp, Homo sapiens
acgtcgtggagtccactggcgtcttcaccaccatggagaaggctggggctcatttgcaggggggagccaaaagggtcatcatctctgccccctctgctgaygcccccatgttcgtcatgggtgtgaaccatgagaagtatgacaacagcctcaagatcatcagcaatgcctcctgcaccaccaactgcttagcacccctgg

SEQ ID NO: 2309 - DNA, 146 bp, Homo sapiens
ggggagtccctgccacactcagtcccccaccacactgaatctcccctcctcacagttgccatgtagaccccttgaagaggggaggggcctagggagccgcmccttgtcatgtaccatcaataaagtaccctgtgctcaaccagtta

SEQ ID NO: 2310 - DNA, 189 bp, Homo sapiens
gccccagcaagagcacaagaggaagagagagaccctcactgctggggagtccctgccacactcagtcccccaccacactgaatctcccctcctcacagttkccatgtagaccccttgaagaggggaggggcctagggagccgcaccttgtcatgtaccatcaataaagtaccctgtgctcaaccagtta

SEQ ID NO: 2311 - DNA, 201 bp, Homo sapiens
cgtgtcagtggtggacctgacctgccgtctagaaaaacctgccaaatatgatgacatcaagaaggtggtgaagcaggcgtcggagggccccctcaagggcrtcctgggctacactgagcaccaggtggtctcctctgacttcaacagcgacacccactcctccacctttgacgctggggctggcattgccctcaacgacca

SEQ ID NO: 2312 - DNA, 201 bp, Homo sapiens
cactgccaacgtgtcagtggtggacctgacctgccgtctagaaaaacctgccaaatatgatgacatcaagaaggtggtgaagcaggcgtcggagggccccytcaagggcatcctgggctacactgagcaccaggtggtctcctctgacttcaacagcgacacccactcctccacctttgacgctggggctggcattgccct

SEQ ID NO: 2313 - DNA, 201 bp, Homo sapiens
acctgccaaatatgatgacatcaagaaggtggtgaagcaggcgtcggagggccccctcaagggcatcctgggctacactgagcaccaggtggtctcctctkacttcaacagcgacacccactcctccacctttgacgctggggctggcattgccctcaacgaccactttgtcaagctcatttcctggtatgacaacgaatt

SEQ ID NO: 2314 - DNA, 145 bp, Homo sapiens
gttcgacagtcagccgcatcttcttttgcccgagccacatcgctsagacaccatggggaaggtgaaggtcggagtcaacggatttggtcgtattgggcgcctggtcaccagggctgcttttaactctggtaaagtggatattgtt

SEQ ID NO: 2315 - DNA, 201 bp, Homo sapiens; identical to SEQ ID NO: 2300

SEQ ID NO: 2316 - DNA, 201 bp, Homo sapiens; identical to SEQ ID NO: 2302

SEQ ID NO: 2317 - DNA, 201 bp, Homo sapiens; identical to SEQ ID NO: 2301

SEQ ID NO: 2318 - DNA, 170 bp, Homo sapiens; identical to SEQ ID NO: 2304

SEQ ID NO: 2319 - DNA, 201 bp, Homo sapiens; identical to SEQ ID NO: 2303

SEQ ID NO: 2320 - DNA, 201 bp, Homo sapiens; identical to SEQ ID NO: 2305

SEQ ID NO: 2321 - DNA, 201 bp, Homo sapiens; identical to SEQ ID NO: 2306

SEQ ID NO: 2322 - DNA, 201 bp, Homo sapiens; identical to SEQ ID NO: 2308

SEQ ID NO: 2323 - DNA, 201 bp, Homo sapiens; identical to SEQ ID NO: 2307

SEQ ID NO: 2324 - DNA, 146 bp, Homo sapiens; identical to SEQ ID NO: 2309

SEQ ID NO: 2325 - DNA, 189 bp, Homo sapiens; identical to SEQ ID NO: 2310

SEQ ID NO: 2326 - DNA, 201 bp, Homo sapiens; identical to SEQ ID NO: 2311

SEQ ID NO: 2327 - DNA, 201 bp, Homo sapiens; identical to SEQ ID NO: 2312

SEQ ID NO: 2328 - DNA, 201 bp, Homo sapiens; identical to SEQ ID NO: 2313

SEQ ID NO: 2329 - DNA, 145 bp, Homo sapiens; identical to SEQ ID NO: 2314

SEQ ID NO: 2330 - DNA, 201 bp, Homo sapiens
ctcctccacctttgacgctggggctggcattgccctcaacgaccactttgtcaagctcatttcctggtatgacaacgaatttggctacagcaacagggtgrtggacctcatggcccacatggcctccaaggagtaagacccctggaccaccagccccagcaagagcactcccccaccacactgaatctcccctcctcacag

SEQ ID NO: 2331 - DNA, 201 bp, Homo sapiens; identical to SEQ ID NO: 2301

SEQ ID NO: 2332 - DNA, 193 bp, Homo sapiens
accactttgtcaagctcatttcctggtatgacaacgaatttggctacagcaacagggtggtggacctcatggcccacatggcctccaaggagtaagacccytggaccaccagccccagcaagagcactcccccaccacactgaatctcccctcctcacagttgccatgtagaccccttgaagaggggaggggc

SEQ ID NO: 2333 - DNA, 201 bp, Homo sapiens; identical to SEQ ID NO: 2303

SEQ ID NO: 2334 - DNA, 112 bp, Homo sapiens
cctccaaggagtaagacccctggaccaccagccccagcaagagcactcccccaccacactgaatctcccctcctcacagttgccatgtagaccccttgaaraggggaggggc

SEQ ID NO: 2335 - DNA, 201 bp, Homo sapiens; identical to SEQ ID NO: 2305

SEQ ID NO: 2336 - DNA, 201 bp, Homo sapiens
ttgacgctggggctggcattgccctcaacgaccactttgtcaagctcatttcctggtatgacaacgaatttggctacagcaacagggtggtggacctcatkgcccacatggcctccaaggagtaagacccctggaccaccagccccagcaagagcactcccccaccacactgaatctcccctcctcacagttgccatgtag

SEQ ID NO: 2337 - DNA, 201 bp, Homo sapiens; identical to SEQ ID NO: 2307

SEQ ID NO: 2338 - DNA, 201 bp, Homo sapiens; identical to SEQ ID NO: 2308

SEQ ID NO: 2339 - DNA, 131 bp, Homo sapiens
gacctcatggcccacatggcctccaaggagtaagacccctggaccaccagccccagcaagagcactcccccaccacactgaatctcccctcctcacagttkccatgtagaccccttgaagaggggaggggc

SEQ ID NO: 2340 - DNA, 201 bp, Homo sapiens; identical to SEQ ID NO: 2311

SEQ ID NO: 2341 - DNA, 201 bp, Homo sapiens; identical to SEQ ID NO: 2312

SEQ ID NO: 2342 - DNA, 201 bp, Homo sapiens; identical to SEQ ID NO: 2313

SEQ ID NO: 2343 - DNA, 201 bp, Homo sapiens
cacttaccacagcgtgtccttggtgtggaaggcaccccaggctaagaacacaactgccttcagtgtcctctacgcggtctttgggcagcacagcatgcggygggtgattgtgcagcctgggaagaccagagtgaccatcactgggctgttgcccaagaccaagtatgtggcgtgtgtctgtgtgcagggcctggtgccccg

SEQ ID NO: 2344 - DNA, 201 bp, Homo sapiens
ggccggagtggccttcagccagcttgaactgaggaagtgccagggcccagagctccatccaggagtggccagcatcaggtcccttttgggtggcacagcaytgctacgctgtggagctactggagtccctgggcccgagatgagctggaggagggccaatggcaggccccttaacggtacagtgcaccaggaagtctccag

SEQ ID NO: 2345 - DNA, 162 bp, Homo sapiens
aacacttattttcacactcacaggcctgtgggttgattagggtggctctgctctgtgtgtttcatttggagcctgggctggagagtagcagtgggtacctrgggcaggtttctctcgtggtgaggttgaatgataatagaggaatgattgttcatgcaatgc

SEQ ID NO: 2346 - DNA, 201 bp, Homo sapiens
ggcctttggagtcaaagggggcaggagaatcaatgagtacttctgctgagggatatgcctccgcaactcacacacctgcctgcccacgctccttctttagytctgacacctgagtacacgatcacccactcttacctgctcgggtacctgcttactcagatacttacacacaacaacagcagcagcagctgctactgcaac

SEQ ID NO: 2347 - DNA, 201 bp, Homo sapiens
acatctgccaagccaagaacttcctgggagcctctgaaactgttatctccttgattgtcactgagccaccgacttccacagaacacagtgggagcccaggrgcactatgggcaaggacaggtggcggaggggaagctgctgcttacaacaacaagctggtggccaggcatgtcccccagattcccaaacccgctgtcctgg

SEQ ID NO: 2348 - DNA, 201 bp, Homo sapiens
tgcctgcagtgtcccaccttgactccggagactacatctgccaagccaagaacttcctgggagcctctgaaactgttatctccttgattgtcactgagccrccgacttccacagaacacagtgggagcccaggagcactatgggcaaggacaggtggcggaggggaagctgctgcttacaacaacaagctggtggccaggc

SEQ ID NO: 2349 - DNA, 201 bp, Homo sapiens
tggccttcattgagactgaactgagatgtgccagcccacgtagcctggccggagtggccttcagccagcttgaactgaggaagtgccagggcccagagctycatccaggagtggccagcatcaggtcccttttgggtggcacagcactgctacgctgtggagctactggagtccctgggcccgagatgagctggaggaggg

SEQ ID NO: 2350 - DNA, 201 bp, Homo sapiens
gcagggttcctggcgaggccttcaggcccctgggccgcctggagcagctgtggctgccttacaacgccctcagcgagctcaacgccctcatgctgcggggyctgcgacgcctgcgggagctgcggctgcccgggaaccgcctggccgccttcccctgggcggcgctcagggacgcccccaagctgcggctgctggacctgc

SEQ ID NO: 2351 - DNA, 201 bp, Homo sapiens
aaagtgcttcaacaaggactccactgaggccacagttacctacgtcaacctagagagactgggctacagcgaggacggcttggaggagctgtcccggcacrgtgtcagcgaggctgacaggcttctctcagctcgttccagtgtggactttcaggcctttggagtcaaagggggcaggagaatcaatgagtacttctgctg

SEQ ID NO: 2352 - DNA, 201 bp, Homo sapiens
tctcagctcgttccagtgtggactttcaggcctttggagtcaaagggggcaggagaatcaatgagtacttctgctgagggatatgcctccgcaactcacamacctgcctgcccacgctccttctttagctctgacacctgagtacacgatcacccactcttacctgctcgggtacctgcttactcagatacttacacacaa

SEQ ID NO: 2353 - DNA, 201 bp, Homo sapiens
tgggagcccaggagcactatgggcaaggacaggtggcggaggggaagctgctgcttacaacaacaagctggtggccaggcatgtcccccagattcccaaamccgctgtcctggccactggaccctctgtgcccagcacaaaggaggagctgacccttgagcacttccagatggatgccctgggagagctctctgatgggcg

SEQ ID NO: 2354 - DNA, 201 bp, Homo sapiens
ttcattgagactgaactgagatgtgccagcccacgtagcctggccggagtggccttcagccagcttgaactgaggaagtgccagggcccagagctccatcmaggagtggccagcatcaggtcccttttgggtggcacagcactgctacgctgtggagctactggagtccctgggcccgagatgagctggaggagggccaat

SEQ ID NO: 2355 - DNA, 201 bp, Homo sapiens
tcaggtcccttttgggtggcacagcactgctacgctgtggagctactggagtccctgggcccgagatgagctggaggagggccaatggcaggccccttaayggtacagtgcaccaggaagtctccagtgacggcacgagctggactctgctgggcctgcctgcagtgtcccaccttgactccggagactacatctgccaag

SEQ ID NO: 2356 - DNA, 201 bp, Homo sapiens
cgccttcccctgggcggcgctcagggacgcccccaagctgcggctgctggacctgcaggccaaccgcctctcggctgtgcccgctgaggccgcgcgcttcmtggagaacctcaccttcctcgacctctccagcaaccagctgatgaggctcccgcaggagctcatcgtctcctgggctcacctggagaccggtatctttcc

SEQ ID NO: 2357 - DNA, 201 bp, Homo sapiens
ggggcaggagaatcaatgagtacttctgctgagggatatgcctccgcaactcacacacctgcctgcccacgctccttctttagctctgacacctgagtacrcgatcacccactcttacctgctcgggtacctgcttactcagatacttacacacaacaacagcagcagcagctgctactgcaacaaccgctaacacttgtt

SEQ ID NO: 2358 - DNA, 201 bp, Homo sapiens
attcaaaagagcattctattaaagctaccttaatttggcgcttatttttcttaatcatgtttctgacaatcatagtgtgtggaatggttgctgctttaagygcaataagagctaactgccatcaagagccatcagtatgtcttcaagctgcatgcccagaaagctggattggttttcaaagaaagtgtttctatttttctg

SEQ ID NO: 2359 - DNA, 201 bp, Homo sapiens
catctagaagttaccatcaatgaaccagaaagtgggccctcaccaggcaccaaatctgccagcactctgatcttggacttccagcctcctgaactgttgtstgcattcaaaagagcattctattaaagctaccttaatttggcgcttatttttcttaatcatgtttctgacaatcatagtgtgtggaatggttgctgcttt

SEQ ID NO: 2360 - DNA, 201 bp, Homo sapiens
tggaaaccaagttcatcaattatgtgaagaatttcttctggatgactgaccaagaggctattcaagatctctggcagtggaggaagtctctttaagaaacrgttgatatctggctgtcctttttatagtgcagagtgagaactttccctaccatgtttgataaatgttgtccaggttctattgccaagaatgtgttgtcca

SEQ ID NO: 2361 - DNA, 201 bp, Homo sapiens
tatgtatgggatgctatgataggacatagtagtagcagtggtcagacatggaaatggtggggagacaaaagtatacacgtgaaataaaactcagtattttaataaagtaaaaaaaaaaaaaaggtatggggaaaactgcccccataaagcaattgtctccacctggccctgccctttgcatgtggagattattacaattca

SEQ ID NO: 2362 - DNA, 201 bp, Homo sapiens
atgtatgggatgctatgataggacatagtagtagcagtggtcagacatggaaatggtggggagacaaaagtatacacgtgaaataaaactcagtattttaataaagtaaaaaaaaaaaaaaggtatggggaaaactgcccccataaagcaattgtctccacctggccctgccctttgcatgtggagattattacaattcaa

SEQ ID NO: 2363 - DNA, 201 bp, Homo sapiens
gctgtgaaggaaggtgcagagtcagaagatgaagaagaggaggatgtgaaactcttaagtatatctggaaagcagtctgcccctggaggtggtgctgctgmtgatgatgatgatgaagatgatgatgatgatgatgacgaggaagctgaagaaaaagcgccagtgaagaaatctatacgagatactccagccaaaaatgca

SEQ ID NO: 2364 - DNA, 201 bp, Homo sapiens
tgtatgggatgctatgataggacatagtagtagcagtggtcagacatggaaatggtggggagacaaaagtatacacgtgaaataaaactcagtattttaataaagtaaaaaaaaaaaaaaggtatggggaaaactgcccccataaagcaattgtctccacctggccctgccctttgcatgtggagattattacaattcaag

SEQ ID NO: 2365 - DNA, 201 bp, Homo sapiens
gtatgggatgctatgataggacatagtagtagcagtggtcagacatggaaatggtggggagacaaaagtatacacgtgaaataaaactcagtattttaataaagtaaaaaaaaaaaaaaggtatggggaaaactgcccccataaagcaattgtctccacctggccctgccctttgcatgtggagattattacaattcaagg

SEQ ID NO: 2366 - DNA, 201 bp, Homo sapiens
tgggatgctatgataggacatagtagtagcagtggtcagacatggaaatggtggggagacaaaagtatacacgtgaaataaaactcagtattttaataaagtaaaaaaaaaaaaaaggtatggggaaaactgcccccataaagcaattgtctccacctggccctgccctttgcatgtggagattattacaattcaaggtga

SEQ ID NO: 2367 - DNA, 201 bp, Homo sapiens
gcccccataaagcaattgtctccacctggccctgccctttgcatgtggagattattacaattcaaggtgaaatttgggtggagacacaaccaaaccatatyagatggctatatcaaaaagacaagaaataacaagcattggtgagagtgtggagaagacggaacccttgtacacagttggtgggaacacagtttggtgcag

SEQ ID NO: 2368 - DNA, 201 bp, Homo sapiens
agcaaagccccaactaatctttagaagcatattggaactgataactccattttaaaatgagcaaagaatttatttcttataccaacaggtatatgaaaatrtgctcaatatcactaataactgggaaaatacaaatcaaaatcatagtaaaatattacctgttttcatggtgctaatattacctgttctcccactgctaat

SEQ ID NO: 2369 - DNA, 201 bp, Homo sapiens
taaaagagatttaattgactcatagttccacatggctggggaggtcttgcaatcatgacagaaggcaaatgggaagcaaagtcatgtcttatgtggtggcrggcagggggacttgtgcacaggaactcctatttatacaaccatcagatatcttgagacaagaacagtatggggctccctggtgtgattccgtcctgcgcg

SEQ ID NO: 2370 - DNA, 201 bp, Homo sapiens
aaatgcacaaaagtcaaatcagaatggaaaagactcaaaaccatcatcaacaccaagatcaaaaggacaagaatccttcaaaaaacaggaaaaatctcctraaacaccaaaaggatctagttctgtagaagacattaaagcaaaaatgcaagcaagtatagaaaaacgtggttctcttcccaaagtggaaaccaagttcat

SEQ ID NO: 2371 - DNA, 201 bp, Homo sapiens; identical to SEQ ID NO: 2358

SEQ ID NO: 2372 - DNA, 201 bp, Homo sapiens
ggccgacaaagatgatcactttaaggtggataatgatgaaaatgagaccagttatctttaagaacggtcagctcaggggctggtgcaaaggatgaactgcrcattgttgaagcagaggccatgaatgacgaaggcagtccaattaaagtaacactggcaactttgaaaatgtctgtacagccaacggtttctcttgggggc

SEQ ID NO: 2373 - DNA, 201 bp, Homo sapiens
gatgaactgcacattgttgaagcagaggccatgaatgacgaaggcagtccaattaaagtaacactggcaactttgaaaatgtctgtacagccaacggtttytcttgggggctttgaaataacaccaccagtggacttaaggttgaagtgtggttcagggccagtgcatattagtggacagcacttagtagctgtgaaggaa

SEQ ID NO: 2374 - DNA, 201 bp, Homo sapiens
gtgaaggaaggtgcagagtcagaagatgaagaagaggaggatgtgaaactcttaagtatatctggaaagcagtctgcccctggaggtggtgctgctgctgmtgatgatgatgaagatgatgatgatgatgatgacgaggaagctgaagaaaaagcgccagtgaagaaatctatacgagatactccagccaaaaatgcacaa

SEQ ID NO: 2375 - DNA, 201 bp, Homo sapiens
cagagtcagaagatgaagaagaggaggatgtgaaactcttaagtatatctggaaagcagtctgcccctggaggtggtgctgctgctgatgatgatgatgawgatgatgatgatgatgatgacgaggaagctgaagaaaaagcgccagtgaagaaatctatacgagatactccagccaaaaatgcacaaaagtcaaatcaga

SEQ ID NO: 2376 - DNA, 201 bp, Homo sapiens
tgtgattccgtcctgcgcggctgttctctggagcagcattcatttatcttcgtctgccttgtctcctacctaagtgtgtgtcgccacccgatggaagattygatggacatggacatgagccccctgaggccccagaactatcttttcagttgtgaactaaaggccgacaaagatgatcactttaaggtggataatgatgaa

SEQ ID NO: 2377 - DNA, 201 bp, Homo sapiens
gtgcagagtcagaagatgaagaagaggaggatgtgaaactcttaagtatatctggaaagcagtctgcccctggaggtggtgctgctgctgatgatgatgawgaagatgatgatgatgatgatgacgaggaagctgaagaaaaagcgccagtgaagaaatctatacgagatactccagccaaaaatgcacaaaagtcaaatc

SEQ ID NO: 2378 - DNA, 201 bp, Homo sapiens
gataatgatgaaaatgagaccagttatctttaagaacggtcagctcaggggctggtgcaaaggatgaactgcacattgttgaagcagaggccatgaatgaygaaggcagtccaattaaagtaacactggcaactttgaaaatgtctgtacagccaacggtttctcttgggggctttgaaataacaccaccagtggacttaa

SEQ ID NO: 2379 - DNA, 201 bp, Homo sapiens; identical to SEQ ID NO: 2359

SEQ ID NO: 2380 - DNA, 201 bp, Homo sapiens
caagaggctattcaagatctctggcagtggaggaagtctctttaagaaaatagtttaaacaatttgttaaaaattttccatcttatttcatttctgtaacrgttgatatctggctgtcctttttatagtgcagagtgagaactttccctaccatgtttgataaatgttgtccaggttctattgccaagaatgtgttgtcca

SEQ ID NO: 2381 - DNA, 201 bp, Homo sapiens; identical to SEQ ID NO: 2361

SEQ ID NO: 2382 - DNA, 201 bp, Homo sapiens; identical to SEQ ID NO: 2362

SEQ ID NO: 2383 - DNA, 201 bp, Homo sapiens
gaagatgaagaagaggaggatgtgaaactcttaagtatatctggaaagcagtctgcccctggaggtgggcagaaaaaagtaaaacttgctgctgctgctgmtgatgatgatgatgaagatgatgatgatgatgatgacgaggaagctgaagaaaaagcgccagtgaagaaatctatacgagatactccagccaaaaatgca

SEQ ID NO: 2384 - DNA, 201 bp, Homo sapiens; identical to SEQ ID NO: 2364

SEQ ID NO: 2385 - DNA, 201 bp, Homo sapiens
aggtgcagagtcagaagatgaagaagaggaggatgtgaaactcttaagtatatctggaaagcagtctgcccctggaggtgggcagaaaaaagtaaaacttbctgctgctgctgctgatgatgatgatgaagatgatgatgatgatgatgacgaggaagctgaagaaaaagcgccagtgaagaaatctatacgagatactcc

SEQ ID NO: 2386 - DNA, 201 bp, Homo sapiens; identical to SEQ ID NO: 2365

SEQ ID NO: 2387 - DNA, 180 bp, Homo sapiens
cactcatagaaactggaggcaaaatgcatgacagtaacaatgtggagaaagacattacaccatctgaattgcctgcaaasccaggttgtctgcattcaaaagagcattctattaaagctaccttaatttggcgcttatttttcttaatcatgtttctgacaatcatagtgtgtggaatgg

SEQ ID NO: 2388 - DNA, 201 bp, Homo sapiens; identical to SEQ ID NO: 2366

SEQ ID NO: 2389 - DNA, 201 bp, Homo sapiens; identical to SEQ ID NO: 2367

SEQ ID NO: 2390 - DNA, 201 bp, Homo sapiens; identical to SEQ ID NO: 2368

SEQ ID NO: 2391 - DNA, 201 bp, Homo sapiens; identical to SEQ ID NO: 2369

SEQ ID NO: 2392 - DNA, 201 bp, Homo sapiens; identical to SEQ ID NO: 2370

SEQ ID NO: 2393 - DNA, 201 bp, Homo sapiens; identical to SEQ ID NO: 2358

SEQ ID NO: 2394 - DNA, 201 bp, Homo sapiens; identical to SEQ ID NO: 2372

SEQ ID NO: 2395 - DNA, 201 bp, Homo sapiens; identical to SEQ ID NO: 2373

SEQ ID NO: 2396 - DNA, 201 bp, Homo sapiens
gatgaagaagaggaggatgtgaaactcttaagtatatctggaaagcagtctgcccctggaggtgggcagaaaaaagtaaaacttgctgctgctgctgctgmtgatgatgatgaagatgatgatgatgatgatgacgaggaagctgaagaaaaagcgccagtgaagaaatctatacgagatactccagccaaaaatgcacaa

SEQ ID NO: 2397 - DNA, 201 bp, Homo sapiens
aggatgtgaaactcttaagtatatctggaaagcagtctgcccctggaggtgggcagaaaaaagtaaaacttgctgctgctgctgctgatgatgatgatgawgatgatgatgatgatgatgacgaggaagctgaagaaaaagcgccagtgaagaaatctatacgagatactccagccaaaaatgcacaaaagtcaaatcaga

SEQ ID NO: 2398 - DNA, 201 bp, Homo sapiens; identical to SEQ ID NO: 2376

SEQ ID NO: 2399 - DNA, 201 bp, Homo sapiens
aggaggatgtgaaactcttaagtatatctggaaagcagtctgcccctggaggtgggcagaaaaaagtaaaacttgctgctgctgctgctgatgatgatgawgaagatgatgatgatgatgatgacgaggaagctgaagaaaaagcgccagtgaagaaatctatacgagatactccagccaaaaatgcacaaaagtcaaatc

SEQ ID NO: 2400 - DNA, 201 bp, Homo sapiens; identical to SEQ ID NO: 2378

SEQ ID NO: 2401 - DNA, 190 bp, Homo sapiens
cactcatagaaactggaggcaaaatgcatgacagtaacaatgtggagaaagacattacaccatctgaattgcctgcaaacccaggttgtstgcattcaaaagagcattctattaaagctaccttaatttggcgcttatttttcttaatcatgtttctgacaatcatagtgtgtggaatggttgctgcttt

SEQ ID NO: 2402 - DNA, 201 bp, Homo sapiens; identical to SEQ ID NO: 2380

SEQ ID NO: 2403 - DNA, 201 bp, Homo sapiens; identical to SEQ ID NO: 2361

SEQ ID NO: 2404 - DNA, 201 bp, Homo sapiens; identical to SEQ ID NO: 2362

SEQ ID NO: 2405 - DNA, 201 bp, Homo sapiens; identical to SEQ ID NO: 2364

SEQ ID NO: 2406 - DNA, 201 bp, Homo sapiens
acttagtagctgtgaaggaaggtgcagagtcagaagatgaagaagaggaggatgtgaaactcttaagtatatctggaaagcagtctgcccctggaggtggmgatgatgatgatgaagatgatgatgatgatgatgacgaggaagctgaagaaaaagcgccagtgaagaaatctatacgagatactccagccaaaaatgcac

SEQ ID NO: 2407 - DNA, 201 bp, Homo sapiens; identical to SEQ ID NO: 2365

SEQ ID NO: 2408 - DNA, 201 bp, Homo sapiens; identical to SEQ ID NO: 2366

SEQ ID NO: 2409 - DNA, 201 bp, Homo sapiens; identical to SEQ ID NO: 2367

SEQ ID NO: 2410 - DNA, 201 bp, Homo sapiens; identical to SEQ ID NO: 2368

SEQ ID NO: 2411 - DNA, 201 bp, Homo sapiens; identical to SEQ ID NO: 2369

SEQ ID NO: 2412 - DNA, 201 bp, Homo sapiens; identical to SEQ ID NO: 2370

SEQ ID NO: 2413 - DNA, 201 bp, Homo sapiens; identical to SEQ ID NO: 2358

SEQ ID NO: 2414 - DNA, 201 bp, Homo sapiens; identical to SEQ ID NO: 2372

SEQ ID NO: 2415 - DNA, 201 bp, Homo sapiens; identical to SEQ ID NO: 2373

SEQ ID NO: 2416 - DNA, 201 bp, Homo sapiens
ttagtagctgtgaaggaaggtgcagagtcagaagatgaagaagaggaggatgtgaaactcttaagtatatctggaaagcagtctgcccctggaggtggtgmtgatgatgatgaagatgatgatgatgatgatgacgaggaagctgaagaaaaagcgccagtgaagaaatctatacgagatactccagccaaaaatgcacaa

SEQ ID NO: 2417 - DNA, 201 bp, Homo sapiens
aggaaggtgcagagtcagaagatgaagaagaggaggatgtgaaactcttaagtatatctggaaagcagtctgcccctggaggtggtgatgatgatgatgawgatgatgatgatgatgatgacgaggaagctgaagaaaaagcgccagtgaagaaatctatacgagatactccagccaaaaatgcacaaaagtcaaatcaga

SEQ ID NO: 2418 - DNA, 201 bp, Homo sapiens; identical to SEQ ID NO: 2376

SEQ ID NO: 2419 - DNA, 201 bp, Homo sapiens
tgaaggaaggtgcagagtcagaagatgaagaagaggaggatgtgaaactcttaagtatatctggaaagcagtctgcccctggaggtggtgatgatgatgawgaagatgatgatgatgatgatgacgaggaagctgaagaaaaagcgccagtgaagaaatctatacgagatactccagccaaaaatgcacaaaagtcaaatc

SEQ ID NO: 2420 - DNA, 201 bp, Homo sapiens; identical to SEQ ID NO: 2378

SEQ ID NO: 2421 - DNA, 201 bp, Homo sapiens; identical to SEQ ID NO: 2359

SEQ ID NO: 2422 - DNA, 201 bp, Homo sapiens; identical to SEQ ID NO: 2380

SEQ ID NO: 2423 - DNA, 201 bp, Homo sapiens; identical to SEQ ID NO: 2361

SEQ ID NO: 2424 - DNA, 201 bp, Homo sapiens; identical to SEQ ID NO: 2362

SEQ ID NO: 2425 - DNA, 201 bp, Homo sapiens
tattagtggacagcacttagtagctgtgaaggaaggtgcagagtcagaagatgaagaagaggaggatgtgaaactcttaagtatatctggaaagctgctgmtgatgatgatgatgaagatgatgatgatgatgatgacgaggaagctgaagaaaaagcgccagtgaagaaatctatacgagatactccagccaaaaatgca

SEQ ID NO: 2426 - DNA, 201 bp, Homo sapiens; identical to SEQ ID NO: 2364

SEQ ID NO: 2427 - DNA, 201 bp, Homo sapiens; identical to SEQ ID NO: 2365

SEQ ID NO: 2428 - DNA, 201 bp, Homo sapiens; identical to SEQ ID NO: 2366

SEQ ID NO: 2429 - DNA, 201 bp, Homo sapiens; identical to SEQ ID NO: 2367

SEQ ID NO: 2430 - DNA, 201 bp, Homo sapiens; identical to SEQ ID NO: 2368

SEQ ID NO: 2431 - DNA, 201 bp, Homo sapiens; identical to SEQ ID NO: 2370

SEQ ID NO: 2432 - DNA, 201 bp, Homo sapiens; identical to SEQ ID NO: 2369

SEQ ID NO: 2433 - DNA, 201 bp, Homo sapiens; identical to SEQ ID NO: 2358

SEQ ID NO: 2434 - DNA, 201 bp, Homo sapiens; identical to SEQ ID NO: 2372

SEQ ID NO: 2435 - DNA, 201 bp, Homo sapiens
tagtggacagcacttagtagctgtgaaggaaggtgcagagtcagaagatgaagaagaggaggatgtgaaactcttaagtatatctggaaagctgctgctgmtgatgatgatgaagatgatgatgatgatgatgacgaggaagctgaagaaaaagcgccagtgaagaaatctatacgagatactccagccaaaaatgcacaa

SEQ ID NO: 2436 - DNA, 201 bp, Homo sapiens; identical to SEQ ID NO: 2373

SEQ ID NO: 2437 - DNA, 201 bp, Homo sapiens
ttagtagctgtgaaggaaggtgcagagtcagaagatgaagaagaggaggatgtgaaactcttaagtatatctggaaagctgctgctgatgatgatgatgawgatgatgatgatgatgatgacgaggaagctgaagaaaaagcgccagtgaagaaatctatacgagatactccagccaaaaatgcacaaaagtcaaatcaga

SEQ ID NO: 2438 - DNA, 201 bp, Homo sapiens; identical to SEQ ID NO: 2376

SEQ ID NO: 2439 - DNA, 201 bp, Homo sapiens
cacttagtagctgtgaaggaaggtgcagagtcagaagatgaagaagaggaggatgtgaaactcttaagtatatctggaaagctgctgctgatgatgatgawgaagatgatgatgatgatgatgacgaggaagctgaagaaaaagcgccagtgaagaaatctatacgagatactccagccaaaaatgcacaaaagtcaaatc

SEQ ID NO: 2440 - DNA, 201 bp, Homo sapiens; identical to SEQ ID NO: 2378

SEQ ID NO: 2441 - DNA, 201 bp, Homo sapiens; identical to SEQ ID NO: 2359

SEQ ID NO: 2442 - DNA, 201 bp, Homo sapiens; identical to SEQ ID NO: 2380

SEQ ID NO: 2443 - DNA, 201 bp, Homo sapiens; identical to SEQ ID NO: 2361

SEQ ID NO: 2444 - DNA, 201 bp, Homo sapiens; identical to SEQ ID NO: 2362

SEQ ID NO: 2445 - DNA, 201 bp, Homo sapiens; identical to SEQ ID NO: 2364

SEQ ID NO: 2446 - DNA, 201 bp, Homo sapiens; identical to SEQ ID NO: 2406

SEQ ID NO: 2447 - DNA, 201 bp, Homo sapiens; identical to SEQ ID NO: 2365

SEQ ID NO: 2448 - DNA, 201 bp, Homo sapiens; identical to SEQ ID NO: 2366

SEQ ID NO: 2449 - DNA, 201 bp, Homo sapiens; identical to SEQ ID NO: 2367

SEQ ID NO: 2450 - DNA, 201 bp, Homo sapiens; identical to SEQ ID NO: 2368

SEQ ID NO: 2451 - DNA, 201 bp, Homo sapiens; identical to SEQ ID NO: 2369

SEQ ID NO: 2452 - DNA, 201 bp, Homo sapiens; identical to SEQ ID NO: 2370

SEQ ID NO: 2453 - DNA, 201 bp, Homo sapiens; identical to SEQ ID NO: 2372

SEQ ID NO: 2454 - DNA, 201 bp, Homo sapiens; identical to SEQ ID NO: 2373

SEQ ID NO: 2455 - DNA, 201 bp, Homo sapiens; identical to SEQ ID NO: 2416

SEQ ID NO: 2456 - DNA, 201 bp, Homo sapiens; identical to SEQ ID NO: 2417

SEQ ID NO: 2457 - DNA, 201 bp, Homo sapiens; identical to SEQ ID NO: 2376

SEQ ID NO: 2458 - DNA, 201 bp, Homo sapiens; identical to SEQ ID NO: 2419

SEQ ID NO: 2459 - DNA, 201 bp, Homo sapiens; identical to SEQ ID NO: 2378

SEQ ID NO: 2460 - DNA, 201 bp, Homo sapiens; identical to SEQ ID NO: 2380

SEQ ID NO: 2461 - DNA, 201 bp, Homo sapiens; identical to SEQ ID NO: 2361

SEQ ID NO: 2462 - DNA, 201 bp, Homo sapiens; identical to SEQ ID NO: 2362

SEQ ID NO: 2463 - DNA, 201 bp, Homo sapiens; identical to SEQ ID NO: 2383

SEQ ID NO: 2464 - DNA, 201 bp, Homo sapiens; identical to SEQ ID NO: 2364

SEQ ID NO: 2465 - DNA, 201 bp, Homo sapiens; identical to SEQ ID NO: 2385

SEQ ID NO: 2466 - DNA, 201 bp, Homo sapiens; identical to SEQ ID NO: 2365

SEQ ID NO: 2467 - DNA, 201 bp, Homo sapiens; identical to SEQ ID NO: 2366

SEQ ID NO: 2468 - DNA, 201 bp, Homo sapiens; identical to SEQ ID NO: 2367

SEQ ID NO: 2469 - DNA, 201 bp, Homo sapiens; identical to SEQ ID NO: 2368

SEQ ID NO: 2470 - DNA, 201 bp, Homo sapiens; identical to SEQ ID NO: 2369

SEQ ID NO: 2471 - DNA, 201 bp, Homo sapiens; identical to SEQ ID NO: 2370

SEQ ID NO: 2472 - DNA, 201 bp, Homo sapiens; identical to SEQ ID NO: 2358

SEQ ID NO: 2473 - DNA, 201 bp, Homo sapiens; identical to SEQ ID NO: 2372

SEQ ID NO: 2474 - DNA, 201 bp, Homo sapiens; identical to SEQ ID NO: 2373

SEQ ID NO: 2475 - DNA, 201 bp, Homo sapiens; identical to SEQ ID NO: 2396

SEQ ID NO: 2476 - DNA, 201 bp, Homo sapiens; identical to SEQ ID NO: 2397

SEQ ID NO: 2477 - DNA, 201 bp, Homo sapiens; identical to SEQ ID NO: 2376

SEQ ID NO: 2478 - DNA, 201 bp, Homo sapiens; identical to SEQ ID NO: 2399

SEQ ID NO: 2479 - DNA, 201 bp, Homo sapiens; identical to SEQ ID NO: 2378

SEQ ID NO: 2480 - DNA, 201 bp, Homo sapiens; identical to SEQ ID NO: 2359

SEQ ID NO: 2481 - DNA, 201 bp, Homo sapiens; identical to SEQ ID NO: 2380

SEQ ID NO: 2482 - DNA, 201 bp, Homo sapiens; identical to SEQ ID NO: 2361

SEQ ID NO: 2483 - DNA, 201 bp, Homo sapiens; identical to SEQ ID NO: 2362

SEQ ID NO: 2484 - DNA, 201 bp, Homo sapiens; identical to SEQ ID NO: 2364

SEQ ID NO: 2485 - DNA, 201 bp, Homo sapiens; identical to SEQ ID NO: 2365

SEQ ID NO: 2486 - DNA, 180 bp, Homo sapiens; identical to SEQ ID NO: 2387

SEQ ID NO: 2487 - DNA, 201 bp, Homo sapiens; identical to SEQ ID NO: 2366

SEQ ID NO: 2488 - DNA, 201 bp, Homo sapiens; identical to SEQ ID NO: 2367

SEQ ID NO: 2489 - DNA, 201 bp, Homo sapiens; identical to SEQ ID NO: 2368

SEQ ID NO: 2490 - DNA, 201 bp, Homo sapiens; identical to SEQ ID NO: 2369

SEQ ID NO: 2491 - DNA, 201 bp, Homo sapiens; identical to SEQ ID NO: 2358

SEQ ID NO: 2492 - DNA, 201 bp, Homo sapiens; identical to SEQ ID NO: 2372

SEQ ID NO: 2493 - DNA, 201 bp, Homo sapiens
gtagctgtgaaggaaggtgcagagtcagaagatgaagaagaggaggatgtgaaactcttaagtatatctggaaagcagtctgcccctggaggtgggcatgmtgatgatgatgaagatgatgatgatgatgatgacgaggaagctgaagaaaaagcgccagtgaagaaatctatacgagatactccagccaaaaatgcacaa

SEQ ID NO: 2494 - DNA, 201 bp, Homo sapiens; identical to SEQ ID NO: 2373

SEQ ID NO: 2495 - DNA, 201 bp, Homo sapiens
aaggtgcagagtcagaagatgaagaagaggaggatgtgaaactcttaagtatatctggaaagcagtctgcccctggaggtgggcatgatgatgatgatgawgatgatgatgatgatgatgacgaggaagctgaagaaaaagcgccagtgaagaaatctatacgagatactccagccaaaaatgcacaaaagtcaaatcaga

SEQ ID NO: 2496 - DNA, 201 bp, Homo sapiens; identical to SEQ ID NO: 2376

SEQ ID NO: 2497 - DNA, 201 bp, Homo sapiens
aggaaggtgcagagtcagaagatgaagaagaggaggatgtgaaactcttaagtatatctggaaagcagtctgcccctggaggtgggcatgatgatgatgawgaagatgatgatgatgatgatgacgaggaagctgaagaaaaagcgccagtgaagaaatctatacgagatactccagccaaaaatgcacaaaagtcaaatc

SEQ ID NO: 2498 - DNA, 201 bp, Homo sapiens; identical to SEQ ID NO: 2378

SEQ ID NO: 2499 - DNA, 190 bp, Homo sapiens; identical to SEQ ID NO: 2401

SEQ ID NO: 2500 - DNA, 201 bp, Homo sapiens; identical to SEQ ID NO: 2380

SEQ ID NO: 2501 - DNA, 201 bp, Homo sapiens; identical to SEQ ID NO: 2361

SEQ ID NO: 2502 - DNA, 201 bp, Homo sapiens; identical to SEQ ID NO: 2362

SEQ ID NO: 2503 - DNA, 201 bp, Homo sapiens; identical to SEQ ID NO: 2383

SEQ ID NO: 2504 - DNA, 201 bp, Homo sapiens; identical to SEQ ID NO: 2364

SEQ ID NO: 2505 - DNA, 201 bp, Homo sapiens; identical to SEQ ID NO: 2385

SEQ ID NO: 2506 - DNA, 201 bp, Homo sapiens; identical to SEQ ID NO: 2365

SEQ ID NO: 2507 - DNA, 201 bp, Homo sapiens; identical to SEQ ID NO: 2366

SEQ ID NO: 2508 - DNA, 201 bp, Homo sapiens; identical to SEQ ID NO: 2367

SEQ ID NO: 2509 - DNA, 201 bp, Homo sapiens; identical to SEQ ID NO: 2368

SEQ ID NO: 2510 - DNA, 201 bp, Homo sapiens; identical to SEQ ID NO: 2369

SEQ ID NO: 2511 - DNA, 201 bp, Homo sapiens; identical to SEQ ID NO: 2370

SEQ ID NO: 2512 - DNA, 201 bp, Homo sapiens; identical to SEQ ID NO: 2358

SEQ ID NO: 2513 - DNA, 201 bp, Homo sapiens; identical to SEQ ID NO: 2372

SEQ ID NO: 2514 - DNA, 201 bp, Homo sapiens; identical to SEQ ID NO: 2373

SEQ ID NO: 2515 - DNA, 201 bp, Homo sapiens; identical to SEQ ID NO: 2396

SEQ ID NO: 2516 - DNA, 201 bp, Homo sapiens; identical to SEQ ID NO: 2397

SEQ ID NO: 2517 - DNA, 201 bp, Homo sapiens; identical to SEQ ID NO: 2376

SEQ ID NO: 2518 - DNA, 201 bp, Homo sapiens; identical to SEQ ID NO: 2399

SEQ ID NO: 2519 - DNA, 201 bp, Homo sapiens; identical to SEQ ID NO: 2378

SEQ ID NO: 2520 - DNA, 201 bp, Homo sapiens; identical to SEQ ID NO: 2359

SEQ ID NO: 2521 - DNA, 145 bp, Homo sapiens
attttctaatctgcattttctactcaagttttattttaaaaacagtatttttttttcctttgaatacttggcctgttaagaatttcagctttcactctatsaagatttaaatgattctttatttcaataaactttaacaaacaat

SEQ ID NO: 2522 - DNA, 201 bp, Homo sapiens
gtgaaagcttatcgacagatggccctactaagttctgcttttgcatttggttggagcaagtggaacctactatgtaattctacaaaagtcgtatttaaggkgagggaacaccttactgaagaatgtactgagaatcctaattgggcccttttaatgtttagtggtgacagagcacaaagactgaagatcaaggaagagagt

SEQ ID NO: 2523 - DNA, 127 bp, Homo sapiens
ggcctgtcgtccgggcaacccgggagmgtttgtccacacaatttctgctccgactctgcggactactgcagtggagcttgactcttaatgtctggcagtaagaaaaagaaagtcaccaaagctgaac

SEQ ID NO: 2524 - DNA, 201 bp, Homo sapiens
tatcgacagatggccctactaagttctgcttttgcatttggttggagcaagtggaacctactatgtaattctacaaaagtcgtatttaaggtgagggaacmccttactgaagaatgtactgagaatcctaattgggcccttttaatgtttagtggtgacagagcacaaagactgaagatcaaggaagagagtgaggcattt

SEQ ID NO: 2525 - DNA, 201 bp, Homo sapiens
ccactacatcttgaaaatattaggagtaattttaagggcttaaaaatacagtgatctattcactgagaaaaaaattatttttggttctttagaggaagccmgtttgaaatatgagaaagaagaaatggaaaggcttgaaatacagcgaattgagaaagaaaaatggcatcgacttgaagcaaaagatctagaaaggagaaa

SEQ ID NO: 2526 - DNA, 201 bp, Homo sapiens
gattcaaatacaaattaaggaaaacctctgcatgttatcttcaatcaaactaaaagacaagaaacacatctctattttggaaggaacctggatgactcctrttcctttcattattgctttgaaagaagctggactgaatatctttcctactagacactctcatttttatgttattataaacaataaggttcctttggtaga

SEQ ID NO: 2527 - DNA, 201 bp, Homo sapiens
taccttgattcaagatgctcatattaacatgccgtaccagtcatgggaactaagaccacttgatgtaaataaagtacttttaactgtgactacagtatttrctgagattcaaatacaaattaaggaaaacctctgcatgttatcttcaatcaaactaaaagacaagaaacacatctctattttggaaggaacctggatgac

SEQ ID NO: 2528 - DNA, 145 bp, Homo sapiens; identical to SEQ ID NO: 2521

SEQ ID NO: 2529 - DNA, 201 bp, Homo sapiens; identical to SEQ ID NO: 2522

SEQ ID NO: 2530 - DNA, 201 bp, Homo sapiens; identical to SEQ ID NO: 2524

SEQ ID NO: 2531 - DNA, 201 bp, Homo sapiens; identical to SEQ ID NO: 2526

SEQ ID NO: 2532 - DNA, 201 bp, Homo sapiens; identical to SEQ ID NO: 2527

SEQ ID NO: 2533 - DNA, 170 bp, Homo sapiens
gtatttgaaaagatgtgtttttcaagtaacttgcatgttaatagccttttttatgatgtggcctttgttmagtctggcagtaagaaaaagaaagtcaccaaagctgaacgattgaagctgctacaagaggaggaggagagacgactgaaagaggaagaggaagcccgttt

SEQ ID NO: 2534 - DNA, 196 bp, Homo sapiens
tgttaagtctggcagtaagaaaaagaaagtcaccaaagctgaacgattgaagctgctacaagaggaggaggagagacgactgaaagaggaagaggaagccmgtttgaaatatgagaaagaagaaatggaaaggcttgaaatacagcgaattgagaaagaaaaatggcatcgacttgaagcaaaagtaaataaacat

SEQ ID NO: 2535 - DNA, 201 bp, Homo sapiens
cactgccttctagccgtcctccaccttgcagaaagaatctagcctttggtctctctctctctcatcggggtcatttgctattcccctctgatattcaaccmtatagaaggagcctggactctgatccctctgtacaggctggatggaaggggccctccacacttcctgggaggtcagagacaaactgtttcagagagtcag

SEQ ID NO: 2536 - DNA, 201 bp, Homo sapiens
ctcctctaggcaggggagtgatgcttcaggacgtgacaggctgttctaacatgtgtctacctgagggctagttgaaggatccaggagtattttcttcttgrgtgggccctgaacaaagccaaaaattgtagaaaccagtctagaaaaagtcctgctcatctgtggccactgccttctagccgtcctccaccttgcagaaag

SEQ ID NO: 2537 - DNA, 201 bp, Homo sapiens
gtctccctgcctcactcctctaggcaggggagtgatgcttcaggacgtgacaggctgttctaacatgtgtctacctgagggctagttgaaggatccaggartattttcttcttgggtgggccctgaacaaagccaaaaattgtagaaaccagtctagaaaaagtcctgctcatctgtggccactgccttctagccgtcctc

SEQ ID NO: 2538 - DNA, 201 bp, Homo sapiens
cagcttcccagcccaacgcttctgtgcaccagttccctgtgccggtgcgatcgccacagcagctgctacttcaaggcagttcccgggactcttgtaatgamtctatgcaaagttatgaccttgattatccagagcggcgggctatcagccccaccagcagcagtaggtatggctcctcctgtaatgtgagtcaaggaagct

SEQ ID NO: 2539 - DNA, 201 bp, Homo sapiens
cgtggtttgagcagttcgtgctacaatggctggatgagaatgaggatgtatccctggaattcctgcgtggggccctggaacgagataagaaggatggattscagcagacatcagagcatgcactcttttcctgctctgtggtggatgtcttcacacaactcaatcagagctttgagatcatccggaagctggaatgcccag

SEQ ID NO: 2540 - DNA, 201 bp, Homo sapiens
gcatgcgctgcagcgaatgtggagtcaagtgccatgagaagtgccaggatctgctcaatgctgactgcctgcagcgggctgcagaaaagagctgtaaacayggagctgaggaccggacccagaacattatcatggccatgaaggaccgcatgaagatccgagagcgaaataagccagagatctttgaagttatccgggacg

SEQ ID NO: 2541 - DNA, 201 bp, Homo sapiens
aaacttgaatcctgtttgggaggagaagttccattttgagtgccacaactcctctgaccgcattaaggtgcgtgtatgggatgaggatgatgacatcaagkcaagagtaaagcaacgcctaaagcgagagtctgatgatttccttggccaaaccatcattgaggttcggaccctaagtggcgagatggacgtctggtacaa

SEQ ID NO: 2542 - DNA, 201 bp, Homo sapiens
ttaaggacgaagagctgaaatcccacgtgtataagaaaaccctgcaggccttaatctaccccatttcgtgcaccactcctcataactttgaggtctggacrgccactaccccaacctactgctatgagtgtgaaggcctgctctggggcattgcccggcagggcatgcgctgcagcgaatgtggagtcaagtgccatgaga

SEQ ID NO: 2543 - DNA, 201 bp, Homo sapiens
atcaggccatgacgcactttgcatgtttatcatccaagtacatgtgtcctggtgtgccagcagtgatgagcaccttactggccaacatcaacgcctactaygcccacacaactgcctctaccaatgtctctgcatctgatcgctttgcagcctccaactttgggaaagagagatttgtaaaactgctggaccagctacaca

SEQ ID NO: 2544 - DNA, 201 bp, Homo sapiens
aagctgcagacagtctgaaggagctgcaggtgaaactgaatacggttctggatgagctcagcatggtgtttggaaacagtttccaggtacggattgatgaktgtgttcgacaaatggccgacatcctgggccaggttcggggcacagggaatgcatctccagacgccagggcctcagcggctcaggatgcagatagcgtac

SEQ ID NO: 2545 - DNA, 201 bp, Homo sapiens
agttagacacatacataccaatcattagaagaacaagtttagaaggtgtggaacttgtgcctggctggctgggtagtcagctgagcctgttgctgagcccrgtggtctggattggagtatggccagggcaggagtacacagaatagaatttagactgtcccttgagtagaatccactgattttctgtggctccagtgagaa

SEQ ID NO: 2546 - DNA, 182 bp, Homo sapiens
atggagagggggcgtgttgagctggggtctccatgcctcgttggggagagggagctcacgtacccacagcagcagttgcgtsatgacgacgtgggcgagctcggccgccaggtggagtggggagcgcagctgtgggtcctctacgctggtgtcgagcggcccgtgtcgcgcatgggccaaaa

SEQ ID NO: 2547 - DNA, 201 bp, Homo sapiens
gccttcagaaactcaaacacctgaaccttggcatgaacaggctgaacactttgccacgaggcttcggctccctgccagctcttgaggttctggacttgacktacaacaacttgagcgaaaattctcttcctggaaacttcttctacctgaccaccctgcgtgcactctatctaagtgacaacgattttgaaatcctgccgc

SEQ ID NO: 2548 - DNA, 201 bp, Homo sapiens
cactctatctaagtgacaacgattttgaaatcctgccgccagatattgggaagctcacaaagttgcagatactcagccttagggataacgacctgatctcrctgcctaaggaaatcggggagcttacccagcttaaagagctccacattcaggggaaccgcctcaccgttctgcccccagaactaggaaacttggatttaa

SEQ ID NO: 2549 - DNA, 201 bp, Homo sapiens
aaaccatttccatttgtttctttaacattaccaaaagcagggaacaaagctcttattcaactgcgaattccatagtgggctctggcttttcttgaatagayatcacaaggttgcttattatcaaaagaataattaaaatcatgtaaccatttaaatgtcactgttaacacttttcactctttctgttgattcacctaactc

SEQ ID NO: 2550 - DNA, 201 bp, Homo sapiens
gggcgccgagacagggcgtgttcgctgttcagtgccggtgttgcagggagtgagggcagctggagtgcgttctgccgaagcttgtggttgcacgcccatcstcttaggggctaccttccgtgaccatgtccaagtctctgaagaagttggtggaggagagccgggagaagaaccagcccgaggtggacatgagtgaccggg

SEQ ID NO: 2551 - DNA, 201 bp, Homo sapiens
ctctcaaataaacccaatgctgcgtgtgaggccttttttatttttcttttcactctctttctaatgcttcccaccttaccttttagattcttttgctaggkgggagattgttataaggtctttaaaccatttccatttgtttctttaacattaccaaaagcagggaacaaagctcttattcaactgcgaattccatagtgg

SEQ ID NO: 2552 - DNA, 201 bp, Homo sapiens
gctgttctcctaatatgggtagggtcgggcgtggagctggcagcggcgctgtgtgcgcctgcgcggggcgccgagacagggcgtgttcgctgttcagtgcsggtgttgcagggagtgagggcagctggagtgcgttctgccgaagcttgtggttgcacgcccatcgtcttaggggctaccttccgtgaccatgtccaagtc

SEQ ID NO: 2553 - DNA, 201 bp, Homo sapiens; identical to SEQ ID NO: 2547

SEQ ID NO: 2554 - DNA, 201 bp, Homo sapiens; identical to SEQ ID NO: 2548

SEQ ID NO: 2555 - DNA, 201 bp, Homo sapiens; identical to SEQ ID NO: 2549

SEQ ID NO: 2556 - DNA, 193 bp, Homo sapiens
agacagggcgtgttcgctgttcagtgccggtgttgcagggagtgagggcagctggagtgcgttctgccgaagcttgtggttgcacgcccatcstcttaggggctaccttccgtggtgagtgtgtgcggtgttgcacttggggttgcttctcgctgcgtggccgcagcggggctgaacccttcccactccatcc

SEQ ID NO: 2557 - DNA, 201 bp, Homo sapiens; identical to SEQ ID NO: 2551

SEQ ID NO: 2558 - DNA, 128 bp, Homo sapiens
agacagggcgtgttcgctgttcagtgcsggtgttgcagggagtgagggcagctggagtgcgttctgccgaagcttgtggttgcacgcccatcgtcttaggggctaccttccgtggtgagtgtgtgcgg

SEQ ID NO: 2559 - DNA, 201 bp, Homo sapiens
cctggaagtcggggagcagcacccctgcccccggtggaggggttgttgctttctggggaggaggacggttgacggccctgcttggatccaccaccaggacrctgtgctcggccatggcgcgcctcccccaagggctcatctgtgcaacaaccacatgccaacaatagctccaggtgcctcagccccgtgccctgacccggg

SEQ ID NO: 2560 - DNA, 201 bp, Homo sapiens
aggaagaagccagtggccctggggtggaccctgccctttggacatcccatggacttgtcacccagtcgcctggaagtcggggagcagcacccctgcccccrgtggaggggttgttgctttctggggaggaggacggttgacggccctgcttggatccaccaccaggacgctgtgctcggccatggcgcgcctcccccaagg

SEQ ID NO: 2561 - DNA, 201 bp, Homo sapiens
cctcctgccgcctccgccagccctccctcccacactgccccagcagggctggcccggagactgggcagctaagtgggcgcatcctgtcttcagctggcctsactgacaccccggcctccctggggacattgttcataaccatgactaatctgtgtgtgctgtagtgaccagcggctcctaacgtgtctgtgtgatgaccag

SEQ ID NO: 2562 - DNA, 201 bp, Homo sapiens
acccgccgccgccgcagccaccgccgccgccgccccagcggggaacagaccagtccaccatgcctgaagtcaaagacctctcagaagccttgccagaaacrtcaatggatcccatcacgggagtcggggtggtggcttctcggaaccgagccccgacaggctatgacgtagttgcacagacagcagatggtgtggatgctg

SEQ ID NO: 2563 - DNA, 201 bp, Homo sapiens
caccaggtgtcagcagatcccgcagtcctgaggagccagcggccacctgcggggagaccaccgccgcccagactactgacggcaggggctgctgcccccgmctcctcctgccgcctccgccagccctccctcccacactgccccagcagggctggcccggagactgggcagctaagtgggcgcatcctgtcttcagctggc

SEQ ID NO: 2564 - DNA, 201 bp, Homo sapiens
cgtgtctgtgtgatgaccagttgtcctccaaaaacctcactcaccacggagtcaccctgagggccccgggcagttgccctggccgcccagtgacgcccacyggctccctccgctccctcctgtcacctaccagggcagaccccactaagccgttgagtctcttcctggaagaccctgagggccggcagctttgcctaggac

SEQ ID NO: 2565 - DNA, 201 bp, Homo sapiens
aaggacacactgcctgtgggcttcatcccaattcaggagacggtggacacacaggaagtggcttttaggaagaagaggctgtgcattaaatttattccackggattcaacggaagctgcgatttgtgacattcggatcatgggccggaccaagcaggccccgcctcagtacacgtttattggggaactgaacagcatgggg

SEQ ID NO: 2566 - DNA, 201 bp, Homo sapiens
atgacgtagttgcacagacagcagatggtgtggatgctgacctctggaaagacggcttatttaaatccaaggttaccagatacctgtgtttcacaagatcrttttccaaagaaaatagtcatctggggaacgtgttagtagatatgaagctcattgacatcaaggacacactgcctgtgggcttcatcccaattcaggaga

SEQ ID NO: 2567 - DNA, 201 bp, Homo sapiens
agccctttgatctcctgggaatcaccatcaaatctctagcagaaatcgaaaaagagtacgagtacagcttccgcacagagcagagcgcagccgccaggctyccgcccagccccaccaggtgtcagcagatcccgcagtcctgaggagccagcggccacctgcggggagaccaccgccgcccagactactgacggcaggggc

SEQ ID NO: 2568 - DNA, 201 bp, Homo sapiens
aagttcctctctgcaggatctcacagcagccctgagaagacatgggaggaagaagccagtggccctggggtggaccctgccctttggacatcccatggacytgtcacccagtcgcctggaagtcggggagcagcacccctgcccccggtggaggggttgttgctttctggggaggaggacggttgacggccctgcttggat

SEQ ID NO: 2569 - DNA, 201 bp, Homo sapiens
tcccacactgccccagcagggctggcccggagactgggcagctaagtgggcgcatcctgtcttcagctggcctgactgacaccccggcctccctggggacrttgttcataaccatgactaatctgtgtgtgctgtagtgaccagcggctcctaacgtgtctgtgtgatgaccagttgtcctccaaaaacctcactcaccac

SEQ ID NO: 2570 - DNA, 201 bp, Homo sapiens
cctgtcttcagctggcctgactgacaccccggcctccctggggacattgttcataaccatgactaatctgtgtgtgctgtagtgaccagcggctcctaacstgtctgtgtgatgaccagttgtcctccaaaaacctcactcaccacggagtcaccctgagggccccgggcagttgccctggccgcccagtgacgcccaccg

SEQ ID NO: 2571 - DNA, 201 bp, Homo sapiens; identical to SEQ ID NO: 2559

SEQ ID NO: 2572 - DNA, 201 bp, Homo sapiens; identical to SEQ ID NO: 2560

SEQ ID NO: 2573 - DNA, 201 bp, Homo sapiens; identical to SEQ ID NO: 2561

SEQ ID NO: 2574 - DNA, 201 bp, Homo sapiens; identical to SEQ ID NO: 2562

SEQ ID NO: 2575 - DNA, 201 bp, Homo sapiens; identical to SEQ ID NO: 2563

SEQ ID NO: 2576 - DNA, 201 bp, Homo sapiens; identical to SEQ ID NO: 2564

SEQ ID NO: 2577 - DNA, 201 bp, Homo sapiens; identical to SEQ ID NO: 2565

SEQ ID NO: 2578 - DNA, 201 bp, Homo sapiens; identical to SEQ ID NO: 2566

SEQ ID NO: 2579 - DNA, 201 bp, Homo sapiens; identical to SEQ ID NO: 2567

SEQ ID NO: 2580 - DNA, 201 bp, Homo sapiens; identical to SEQ ID NO: 2568

SEQ ID NO: 2581 - DNA, 201 bp, Homo sapiens; identical to SEQ ID NO: 2569

SEQ ID NO: 2582 - DNA, 201 bp, Homo sapiens; identical to SEQ ID NO: 2570

SEQ ID NO: 2583 - DNA, 201 bp, Homo sapiens
caatttggaatggtttgtttgctacagggctcaatatggtagtcaaatgtttttcttttcatcctttttcttggaaatcaattttttaaaatatagtttgyttcttggctccctgttctgcatctcgctcaacagactgcctctgtcaccgggtccctccacccttgtctcctgtgcggccagcatcagagccatggcgac

SEQ ID NO: 2584 - DNA, 201 bp, Homo sapiens
ggcccagggaggaagcggggggtttgtcaggtgggctctcctggaggtcctcgagtggcaggggtgaggaggggattatctgaggcatctggagatgtatrtcctgtggtttcccctgcccctctgtttccgatgaggtgtacggatgagtgacctgcactaagaagtgagttgccacagtgaaaatgggttggtttttgt

SEQ ID NO: 2585 - DNA, 201 bp, Homo sapiens
tctgcatctcgctcaacagactgcctctgtcaccgggtccctccacccttgtctcctgtgcggccagcatcagagccatggcgacggaggagaagaagccygagaccgaggccgccagagcacagccaaccccttcgtcatccgccactcagagcaagcctacacctgtgaagccaaactatgctctaaagttcacccttg

SEQ ID NO: 2586 - DNA, 201 bp, Homo sapiens
gagggtggaaggtttctttggacaggaggtgctgaggctggctgcacctgctctctgaagacgccttcctctctaggttcattgttcagtgttgctgggggcggggaacgggggtggggaggttcttagttgcgaaggagccaagctcctgatggacttgcgttgggatgtgggggacacctgtggcatggtaaggctccc

SEQ ID NO: 2587 - DNA, 201 bp, Homo sapiens
gcgtagaccactgggtgcccgtgcttgtgttttcaaacgtggctgtgaacgtgattgcgtcacttggggtgcattttaggatttggatgtgatcccaaatktctacaccctgaagctcagtcttctgtcatttggcgtgttagctttctgtcaggaaaccttttgctgttctttttttaatgtgtccagggctctttgaag

SEQ ID NO: 2588 - DNA, 201 bp, Homo sapiens
gaccactgggtgcccgtgcttgtgttttcaaacgtggctgtgaacgtgattgcgtcacttggggtgcattttaggatttggatgtgatcccaaatttctayaccctgaagctcagtcttctgtcatttggcgtgttagctttctgtcaggaaaccttttgctgttctttttttaatgtgtccagggctctttgaagaaaac

SEQ ID NO: 2589 - DNA, 201 bp, Homo sapiens
taacagcagaggccgagcgggagcctctggggagcgaggctgaaacctgaacctgcccatggagacagttgtggtgagggttgccacacacagtgagggcrgagcagggtggctgagggcacaggtgcctgggtctgtcccacggggcagggctttggggctgtgatgctctgggaagccagcttgggtcctgggtctaca

SEQ ID NO: 2590 - DNA, 201 bp, Homo sapiens
taaaatatagtttgtttcttggctccctgttctgcatctcgctcaacagactgcctctgtcaccgggtccctccacccttgtctcctgtgcggccagcatyagagccatggcgacggaggagaagaagcccgagaccgaggccgccagagcacagccaaccccttcgtcatccgccactcagagcaagcctacacctgtga

SEQ ID NO: 2591 - DNA, 201 bp, Homo sapiens
gctgcccctcggactcctcgaggggttgggtgctaagcgcgagcctcgccgtccctgctggagccctcgcctgcctgcccctctgcctgtgctcctggcastgtggcttcccggtgctcacctgcacagcagttaacagcagaggccgagcgggagcctctggggagcgaggctgaaacctgaacctgcccatggagacag

SEQ ID NO: 2592 - DNA, 201 bp, Homo sapiens
cagtgttgctgggggcggggaacgggggtggggaggttcttagttgcgaaggagccaagctcctgatggacttgcgttgggatgtgggggacacctgtggyatggtaaggctccctgagtcccttactccaggtcagatgccagtgggactcatgcgccctatgagggctgcagggccagtgctgcccctcggactcctcg

SEQ ID NO: 2593 - DNA, 201 bp, Homo sapiens
tttaaaatatagtttgtttcttggctccctgttctgcatctcgctcaacagactgcctctgtcaccgggtccctccacccttgtctcctgtgcggccagcrtcagagccatggcgacggaggagaagaagcccgagaccgaggccgccagagcacagccaaccccttcgtcatccgccactcagagcaagcctacacctgt

SEQ ID NO: 2594 - DNA, 201 bp, Homo sapiens
gtgttagctttctgtcaggaaaccttttgctgttctttttttaatgtgtccagggctctttgaagaaaactgcattttgtttgcataaactgctgcattcytacagacttctggataacaaaataagaagcacgcttgagggtggggtctttcattatgatgacaaaaggggagagcgcaggggtgtcagcggagcagctg

SEQ ID NO: 2595 - DNA, 201 bp, Homo sapiens
atatagtttgtttcttggctccctgttctgcatctcgctcaacagactgcctctgtcaccgggtccctccacccttgtctcctgtgcggccagcatcagakccatggcgacggaggagaagaagcccgagaccgaggccgccagagcacagccaaccccttcgtcatccgccactcagagcaagcctacacctgtgaagcc

SEQ ID NO: 2596 - DNA, 201 bp, Homo sapiens
ataaaaggtggggttttgtgaatggttgtggcaagtgcgtccttgtgaagctcgtctccatgtggctttcttggagaaaggctcccctggggcaagagggyggaaggtttctttggacaggaggtgctgaggctggctgcacctgctctctgaagacgccttcctctctaggttcattgttcagtgttgctgggggcgggg

SEQ ID NO: 2597 - DNA, 201 bp, Homo sapiens
ttgtttgcataaactgctgcattcctacagacttctggataacaaaataagaagcacgcttgagggtggggtctttcattatgatgacaaaaggggagagmgcaggggtgtcagcggagcagctggaaagtattagcaaggacttaggggaattaatagggtcctcaatttggaatggtttgtttgctacagggctcaata

SEQ ID NO: 2598 - DNA, 201 bp, Homo sapiens
agactgtaataaaaggtggggttttgtgaatggttgtggcaagtgcgtccttgtgaagctcgtctccatgtggctttcttggagaaaggctcccctggggmaagagggtggaaggtttctttggacaggaggtgctgaggctggctgcacctgctctctgaagacgccttcctctctaggttcattgttcagtgttgctgg

SEQ ID NO: 2599 - DNA, 201 bp, Homo sapiens
cttctgtcatttggcgtgttagctttctgtcaggaaaccttttgctgttctttttttaatgtgtccagggctctttgaagaaaactgcattttgtttgcayaaactgctgcattcctacagacttctggataacaaaataagaagcacgcttgagggtggggtctttcattatgatgacaaaaggggagagcgcaggggtg

SEQ ID NO: 2600 - DNA, 201 bp, Homo sapiens
tggaggtggtcccccagatctgcgcctgggggtcaggacagggcctgatttgagcctcctctctgaagatgatttggccgagcggaaggtgtggaccaccrgaaagttcttaaaagttgctggtgacatttcttgccaattctaacactgtctagggaagagttcctagtctattgtgttcaaacagagtcaacaaaagtt

SEQ ID NO: 2601 - DNA, 201 bp, Homo sapiens
gtcacccaacagaaaacatcatcgcctctgctgcgctagaaaatgacaaaacaattaaactgtggaagagtgactgctaagtccctttgctcctgcccgcragagactgtcgggaagttgacccggattggcaagaaacagggtgtcttggaggtggtcccccagatctgcgcctgggggtcaggacagggcctgatttga

SEQ ID NO: 2602 - DNA, 201 bp, Homo sapiens
catgacccagtgcacgctgtggcctgtcaccgccaccgtggccccgccagctggcctcctggtctggttttgctgagtgcgtctccgtggggctgttcagyatcttcctgtctcctgtgttccctgtaacctggcagtggggtctatctgtgtcatttaggaaaacaagctgtgtggcacatcctggcacatcctgctctt

SEQ ID NO: 2603 - DNA, 201 bp, Homo sapiens
gagtggctggcaagttcatctaggttcattttaatcgtgatggatccttgatagtttcaagtagctatgatggtctctgtcgcatctgggacaccgcctcrggccagtgcctgaagacgctcatcgatgacgacaacccccccgtgtcttttgtgaagttctccccgaacggcaaatacatcctggccgccacgctggaca

SEQ ID NO: 2604 - DNA, 201 bp, Homo sapiens; identical to SEQ ID NO: 2600

SEQ ID NO: 2605 - DNA, 201 bp, Homo sapiens; identical to SEQ ID NO: 2601

SEQ ID NO: 2606 - DNA, 201 bp, Homo sapiens; identical to SEQ ID NO: 2583

SEQ ID NO: 2607 - DNA, 201 bp, Homo sapiens; identical to SEQ ID NO: 2602

SEQ ID NO: 2608 - DNA, 201 bp, Homo sapiens; identical to SEQ ID NO: 2585

SEQ ID NO: 2609 - DNA, 201 bp, Homo sapiens; identical to SEQ ID NO: 2587

SEQ ID NO: 2610 - DNA, 201 bp, Homo sapiens
atggagagtggctggcaagttcagttcattttaatcgtgatggatccttgatagtttcaagtagctatgatggtctctgtcgcatctgggacaccgcctcrggccagtgcctgaagacgctcatcgatgacgacaacccccccgtgtcttttgtgaagttctccccgaacggcaaatacatcctggccgccacgctggaca

SEQ ID NO: 2611 - DNA, 201 bp, Homo sapiens; identical to SEQ ID NO: 2588

SEQ ID NO: 2612 - DNA, 201 bp, Homo sapiens; identical to SEQ ID NO: 2590

SEQ ID NO: 2613 - DNA, 201 bp, Homo sapiens; identical to SEQ ID NO: 2594

SEQ ID NO: 2614 - DNA, 201 bp, Homo sapiens; identical to SEQ ID NO: 2593

SEQ ID NO: 2615 - DNA, 201 bp, Homo sapiens; identical to SEQ ID NO: 2595

SEQ ID NO: 2616 - DNA, 201 bp, Homo sapiens; identical to SEQ ID NO: 2597

SEQ ID NO: 2617 - DNA, 201 bp, Homo sapiens; identical to SEQ ID NO: 2599

SEQ ID NO: 2618 - DNA, 201 bp, Homo sapiens; identical to SEQ ID NO: 2600

SEQ ID NO: 2619 - DNA, 201 bp, Homo sapiens; identical to SEQ ID NO: 2601

SEQ ID NO: 2620 - DNA, 201 bp, Homo sapiens; identical to SEQ ID NO: 2584

SEQ ID NO: 2621 - DNA, 201 bp, Homo sapiens
cgagctgagtccgcgccagactgcctctgtcaccgggtccctccacccttgtctcctgtgcggccagcatcagagccatggcgacggaggagaagaagccygagaccgaggccgccagagcacagccaaccccttcgtcatccgccactcagagcaagcctacacctgtgaagccaaactatgctctaaagttcacccttg

SEQ ID NO: 2622 - DNA, 201 bp, Homo sapiens; identical to SEQ ID NO: 2586

SEQ ID NO: 2623 - DNA, 201 bp, Homo sapiens; identical to SEQ ID NO: 2589

SEQ ID NO: 2624 - DNA, 201 bp, Homo sapiens; identical to SEQ ID NO: 2591

SEQ ID NO: 2625 - DNA, 201 bp, Homo sapiens
gcctggcgcccgcccgagctgccgccttgtcgagctgagtccgcgccagactgcctctgtcaccgggtccctccacccttgtctcctgtgcggccagcatyagagccatggcgacggaggagaagaagcccgagaccgaggccgccagagcacagccaaccccttcgtcatccgccactcagagcaagcctacacctgtga

SEQ ID NO: 2626 - DNA, 201 bp, Homo sapiens; identical to SEQ ID NO: 2592

SEQ ID NO: 2627 - DNA, 201 bp, Homo sapiens
ccgcctggcgcccgcccgagctgccgccttgtcgagctgagtccgcgccagactgcctctgtcaccgggtccctccacccttgtctcctgtgcggccagcrtcagagccatggcgacggaggagaagaagcccgagaccgaggccgccagagcacagccaaccccttcgtcatccgccactcagagcaagcctacacctgt

SEQ ID NO: 2628 - DNA, 201 bp, Homo sapiens
ggcgcccgcccgagctgccgccttgtcgagctgagtccgcgccagactgcctctgtcaccgggtccctccacccttgtctcctgtgcggccagcatcagakccatggcgacggaggagaagaagcccgagaccgaggccgccagagcacagccaaccccttcgtcatccgccactcagagcaagcctacacctgtgaagcc

SEQ ID NO: 2629 - DNA, 201 bp, Homo sapiens; identical to SEQ ID NO: 2596

SEQ ID NO: 2630 - DNA, 201 bp, Homo sapiens; identical to SEQ ID NO: 2598

SEQ ID NO: 2631 - DNA, 201 bp, Homo sapiens; identical to SEQ ID NO: 2600

SEQ ID NO: 2632 - DNA, 201 bp, Homo sapiens; identical to SEQ ID NO: 2601

SEQ ID NO: 2633 - DNA, 201 bp, Homo sapiens
tccaaattccataatcaaggctgtttttggtaccaaaggtttctttttagaagataagaaaacgaagatagcttctaccaaaatctgcaacaataagataytctggttgatatgtagcgaatttatgtccttatgggctggatccaacaagaaaaatatgaatcagagtcgaatggatgtgtatatgtcacatgctcccac

SEQ ID NO: 2634 - DNA, 201 bp, Homo sapiens
tatgggcgaacacatgctaggagcacagcagatgcaggttatgatgtatggatgggaaacagtcggggaaacacttggtcaagaagacacaaaacactctyagagacagatgagaaattctgggcctttagttttgatgaaatggccaaatatgatctcccaggagtaatagacttcattgtaaataaaactggtcaggag

SEQ ID NO: 2635 - DNA, 201 bp, Homo sapiens
tgtatggttatgacaagaaaggaaacaatgcaaaccctgaagctaatatgaatattcatgccctgtttgcagacaatgcctactggcttgagaattatgcyaatggaagccttggattccttctagcagatgcaggttatgatgtatggatgggaaacagtcggggaaacacttggtcaagaagacacaaaacactctcag

SEQ ID NO: 2636 - DNA, 132 bp, Homo sapiens
gccaatggaagccttggattccttctagcagatgcaggttatgatgtatggatgggaaacagtcggggaaacacttggtcaagaagacacaaaacactctyagagacagatgagaaattctgggcctttagg

SEQ ID NO: 2637 - DNA, 201 bp, Homo sapiens
aaaacatgttccattggacccaggctgttaagtctgggaaattccaagcttatgactggggaagcccagttcagaataggatgcactatgatcagtcccarcctccctactacaatgtgacagccatgaatgtaccaattgcagtgtggaacggtggcaaggacctgttggctgacccccaagatgttggccttttgcttc

SEQ ID NO: 2638 - DNA, 201 bp, Homo sapiens
  misc_feature (1)...(201): n = A,T,C or G, or insertion/deletion polymorphism (see Tables 1-2)
cttgtactattcaccagattcagttgaattctgggctttcagctttgatgaaatggctaaatatgaccttccagccacaatcgacttcattgtaaagaaanctggacagaagcagctacactatgttggccattcccagggcaccaccattggttttattgccttttccaccaatcccagcctggctaaaagaatcaaaac

SEQ ID NO: 2639 - DNA, 175 bp, Homo sapiens
ttacaatgacattgtttctatgatatcagaagataaaaagtagttctggatttaaagaattatccgtttgtttttccaaaatactttattctctcatacayagtattttcataatgtttgacatgcagtgcttctttctgtaattttgactttagaaatatattggcatcaacaa

SEQ ID NO: 2640 - DNA, 201 bp, Homo sapiens
tgtggaacggtggcaaggacctgttggctgacccccaagatgttggccttttgcttccaaaactccccaatcttatttaccacaaggagattcctttttayaatcacttggactttatctgggcaatggatgcccctcaagaagtttacaatgacattgtttctatgatatcagaagataaaaagtagttctggatttaaa

SEQ ID NO: 2641 - DNA, 201 bp, Homo sapiens
tcctcaatccctcttcaagtttatatttggtgacaaaatattctacccacacaacttctttgatcaatttcttgctactgaagtgtgctcccgtgagatgytgaatctcctttgcagcaatgccttatttataatttgtggatttgacagtaagaactttaacacgagtcgcttggatgtgtatctatcacataatccagc

SEQ ID NO: 2642 - DNA, 201 bp, Homo sapiens
aagaatcaaaaccttctatgctctagctcctgttgccactgtgaagtatacaaaaagccttataaacaaacttagatttgttcctcaatccctcttcaagwttatatttggtgacaaaatattctacccacacaacttctttgatcaatttcttgctactgaagtgtgctcccgtgagatgctgaatctcctttgcagcaa

SEQ ID NO: 2643 - DNA, 201 bp, Homo sapiens
ttgaggaagaagatttggatgacattttaaggaaaagattgaaggactcaagtgaaatacctggtgctctgtggcatatttatgctgggaaagatgttgasaagataagggaatttcttcaaaagatttcaaaagaacaaggccttgaagttctaccagaacatgatccaatacgtgaccaaagttggtatgtgaacaaaa

SEQ ID NO: 2644 - DNA, 201 bp, Homo sapiens
aactaaatatgaaaagacttcgaactgacaatgtttcagacttttctgagagcagtgactcagaaaattcaaataagagaataatagataattcctcagamcagaagccagagaatgaattgaaaaataaaaatacttcaaaaataaatggagaagaaggaaaaccccataataatgagaaggcaggagaagagaccctaa

SEQ ID NO: 2645 - DNA, 201 bp, Homo sapiens
tcaaatgacctttctagatgatgttgttcactctttgttaaaaggtgaaaatattggcattacatcacgacgcaggtctcgtgccaatcaaaacgtcaacrctgttcacagccattatacacgtgcccaagcaaatagtcccagaccagcaatgaactcccaagctgctgtaccaaaacagaatacacaccagcaacagca

SEQ ID NO: 2646 - DNA, 201 bp, Homo sapiens
ccagcctccctgggatcaaatacaggaagataaaaaacatgaagaagcagagaagcggaagtctgttgacactcagcttcaagaagatatgattattcatwcgtcagaacagtccacagtttctgatcataattctaatgatttacttcctcaggaatgcaatatggataaaacacataccatggaattgctaccaaagga

SEQ ID NO: 2647 - DNA, 201 bp, Homo sapiens
gcggaaagttacaggctgctatggcatctgtcattgtgcgtccatcttctagtacaaaaactgatagtatgccagcaatgcagttagcttctaaagatcgwgttagtgaaagatcttcagctggggcacataaaacagattgcctcaaactagcagaagccggagaaactggaagaatcattttgccaaatgtgaattcag

SEQ ID NO: 2648 - DNA, 201 bp, Homo sapiens
tggtaaaaaataaaaaattctatgctatattgttgatcaagtgtaaatgtgaccttgtacagtttactaaaattactgatatttttcactacattgagacrgttactgtgagaataggacacaaacaccagctattgcctgcatctgggaaattgctgaatcgcacagcagtcatgtcataatcagaaaattactgccaaa

SEQ ID NO: 2649 - DNA, 201 bp, Homo sapiens
cacgtgcccaagcaaatagtcccagaccagcaatgaactcccaagctgctgtaccaaaacagaatacacaccagcaacagcaacaaagaagtatccgtccmaataagaggaagggctcagatagcagtataccagatgaagagaagatgaaggaggaaaaatatgattatatatcacgaggagaaaatcctaaaggtaaaa

SEQ ID NO: 2650 - DNA, 201 bp, Homo sapiens
aagaaatcaattatgatgataaactacaggttaaaaatattttgtatcatgcagtcaaagaaatggtgagagccttgaagatacacgaggatgaagtagasgatatggaagaaaattaagtgtgatccagtttgatatttttaggttgttgaactgggattacttaaccttgaatgatgatatgtatgcacactgacttta

SEQ ID NO: 2651 - DNA, 201 bp, Homo sapiens
tgatcgttatgaatgatcaggtactagaaccacagaatgtcgatccttctatggttcaaatgacctttctagatgatgttgttcactctttgttaaaaggygaaaatattggcattacatcacgacgcaggtctcgtgccaatcaaaacgtcaacgctgttcacagccattatacacgtgcccaagcaaatagtcccagac

SEQ ID NO: 2652 - DNA, 201 bp, Homo sapiens
atcttcttggacaagcccatccttctgcttcatataatcagcttggactttatccaattatttggcagtatccaaatggaacacatgcatactcaggactyggtttgccttcttctaagtgggttcacccagaaaatgcagttaatgctgaagcttcattaaggaggaattctcccagtccttggctacatcagcccaccc

SEQ ID NO: 2653 - DNA, 201 bp, Homo sapiens
ttagtatcaccacaaatgagaagaatgaaaggatcacattttccccctcgttttcccttgaagtcatgaacggttggttctgctgtgactttggggcttasttttcagtagaagtgttgtcctgctctgctgctgttactgcgggactgctaattcaggctaactcaggcggcgggcgctgtgtgctctgaacatcaaacc

SEQ ID NO: 2654 - DNA, 201 bp, Homo sapiens
aatcaaaacgtcaacgctgttcacagccattatacacgtgcccaagcaaatagtcccagaccagcaatgaactcccaagctgctgtaccaaaacagaatayacaccagcaacagcaacaaagaagtatccgtccaaataagaggaagggctcagatagcagtataccagatgaagagaagatgaaggaggaaaaatatgat

SEQ ID NO: 2655 - DNA, 201 bp, Homo sapiens
gtctgcgctctttcgggtccgctgctgtgtcccggtccgctctcctcagcatgagcggccggtaggagtgaggtttcatcggttccctcgcactggaggargcagcggccgcttcggcagcgacagctatggcggtagagacgcgggcagagctggtgggtaagcggttcctgtgtgtggcggtcggcgacgaggcacgtt

SEQ ID NO: 2656 - DNA, 201 bp, Homo sapiens
ctacaatgaatggtgtatctcaagttttacagaatgttcttaatcacagtaataaaatttctctgtgcatgcctgagtctcagcagcaaaatactcctccraagtctgagaaaaatggtggcagcagcccagagagtgatgtaggcacagataacaagttaactcctccagaatcccagtcaccactgcactggttagcag

SEQ ID NO: 2657 - DNA, 201 bp, Homo sapiens; identical to SEQ ID NO: 2643

SEQ ID NO: 2658 - DNA, 201 bp, Homo sapiens; identical to SEQ ID NO: 2644

SEQ ID NO: 2659 - DNA, 201 bp, Homo sapiens; identical to SEQ ID NO: 2645

SEQ ID NO: 2660 - DNA, 201 bp, Homo sapiens; identical to SEQ ID NO: 2646

SEQ ID NO: 2661 - DNA, 201 bp, Homo sapiens; identical to SEQ ID NO: 2647

SEQ ID NO: 2662 - DNA, 201 bp, Homo sapiens; identical to SEQ ID NO: 2648

SEQ ID NO: 2663 - DNA, 201 bp, Homo sapiens; identical to SEQ ID NO: 2649

SEQ ID NO: 2664 - DNA, 201 bp, Homo sapiens; identical to SEQ ID NO: 2650

SEQ ID NO: 2665 - DNA, 201 bp, Homo sapiens; identical to SEQ ID NO: 2651

SEQ ID NO: 2666 - DNA, 201 bp, Homo sapiens; identical to SEQ ID NO: 2652

SEQ ID NO: 2667 - DNA, 201 bp, Homo sapiens; identical to SEQ ID NO: 2654

SEQ ID NO: 2668 - DNA, 201 bp, Homo sapiens; identical to SEQ ID NO: 2656

SEQ ID NO: 2669 - DNA, 201 bp, Homo sapiens
tcaaatgacctttctagatgatgttgttcactctttgttaaaaggtgaaaatattggcattacatcacgacgcaggtctcgtgccaatcaaaacgtcaacrctgttcacagccattatacacgcgcccaagcaaatagtcccagaccagcaatgaactcccaagctgctgtaccaaaacagaatacacaccagcaacagca

SEQ ID NO: 2670 - DNA, 201 bp, Homo sapiens; identical to SEQ ID NO: 2648

SEQ ID NO: 2671 - DNA, 201 bp, Homo sapiens
acacaggaactgagacttttgaaggaagaaatcaattatgatgataaactacagtcaaagaaatggtgagagccttggagatacacgaggatgaagtagasgatatggaagaaaattaagtgtgatccagtttgatatttttaggttgttgaactgggattacttaaccttgaatgatgatatgtatgcacactgacttta

SEQ ID NO: 2672 - DNA, 201 bp, Homo sapiens
tgatcgttatgaatgatcaggtactagaaccacagaatgtcgatccttctatggttcaaatgacctttctagatgatgttgttcactctttgttaaaaggygaaaatattggcattacatcacgacgcaggtctcgtgccaatcaaaacgtcaacgctgttcacagccattatacacgcgcccaagcaaatagtcccagac

SEQ ID NO: 2673 - DNA, 201 bp, Homo sapiens
ccagcctccctgggatcaaatacaggaagataaaaaacatgaagaagcagagaagcggaagtctgttgacactcagcttcaagaagatatgattattcatwcgtcagaacagtccacagtttctgatcataattctaatgatttacttcctcaggaatgcaatatggataaagcacataccatggaattgctaccaaagga

SEQ ID NO: 2674 - DNA, 201 bp, Homo sapiens
aatcaaaacgtcaacgctgttcacagccattatacacgcgcccaagcaaatagtcccagaccagcaatgaactcccaagctgctgtaccaaaacagaatayacaccagcaacagcaacaaagaagtatccgtccaaataagaggaagggctcagatagcagtataccagatgaagagaagatgaaggaggaaaaatatgat

SEQ ID NO: 2675 - DNA, 201 bp, Homo sapiens
cacgcgcccaagcaaatagtcccagaccagcaatgaactcccaagctgctgtaccaaaacagaatacacaccagcaacagcaacaaagaagtatccgtccmaataagaggaagggctcagatagcagtataccagatgaagagaagatgaaggaggaaaaatatgattatatatcacgaggagaaaatcctaaaggtaaaa

SEQ ID NO: 2676 - DNA, 201 bp, Homo sapiens; identical to SEQ ID NO: 2652

SEQ ID NO: 2677 - DNA, 201 bp, Homo sapiens; identical to SEQ ID NO: 2643

SEQ ID NO: 2678 - DNA, 201 bp, Homo sapiens
ctgccagggctgagccagagcagacagaaaatcgtcatttgctcgttggagacttgttaggttacagctcctgcttcgttctgtggtcttggcttttcttyctatacaatgacgccgctgcaagtgagctcagaaatgcttggtttgagagccatttgcctgtgatttttgaagactaaagaagtatttacactagatact

SEQ ID NO: 2679 - DNA, 201 bp, Homo sapiens; identical to SEQ ID NO: 2647

SEQ ID NO: 2680 - DNA, 201 bp, Homo sapiens; identical to SEQ ID NO: 2644

SEQ ID NO: 2681 - DNA, 201 bp, Homo sapiens
gagcttagagttaggaattgtgttcaagtgcttggatttccgtctgtagatttaactgctgaaattgtatctctcagtaattttagatgtcttttaaaaarttgaaaaacaaagtgttagactgtgtgcgtgtgcgttgatgggcactcaagagtcccgtgagtcatccagccctgcctttcccctgcgcccccatcctct

SEQ ID NO: 2682 - DNA, 201 bp, Homo sapiens
atcccctgagcagtgtgagctcatctcaccagatgagaagaggccctgtgcatttcttttgtttgtttgttgctgttttcccccacccatccagttctccycagcaaagcaaattccttaacacctttggtggagaatttcttacccagacttggggctgtgatgcccttcagtgcgtggtgagtgcagcgtgtgtgcgtg

SEQ ID NO: 2683 - DNA, 201 bp, Homo sapiens
ccgcgtgcgcttcgccagcagcggggtgggaggaaggacattaaaatactgcagaagtcaagacccccccaggtcgaacccagaccacgatgcgcgccccrggctgcgggcggctggtgctgccgctgctgctcctggccgcggcagccctggccgaaggcgacgccaaggggctcaaggagggcgagacccccggcaatt

SEQ ID NO: 2684 - DNA, 201 bp, Homo sapiens
aggcagaccgcgggaggagagctgaggacagccgcgtgcgcttcgccagcagcggggtgggaggaaggacattaaaatactgcagaagtcaagacccccccaggtcgaacccagaccacgatgcgcgccccgggctgcgggcggctggtgctgccgctgctgctcctggccgcggcagccctggccgaaggcgacgccaag

SEQ ID NO: 2685 - DNA, 201 bp, Homo sapiens
tcaatgcagtgaggctctctgggtgaggctcccaacctggcagtccccagcctcccagcatctgtgagcgtctgttggactttacagaagagcctcatccygtctgcccctcactctgccctggaatcaacatcttccgagtccttcttgggggaaatagcagagccccacttaactccataaactgcttcccattccgca

SEQ ID NO: 2686 - DNA, 201 bp, Homo sapiens
cagccgtgtcctccagcccagccctgaccccttggtttctaccctggctccccttggtttctaccctggctcaaccgacccctgtctgcccttctccctcytgcttctgaggtcaagctctggcctgcgagcctgtccccattgcaaaggggagggaggggcagggagctgtctaccagctgaggtcctcccaaaactggg

SEQ ID NO: 2687 - DNA, 201 bp, Homo sapiens
cgtctgttggactttacagaagagcctcatcccgtctgcccctcactctgccctggaatcaacatcttccgagtccttcttgggggaaatagcagagcccmacttaactccataaactgcttcccattccgcagcccagttctgattgttgaggtgtcgcgtcgttccaggtcccccagtcccctctttctcctgtcctct

SEQ ID NO: 2688 - DNA, 201 bp, Homo sapiens
gtgttagactgtgtgcgtgtgcgttgatgggcactcaagagtcccgtgagtcatccagccctgcctttcccctgcgcccccatcctctcacgtcccgcccygcctccacttggggaccctgcctcgtgtcgtctttatctgcctattactcagcctaaggaaacaagtacactccacacatgcataaaggaaatcaaatgt

SEQ ID NO: 2689 - DNA, 201 bp, Homo sapiens
ttggactttacagaagagcctcatcccgtctgcccctcactctgccctggaatcaacatcttccgagtccttcttgggggaaatagcagagccccacttarctccataaactgcttcccattccgcagcccagttctgattgttgaggtgtcgcgtcgttccaggtcccccagtcccctctttctcctgtcctctctctgt

SEQ ID NO: 2690 - DNA, 201 bp, Homo sapiens
cagccagcagtgtagccggcccggccagcgggctggacaagagcctgggggccagctgcaaggactccattggctggatgttctccaagctggacaccagkgctgacctcttcctggaccagacggagctggccgccatcaacctggacaagtacgaggtctgcatccgtcccttcttcaactcctgtgacacctacaagg

SEQ ID NO: 2691 - DNA, 201 bp, Homo sapiens
gcgtcgttccaggtcccccagtcccctctttctcctgtcctctctctgtccttcacctccccactccagccccggctcagttcagggaaatgctgttccayatcagccctctgctctctgaggcagccgcgcctctgactcggagctacttgaaacttctgctcttgctaggattggagtctacctatctcttccatttgt

SEQ ID NO: 2692 - DNA, 201 bp, Homo sapiens
atgttttaggaagaaagcaaaagggactgaactagcctctggtaggattgcaggggtccagccttgcctgtttccgaagcccccacactgcctttcgcccyactgagactggtcccctcaaaaggtagacaaaacagcagctccctgtggagctgaagggcggcctcaaagtggctttttgttagacaaggttaaggtttc

SEQ ID NO: 2693 - DNA, 201 bp, Homo sapiens
tgttgagatggggcagctctgaatcctagaccctggaatagcctgtcccttttctctgggtctcgtggtggagccatgatctgggctgctctcttggggasactgggtggtggttacacagttgacctctgcctggctcccccttggtgcaactcctgcctccatcccccttgctggggtcccctcatccacttgagggcg

SEQ ID NO: 2694 - DNA, 201 bp, Homo sapiens
gtgttgagatggggcagctctgaatcctagaccctggaatagcctgtcccttttctctgggtctcgtggtggagccatgatctgggctgctctcttggggwcactgggtggtggttacacagttgacctctgcctggctcccccttggtgcaactcctgcctccatcccccttgctggggtcccctcatccacttgagggc

SEQ ID NO: 2695 - DNA, 201 bp, Homo sapiens
catccagatccaggaggccgccaagaagaagccaggcatcttcatcccgagctgcgacgaggatggctactaccggaagatgcagtgtgaccagagcagcrgtgactgctggtgtgtggaccagctgggcctggagctgactggcacgcgcacgcatgggagccccgactgcgatgacatcgtgggcttctcgggggactt

SEQ ID NO: 2696 - DNA, 201 bp, Homo sapiens
gaggagaaggagacggaggaagcaggcgaggaggccgaggaggaggagggcgaggcaggcgaggctgacgacgggggctacatctggtagacgccctcagragccggctgccgggggggactcaacagcagagctctgagcagcagcaggcaacttcgagaacggatccagaaatgcagtcagaaggaccctgctccacct

SEQ ID NO: 2697 - DNA, 201 bp, Homo sapiens
agtgtgagtgcatgtgtgcatgcatgtgtgtatgtgtgtgtgtgtgtggcatgcgctgacaaatgtgtccttgatccacactgctcctggcagagtgagtmacccaaaggccccttcggcctccttgtagctgttttctttccttttgttgttggttttaaaatacattcacacacaaatacaaattgacaggtcaaaatc

SEQ ID NO: 2698 - DNA, 201 bp, Homo sapiens
gagaggccagggacagggtgcctcgccaagctgtctgaggtctgtcccaggtggcccaggtggtgcaggtagaacagggtgaggagagggggtcggctcarcaggaggaggctgtggctgcagagcctggaggagcttttaggtgttgagatggggcagctctgaatcctagaccctggaatagcctgtcccttttctctg

SEQ ID NO: 2699 - DNA, 201 bp, Homo sapiens
ccccagcctcccagcatctgtgagcgtctgttggactttacagaagagcctcatcccgtctgcccctcactctgccctggaatcaacatcttccgagtccytcttgggggaaatagcagagccccacttaactccataaactgcttcccattccgcagcccagttctgattgttgaggtgtcgcgtcgttccaggtccccc

SEQ ID NO: 2700 - DNA, 201 bp, Homo sapiens
gatccagaaatgcagtcagaaggaccctgctccacctggggggactgggagtgtgagtgtgcatggcatgtgtgtggcacagatggctgggacgggtgacrgtgtgagtgcatgtgtgcatgcatgtgtgtatgtgtgtgtgtgtgtggcatgcgctgacaaatgtgtccttgatccacactgctcctggcagagtgagta

SEQ ID NO: 2701 - DNA, 201 bp, Homo sapiens
ctgtctgaggtctgtcccaggtggcccaggtggtgcaggtagaacagggtgaggagagggggtcggctcaacaggaggaggctgtggctgcagagcctggrggagcttttaggtgttgagatggggcagctctgaatcctagaccctggaatagcctgtcccttttctctgggtctcgtggtggagccatgatctgggctg

SEQ ID NO: 2702 - DNA, 201 bp, Homo sapiens; identical to SEQ ID NO: 2681

SEQ ID NO: 2703 - DNA, 201 bp, Homo sapiens; identical to SEQ ID NO: 2682

SEQ ID NO: 2704 - DNA, 201 bp, Homo sapiens; identical to SEQ ID NO: 2683

SEQ ID NO: 2705 - DNA, 201 bp, Homo sapiens; identical to SEQ ID NO: 2684

SEQ ID NO: 2706 - DNA, 201 bp, Homo sapiens; identical to SEQ ID NO: 2685

SEQ ID NO: 2707 - DNA, 201 bp, Homo sapiens; identical to SEQ ID NO: 2686

SEQ ID NO: 2708 - DNA, 201 bp, Homo sapiens; identical to SEQ ID NO: 2687

SEQ ID NO: 2709 - DNA, 193 bp, Homo sapiens
gtgttagactgtgtgcgtgtgcgttgatgggcactcaagagtcccgtgagtcatccagccctgcctttcccctgcgcccccatcctctcacgtcccgcccygcctccacttggggaccctgcctcgtgtcgtctttatctgcctattactcagcctaaggaaacaagtacactccacacatgcataaaggaaa

SEQ ID NO: 2710 - DNA, 201 bp, Homo sapiens; identical to SEQ ID NO: 2689

SEQ ID NO: 2711 - DNA, 201 bp, Homo sapiens; identical to SEQ ID NO: 2690

SEQ ID NO: 2712 - DNA, 201 bp, Homo sapiens; identical to SEQ ID NO: 2691

SEQ ID NO: 2713 - DNA, 201 bp, Homo sapiens; identical to SEQ ID NO: 2692

SEQ ID NO: 2714 - DNA, 201 bp, Homo sapiens; identical to SEQ ID NO: 2693

SEQ ID NO: 2715 - DNA, 201 bp, Homo sapiens; identical to SEQ ID NO: 2694

SEQ ID NO: 2716 - DNA, 201 bp, Homo sapiens; identical to SEQ ID NO: 2695

SEQ ID NO: 2717 - DNA, 201 bp, Homo sapiens; identical to SEQ ID NO: 2696

SEQ ID NO: 2718 - DNA, 201 bp, Homo sapiens; identical to SEQ ID NO: 2697

SEQ ID NO: 2719 - DNA, 201 bp, Homo sapiens; identical to SEQ ID NO: 2698

SEQ ID NO: 2720 - DNA, 201 bp, Homo sapiens; identical to SEQ ID NO: 2699

SEQ ID NO: 2721 - DNA, 201 bp, Homo sapiens; identical to SEQ ID NO: 2700

SEQ ID NO: 2722 - DNA, 201 bp, Homo sapiens; identical to SEQ ID NO: 2701

SEQ ID NO: 2723 - DNA, 201 bp, Homo sapiens; identical to SEQ ID NO: 2681

SEQ ID NO: 2724 - DNA, 201 bp, Homo sapiens; identical to SEQ ID NO: 2682

SEQ ID NO: 2725 - DNA, 201 bp, Homo sapiens; identical to SEQ ID NO: 2683

SEQ ID NO: 2726 - DNA, 201 bp, Homo sapiens; identical to SEQ ID NO: 2684

SEQ ID NO: 2727 - DNA, 201 bp, Homo sapiens; identical to SEQ ID NO: 2685

SEQ ID NO: 2728 - DNA, 201 bp, Homo sapiens; identical to SEQ ID NO: 2686

SEQ ID NO: 2729 - DNA, 201 bp, Homo sapiens; identical to SEQ ID NO: 2687

SEQ ID NO: 2730 - DNA, 201 bp, Homo sapiens; identical to SEQ ID NO: 2688

SEQ ID NO: 2731 - DNA, 201 bp, Homo sapiens; identical to SEQ ID NO: 2689

SEQ ID NO: 2732 - DNA, 201 bp, Homo sapiens; identical to SEQ ID NO: 2690

SEQ ID NO: 2733 - DNA, 201 bp, Homo sapiens; identical to SEQ ID NO: 2691

SEQ ID NO: 2734 - DNA, 201 bp, Homo sapiens; identical to SEQ ID NO: 2692

SEQ ID NO: 2735 - DNA, 201 bp, Homo sapiens; identical to SEQ ID NO: 2693

SEQ ID NO: 2736 - DNA, 201 bp, Homo sapiens; identical to SEQ ID NO: 2694

SEQ ID NO: 2737 - DNA, 201 bp, Homo sapiens; identical to SEQ ID NO: 2695

SEQ ID NO: 2738 - DNA, 201 bp, Homo sapiens; identical to SEQ ID NO: 2696

SEQ ID NO: 2739 - DNA, 201 bp, Homo sapiens; identical to SEQ ID NO: 2697

SEQ ID NO: 2740 - DNA, 201 bp, Homo sapiens; identical to SEQ ID NO: 2698

SEQ ID NO: 2741 - DNA, 201 bp, Homo sapiens; identical to SEQ ID NO: 2699

SEQ ID NO: 2742 - DNA, 201 bp, Homo sapiens; identical to SEQ ID NO: 2700

SEQ ID NO: 2743 - DNA, 201 bp, Homo sapiens; identical to SEQ ID NO: 2701

SEQ ID NO: 2744 - DNA, 201 bp, Homo sapiens; identical to SEQ ID NO: 2681

SEQ ID NO: 2745 - DNA, 201 bp, Homo sapiens; identical to SEQ ID NO: 2682

SEQ ID NO: 2746 - DNA, 201 bp, Homo sapiens; identical to SEQ ID NO: 2683

SEQ ID NO: 2747 - DNA, 201 bp, Homo sapiens; identical to SEQ ID NO: 2684

SEQ ID NO: 2748 - DNA, 201 bp, Homo sapiens; identical to SEQ ID NO: 2685

SEQ ID NO: 2749 - DNA, 201 bp, Homo sapiens; identical to SEQ ID NO: 2686

SEQ ID NO: 2750 - DNA, 201 bp, Homo sapiens; identical to SEQ ID NO: 2687

SEQ ID NO: 2751 - DNA, 201 bp, Homo sapiens; identical to SEQ ID NO: 2688

SEQ ID NO: 2752 - DNA, 201 bp, Homo sapiens; identical to SEQ ID NO: 2689

SEQ ID NO: 2753 - DNA, 201 bp, Homo sapiens; identical to SEQ ID NO: 2690

SEQ ID NO: 2754 - DNA, 201 bp, Homo sapiens; identical to SEQ ID NO: 2691

SEQ ID NO: 2755 - DNA, 201 bp, Homo sapiens; identical to SEQ ID NO: 2692

SEQ ID NO: 2756 - DNA, 201 bp, Homo sapiens; identical to SEQ ID NO: 2693

SEQ ID NO: 2757 - DNA, 201 bp, Homo sapiens; identical to SEQ ID NO: 2694

SEQ ID NO: 2758 - DNA, 201 bp, Homo sapiens; identical to SEQ ID NO: 2695

SEQ ID NO: 2759 - DNA, 201 bp, Homo sapiens; identical to SEQ ID NO: 2696

SEQ ID NO: 2760 - DNA, 201 bp, Homo sapiens; identical to SEQ ID NO: 2697

SEQ ID NO: 2761 - DNA, 201 bp, Homo sapiens; identical to SEQ ID NO: 2698

SEQ ID NO: 2762 - DNA, 201 bp, Homo sapiens; identical to SEQ ID NO: 2699

SEQ ID NO: 2763 - DNA, 201 bp, Homo sapiens; identical to SEQ ID NO: 2700

SEQ ID NO: 2764 - DNA, 201 bp, Homo sapiens; identical to SEQ ID NO: 2701

SEQ ID NO: 2765 - DNA, 201 bp, Homo sapiens; identical to SEQ ID NO: 2699

SEQ ID NO: 2766 - DNA, 201 bp, Homo sapiens; identical to SEQ ID NO: 2682

SEQ ID NO: 2767 - DNA, 201 bp, Homo sapiens; identical to SEQ ID NO: 2685

SEQ ID NO: 2768 - DNA, 201 bp, Homo sapiens; identical to SEQ ID NO: 2689

SEQ ID NO: 2769 - DNA, 201 bp, Homo sapiens; identical to SEQ ID NO: 2681

SEQ ID NO: 2770 - DNA, 201 bp, Homo sapiens; identical to SEQ ID NO: 2687

SEQ ID NO: 2771 - DNA, 201 bp, Homo sapiens; identical to SEQ ID NO: 2700

SEQ ID NO: 2772 - DNA, 201 bp, Homo sapiens; identical to SEQ ID NO: 2696

SEQ ID NO: 2773 - DNA, 201 bp, Homo sapiens; identical to SEQ ID NO: 2697

SEQ ID NO: 2774 - DNA, 201 bp, Homo sapiens; identical to SEQ ID NO: 2698

SEQ ID NO: 2775 - DNA, 201 bp, Homo sapiens; identical to SEQ ID NO: 2701

SEQ ID NO: 2776 - DNA, 201 bp, Homo sapiens; identical to SEQ ID NO: 2691

SEQ ID NO: 2777 - DNA, 201 bp, Homo sapiens; identical to SEQ ID NO: 2692

SEQ ID NO: 2778 - DNA, 201 bp, Homo sapiens
ccgcgtgcgcttcgccagcagcggggtgggaggaaggacattaaaatactgcagaagtcaagaccccccaggtcgaacccagaccacgatgcgcgccccgrgctgcgggcggctggtgctgccgctgctgctcctggccgcggcagccctggccgaaggcgacgccaaggggctcaaggagggcgagacccccggcaattt

SEQ ID NO: 2779 - DNA, 201 bp, Homo sapiens
aggcagaccgcgggaggagagctgaggacagccgcgtgcgcttcgccagcagcggggtgggaggaaggacattaaaatactgcagaagtcaagacccccccggtcgaacccagaccacgatgcgcgccccgggctgcgggcggctggtgctgccgctgctgctcctggccgcggcagccctggccgaaggcgacgccaagg

SEQ ID NO: 2780 - DNA, 201 bp, Homo sapiens; identical to SEQ ID NO: 2690

SEQ ID NO: 2781 - DNA, 201 bp, Homo sapiens; identical to SEQ ID NO: 2695

SEQ ID NO: 2782 - DNA, 201 bp, Homo sapiens; identical to SEQ ID NO: 2686

SEQ ID NO: 2783 - DNA, 201 bp, Homo sapiens; identical to SEQ ID NO: 2688

SEQ ID NO: 2784 - DNA, 201 bp, Homo sapiens; identical to SEQ ID NO: 2693

SEQ ID NO: 2785 - DNA, 201 bp, Homo sapiens; identical to SEQ ID NO: 2694

SEQ ID NO: 2786 - DNA, 201 bp, Homo sapiens
gctcatgagctgaacgactttcacggtgtggcccccctccacttgccgcatatctgtagcatctgtgacaagaaggtgtttgatttgaaggactgggagcygcatgtgaaagggaagctgcacgctcagaaatgcctggtcttctctgaaaatgctggcatccggtgtatacttggttcggcagagggaacattgtgtgct

SEQ ID NO: 2787 - DNA, 201 bp, Homo sapiens
actgaaacagcccctttctttgccctcttgggaaccagaggatgtgttcagtgaacttagcattcctctagaacataattctaaaataaacaaacaaaaaygagagaattcttcgagagtcccggtcacagcagctgcagagagaggggtggagttcgtggttcccaggactggcttttattgcaagctgtgtgggctgtt

SEQ ID NO: 2788 - DNA, 201 bp, Homo sapiens
catttccccagttatgaggcttcttcatctgggggaggccactcatcagcatgttgtccagccttttgtggctagtttttacttcaggtgtggggataggwgtcttttgagattttctttgctttcacactgatgtggttttactgcactagctccattttacggatggggacatggatgccaataagacaagatgactca

SEQ ID NO: 2789 - DNA, 201 bp, Homo sapiens
gagaagtacccgagatctgggtctcccaacctgccccactctgtgtccagctacaaaagccgtgaagacggctactaccggaaagagcccaaagccaagtsggacaagtatctgaagcagcagcaggatgcccccgggaggtccaggaggaaagacgaggccaggctgcgggaaagcagacacccccatccggatgactca

SEQ ID NO: 2790 - DNA, 201 bp, Homo sapiens
ttcactggggtaatgcctcagacccctggccagccagcagtcatcttgggcattggcaagactgggcctgctccagctacagcaggattctatgagtatgrcaaagccagctctggccagacatatggccctgaaacagatggtcagcctggcttcctgccatcctcggcctcaacctcgggcagtgtgacctatgaaggg

SEQ ID NO: 2791 - DNA, 201 bp, Homo sapiens
aaagtcatggaaaatgaaactcaggttggtcttctcactggcttcttaaaggaatgagcacattgtgatcctgctctgtatcgtggagaaagacccaaggwaagatgatgagaagttctgcttttggaatagcggcatcaacagctacatggacctgcttctgggaaaaacaagtgtaactgccatcttttcatcacaatg

SEQ ID NO: 2792 - DNA, 201 bp, Homo sapiens
aatagcggcatcaacagctacatggacctgcttctgggaaaaacaagtgtaactgccatcttttcatcacaatgggacagcctgtctgagaatgaggccartgcaaagaagaaagtggagcccacgtacagagagatgatacattgatgatatcatgtgtcctagattcatgcttcatatgaaggagtcccattataccga

SEQ ID NO: 2793 - DNA, 201 bp, Homo sapiens
aaggaatgagcacattgtgatcctgctctgtatcgtggagaaagacccaaggaaagatgatgagaagttctgcttttggaatagcggcatcaacagctacrtggacctgcttctgggaaaaacaagtgtaactgccatcttttcatcacaatgggacagcctgtctgagaatgaggccagtgcaaagaagaaagtggagcc

SEQ ID NO: 2794 - DNA, 201 bp, Homo sapiens
gtcatgggattcagtcaatgagaatttcaatggatggacaaaacattctggtgaatgggagagatgatggcacccttgtctacctaaagtggaagcgattyggaggacacctagccagtgaaattctggactattaccagaaactattaatttccctgagcagcgccatggacaaggagaatcattatttaagcacaacac

SEQ ID NO: 2795 - DNA, 201 bp, Homo sapiens
gtcaagccaattggagcttcattccagagaagagaaaatcaaccaaattatattattgaaagatatcatttacaaggtaaaaactgttttcaataatgagkttgacgctgcatataaacaaaaagagtttgaaattgcacgcgtgaaggaaagaaatgttcgaattcgagaaattattttagatctggaattggaagaagc

SEQ ID NO: 2796 - DNA, 201 bp, Homo sapiens
atttggctgaacttatcaaagaagaatgttggaattcgatggctgtgaaaggtcgagctcttaagtgttttcatatcccctgtgtggttgaaaacttcccratgaaagcgcgcacggttgaagagctgaaagaattggaaagagttttacagcaaaagaagattgaagcagagtgtcttaaactacggaaggaaattgtag

SEQ ID NO: 2797 - DNA, 201 bp, Homo sapiens
cgttgtccctttcggagaactaccaggatctggcaagttgaataaggatgcctttgcccagttaatgaaagctatggatgagttggacaatattagtaacrtgccagaaggcttggaccctttggtctggaatcatttctgcatgacaagacgagcaaaagtggaaaatgaacagaaagtaaagcagaaagcagctgactt

SEQ ID NO: 2798 - DNA, 132 bp, Homo sapiens
acagggacgcgggctgccatcttgctctaagygaaagtgaaagaaaagtcggcagcagagggaacagggaagaaacctaaaggctgcaggctgccagagccccacccagcagaggggcagtggcgggcagtg

SEQ ID NO: 2799 - DNA, 201 bp, Homo sapiens
tcctgtgctgacacacagagctcccatctccatgaagaccgcacagcgcgtgtaagccagcccagctgacctaaagcgacatgagactactagaaagaaaygacacccttccccaagcccccacagctactccaacccaaacaacaaccaagccagtttaatggtaggaatttgtattttttgcctttgttcagaatacat

SEQ ID NO: 2800 - DNA, 119 bp, Homo sapiens
ccccacagctactccaacccaaacaacaaccaagccagtttaatggtaggaatttgtattttttgcctttgttcagaatacatgacattggtaaatatgcmacatgcctttggtggaag

SEQ ID NO: 2801 - DNA, 201 bp, Homo sapiens
gacggcaagcacctacaggacttgggctgcttcaggctgaacgctgggagaccacttcctgtgctgacacacagagctcccatctccatgaagaccgcacrgcgcgtgtaagccagcccagctgacctaaagcgacatgagactactagaaagaaacgacacccttccccaagcccccacagctactccaacccaaacaac

SEQ ID NO: 2802 - DNA, 201 bp, Homo sapiens
gttaagacagcagcttggttcatggccaacatgcaggtctctggagggggacctagcatctccttggtgatgaagactcccagggtcaccaagaatgaggygctctggcacccgacgctgaacttgccactgagcccccaggggactgtgcgaactgcagtggagttccaggtgatgacacagacccaatccctgagcttc

SEQ ID NO: 2803 - DNA, 201 bp, Homo sapiens
gacagagaccactgttaagacagcagcttggttcatggccaacatgcaggtctctggagggggacctagcatctccttggtgatgaagactcccagggtcrccaagaatgaggcgctctggcacccgacgctgaacttgccactgagcccccaggggactgtgcgaactgcagtggagttccaggtgatgacacagaccca

SEQ ID NO: 2804 - DNA, 201 bp, Homo sapiens
cttggttcatggccaacatgcaggtctctggagggggacctagcatctccttggtgatgaagactcccagggtcaccaagaatgaggcgctctggcacccracgctgaacttgccactgagcccccaggggactgtgcgaactgcagtggagttccaggtgatgacacagacccaatccctgagcttcctgctggggtcct

SEQ ID NO: 2805 - DNA, 201 bp, Homo sapiens
gagggaacagggaagaaacctaaaggctgcaggctgccagagccccacccagcagaggggcagtggcgggcagtggacgtggtcctagactgcttcctggygaaggacggtgcgcaccgtggagctctcgccagcagtgaggacagggcaagggcctcccttgtgctgaagcaggtgccagtgctggacgatggctccctg

SEQ ID NO: 2806 - DNA, 201 bp, Homo sapiens
cggcagcagagggaacagggaagaaacctaaaggctgcaggctgccagagccccacccagcagaggggcagtggcgggcagtggacgtggtcctagactgyttcctggcgaaggacggtgcgcaccgtggagctctcgccagcagtgaggacagggcaagggcctcccttgtgctgaagcaggtgccagtgctggacgatg

SEQ ID NO: 2807 - DNA, 201 bp, Homo sapiens
tgctgactgcagtgggaaggaggtgacctgtgagatctcccgctactttctccagatgacagagaccactgttaagacagcagcttggttcatggccaacrtgcaggtctctggagggggacctagcatctccttggtgatgaagactcccagggtcaccaagaatgaggcgctctggcacccgacgctgaacttgccact

SEQ ID NO: 2808 - DNA, 201 bp, Homo sapiens
caagcttcccctaaagtacgactgagcttggcaaacgaagctctgctgcccaccctcatctgcgacattgctggctattaccctctggatgtggtggtgaygtggacccgagaggagctgggtggatccccagcccaagtctctggtgcctccttctccagcctcaggcaaagcgtggcaggcacctacagcatctcctcc

SEQ ID NO: 2809 - DNA, 118 bp, Homo sapiens
tgccatcttgctctaagygaaagtgaaagaaaagtcggcagcagagggaacagggaagaaacctaaaggctgcaggctgccaggtgtgcttggagagcccccttcttccgccgggcct

SEQ ID NO: 2810 - DNA, 201 bp, Homo sapiens; identical to SEQ ID NO: 2799

SEQ ID NO: 2811 - DNA, 119 bp, Homo sapiens; identical to SEQ ID NO: 2800

SEQ ID NO: 2812 - DNA, 201 bp, Homo sapiens; identical to SEQ ID NO: 2801

SEQ ID NO: 2813 - DNA, 201 bp, Homo sapiens; identical to SEQ ID NO: 2802

SEQ ID NO: 2814 - DNA, 201 bp, Homo sapiens; identical to SEQ ID NO: 2803

SEQ ID NO: 2815 - DNA, 201 bp, Homo sapiens; identical to SEQ ID NO: 2804

SEQ ID NO: 2816 - DNA, 201 bp, Homo sapiens
ctgctgctctgcctggctctatctggagcagcagaaaccaagccccacccagcagaggggcagtggcgggcagtggacgtggtcctagactgcttcctggygaaggacggtgcgcaccgtggagctctcgccagcagtgaggacagggcaagggcctcccttgtgctgaagcaggtgccagtgctggacgatggctccctg

SEQ ID NO: 2817 - DNA, 201 bp, Homo sapiens
gctggtgcctgctgctctgcctggctctatctggagcagcagaaaccaagccccacccagcagaggggcagtggcgggcagtggacgtggtcctagactgyttcctggcgaaggacggtgcgcaccgtggagctctcgccagcagtgaggacagggcaagggcctcccttgtgctgaagcaggtgccagtgctggacgatg

SEQ ID NO: 2818 - DNA, 201 bp, Homo sapiens; identical to SEQ ID NO: 2807

SEQ ID NO: 2819 - DNA, 201 bp, Homo sapiens; identical to SEQ ID NO: 2808

SEQ ID NO: 2820 - DNA, 118 bp, Homo sapiens; identical to SEQ ID NO: 2809

SEQ ID NO: 2821 - DNA, 201 bp, Homo sapiens; identical to SEQ ID NO: 2799

SEQ ID NO: 2822 - DNA, 119 bp, Homo sapiens; identical to SEQ ID NO: 2800

SEQ ID NO: 2823 - DNA, 201 bp, Homo sapiens; identical to SEQ ID NO: 2801

SEQ ID NO: 2824 - DNA, 201 bp, Homo sapiens; identical to SEQ ID NO: 2803

SEQ ID NO: 2825 - DNA, 201 bp, Homo sapiens; identical to SEQ ID NO: 2802

SEQ ID NO: 2826 - DNA, 201 bp, Homo sapiens; identical to SEQ ID NO: 2804

SEQ ID NO: 2827 - DNA, 201 bp, Homo sapiens; identical to SEQ ID NO: 2807

SEQ ID NO: 2828 - DNA, 201 bp, Homo sapiens; identical to SEQ ID NO: 2808

SEQ ID NO: 2829 - DNA, 201 bp, Homo sapiens
gacagagaccactgttaagacagcagcttggttcatggccaacgtgcaggtctctggagggggacctagcatctccttggtgatgaagactcccagggtcrccaagaatgaggtgctctggcacccaacgctgaacttgccactgagcccccaggggactgtgcgaactgcagtggagttccaggtgatgacacagaccca

SEQ ID NO: 2830 - DNA, 201 bp, Homo sapiens; identical to SEQ ID NO: 2801

SEQ ID NO: 2831 - DNA, 201 bp, Homo sapiens; identical to SEQ ID NO: 2799

SEQ ID NO: 2832 - DNA, 201 bp, Homo sapiens
tgctgactgcagtgggaaggaggtgacctgtgagatctcccgctactttctccagatgacagagaccactgttaagacagcagcttggttcatggccaacrtgcaggtctctggagggggacctagcatctccttggtgatgaagactcccagggtcgccaagaatgaggtgctctggcacccaacgctgaacttgccact

SEQ ID NO: 2833 - DNA, 201 bp, Homo sapiens; identical to SEQ ID NO: 2808

SEQ ID NO: 2834 - DNA, 201 bp, Homo sapiens
cttggttcatggccaacgtgcaggtctctggagggggacctagcatctccttggtgatgaagactcccagggtcgccaagaatgaggtgctctggcacccracgctgaacttgccactgagcccccaggggactgtgcgaactgcagtggagttccaggtgatgacacagacccaatccctgagcttcctgctggggtcct

SEQ ID NO: 2835 - DNA, 201 bp, Homo sapiens
gttaagacagcagcttggttcatggccaacgtgcaggtctctggagggggacctagcatctccttggtgatgaagactcccagggtcgccaagaatgaggygctctggcacccaacgctgaacttgccactgagcccccaggggactgtgcgaactgcagtggagttccaggtgatgacacagacccaatccctgagcttc

SEQ ID NO: 2836 - DNA, 201 bp, Homo sapiens
ctgctgctctgcctggctctatctggagcagcagaaaccaagccccacccagcagaggggcagtggcgggcagtggacgtggtcctagactgtttcctggygaaggacggtgcgcaccgtggagctctcgccagcagtgaggacagggcaagggcctcccttgtgctgaagcaggtgccagtgctggacgatggctccctg

SEQ ID NO: 2837 - DNA, 201 bp, Homo sapiens
gctggtgcctgctgctctgcctggctctatctggagcagcagaaaccaagccccacccagcagaggggcagtggcgggcagtggacgtggtcctagactgyttcctggtgaaggacggtgcgcaccgtggagctctcgccagcagtgaggacagggcaagggcctcccttgtgctgaagcaggtgccagtgctggacgatg

SEQ ID NO: 2838 - DNA, 201 bp, Homo sapiens
aaaccctttttaggttatcctttcttccatcacatccccttttccaggcctcctccattttaggtccttaatattctttctttttctctctctctcgtttytctcttctctctcctctcctctctcttctcctcttctctctctctccctctctctcctttgtccagagtaaggataaaattctttctactaaagcactgg

SEQ ID NO: 2839 - DNA, 201 bp, Homo sapiens
ccctttttaggttatcctttcttccatcacatccccttttccaggcctcctccattttaggtccttaatattctttctttttctctctctctcgtttctctcttctctctcctctcctctctcttctcctcttctctctctctccctctctctcctttgtccagagtaaggataaaattctttctactaaagcactggttc

SEQ ID NO: 2840 - DNA, 201 bp, Homo sapiens
acgccgccatcgtgcacccgctgcgactgcgccacctgcggcggccccgcgtggcgcggctgctctgcctgggcgtgtgggcgctcatcctggtgtttgcygtgcccgccgcccgcgtgcacaggccctcgcgttgccgctaccgggacctcgaggtgcgcctatgcttcgagagcttcagcgacgagctgtggaaaggca

SEQ ID NO: 2841 - DNA, 201 bp, Homo sapiens
ttaggttatcctttcttccatcacatccccttttccaggcctcctccattttaggtccttaatattctttctttttctctctctctcgtttctctcttctctctcctctcctctctcttctcctcttctctctctctccctctctctcctttgtccagagtaaggataaaattctttctactaaagcactggttctcaaac

SEQ ID NO: 2842 - DNA, 201 bp, Homo sapiens; identical to SEQ ID NO: 2838

SEQ ID NO: 2843 - DNA, 201 bp, Homo sapiens; identical to SEQ ID NO: 2839

SEQ ID NO: 2844 - DNA, 201 bp, Homo sapiens; identical to SEQ ID NO: 2840

SEQ ID NO: 2845 - DNA, 201 bp, Homo sapiens; identical to SEQ ID NO: 2841

SEQ ID NO: 2846 - DNA, 201 bp, Homo sapiens
ctagacgagaaaacccccacaagtatctgctctacaaaccaaccttcagccagctatataccttcttagcagcgtcttttaaggagctgcctgccaatagygtgcttctgatttacctgtcggccactggcgttttccccacaggtcgttctgatagtgaaggtccttatgattttggaggtgtacttactaatagtaacc

SEQ ID NO: 2847 - DNA, 201 bp, Homo sapiens
aggagcccggcagccccagcagccgcggagtcgcctggcccccagactgactggcacagtggagaaaccgcctcgaaaacggagaagcaggactgaatttrctcttaaagaaatcatgtcctctggaggtgctgaagatgatatcccacagggagagaggaaaacagttacagatttttgttatcttctggataaatctaa

SEQ ID NO: 2848 - DNA, 201 bp, Homo sapiens; identical to SEQ ID NO: 2846

SEQ ID NO: 2849 - DNA, 201 bp, Homo sapiens
gcctcgaaaacggagaagcagtatcagaggttctggtgatagcagtcattcacaatctcaaggggaaagatatcaacatttcactgaaaagactgaatttrctcttaaagaaatcatgtcctctggaggtgctgaagatgatatcccacagggagagaggaaaacagttacagatttttgttatcttctggataaatctaa

SEQ ID NO: 2850 - DNA, 201 bp, Homo sapiens
actgactgatcactctcatcagtggcagattttggtgtaacataggacacatcactcccaattcaggtcaagtcccaattatcttgcctctcaatatgacmtgttcaatgttgtatttcattctacttcattttaatgtaaaaagtcttttctggtgaagtcagtcttttattttctcataaaaattcaccctttgggttt

SEQ ID NO: 2851 - DNA, 201 bp, Homo sapiens
tgctgaaagctgaacactcaatgggaagacctgtttgcagagaggagccagccactccagggtctcctttctgctagaagctgaacactcgttgggacacmcttgctgtggaaaggacatccttactgtggaaatgagctactaactgcaggagctgaggagctgcacagcaaggttaaaagagctgtaacacaaacaggg

SEQ ID NO: 2852 - DNA, 201 bp, Homo sapiens
ggagagaaactacccattccagaacctcctctctgctgaaagctgaacactcaatgggaagacctgtttgcagagaggagccagccactccagggtctcckttctgctagaagctgaacactcgttgggacacacttgctgtggaaaggacatccttactgtggaaatgagctactaactgcaggagctgaggagctgcac

SEQ ID NO: 2853 - DNA, 201 bp, Homo sapiens
tttattgaatgaacaggaaacagggaaagacattgaccagaaaaagtgtttattcatcaagtctttaaagatacaaaaacacgtgtcttctgtggagctcwgagaacaggactccagcaaagcacttttcagccttgtggtcttcaagcatttccaagatctgtgacattggaaagaaaaaaaattaagacagatttgggt

SEQ ID NO: 2854 - DNA, 201 bp, Homo sapiens
ttttcagccttgtggtcttcaagcatttccaagatctgtgacattggaaagaaaaaaaattaagacagatttgggtctccatgagcagagagtattctttsccttagttctgggtagcatagtgcccaaggaaacctaatcagtacagtgggaaaccaaatctattccaaatcattacccataagcaatcctatggactct

SEQ ID NO: 2855 - DNA, 201 bp, Homo sapiens
caatgatatttattgaatgaacaggaaacagggaaagacattgaccagaaaaagtgtttattcatcaagtctttaaagatacaaaaacacgtgtcttctgkggagctctgagaacaggactccagcaaagcacttttcagccttgtggtcttcaagcatttccaagatctgtgacattggaaagaaaaaaaattaagacag

SEQ ID NO: 2856 - DNA, 201 bp, Homo sapiens
aagaaaaaaaattaagacagatttgggtctccatgagcagagagtattctttcccttagttctgggtagcatagtgcccaaggaaacctaatcagtacagwgggaaaccaaatctattccaaatcattacccataagcaatcctatggactctctgaggtttgacagagtcagcggccctctccaataaatgtgtttttct

SEQ ID NO: 2857 - DNA, 201 bp, Homo sapiens
cttctgcatgaatcctcccttcattattttcagctcatctattattgaatctgaaaccccaggttaactgactgatcactctcatcagtggcagattttgktgtaacataggacacatcactcccaattcaggtcaagtcccaattatcttgcctctcaatatgacctgttcaatgttgtatttcattctacttcatttta

SEQ ID NO: 2858 - DNA, 201 bp, Homo sapiens
attgaatgaacaggaaacagggaaagacattgaccagaaaaagtgtttattcatcaagtctttaaagatacaaaaacacgtgtcttctgtggagctctgaraacaggactccagcaaagcacttttcagccttgtggtcttcaagcatttccaagatctgtgacattggaaagaaaaaaaattaagacagatttgggtctc

SEQ ID NO: 2859 - DNA, 179 bp, Homo sapiens
cctcagccttctgcatagctgggattacaagcaagcgctgccgcgcccagctgttcattttattcttcatctggcattmtttgaatgtaaggggatttttttgtgggtaatgcttttactggttactgttcatgaaaattttgaatgcagttggtcatatctagtataaagccctgtgt

SEQ ID NO: 2860 - DNA, 142 bp, Homo sapiens
cctcagccttctgcatagctgggattacaagcaagcgctgcygcgcccagctgttcattttattcttcatctggcattctttgaatgtaaggggatttttttgtgggtaatgcttttactggttactgttcatgaaaatttt

SEQ ID NO: 2861 - DNA, 201 bp, Homo sapiens
attttgaatgcagttggtcatatctagtataaagccctgtgttcagatgctcctgctgatggagaggagtaaaagtgtggaccttccatttttctgcaccrcatctgagatactaaagcaaaaattcagcatggccagacaatgctgagaaaccttaagacccaccagtgtgtctagatcctaccctcttaatttcattca

SEQ ID NO: 2862 - DNA, 201 bp, Homo sapiens
cgccttaagagctgtaacactcaccgcaaaggtctgcagcttcactcctgagccagcgagaccacgaacccaccagaaggaagaaactccgaacacatccraacatcagaaggaacaaactccagacgcaccaccttaagagctgtaacactcaccgcaagggtccgcagtttcattcttgaagtcagtgagaccaagaac

SEQ ID NO: 2863 - DNA, 201 bp, Homo sapiens
gaaggccaaggctaaagctgaagctattcgaatcctggctgcagctctgacacaacataatggagatgcagcagcttcactgactgtggccgagcagtatrtcagcgcgttctccaaactggccaaggactccaacactatcctactgccctccaaccctggcgatgtcaccagcatggtggctcaggccatgggtgtata

SEQ ID NO: 2864 - DNA, 201 bp, Homo sapiens
ggagcagcagagatgtccagggtacagatgcaagtcttgatgaggaacttgatcgagtcaagatgagttagtggagctgggcttggccagggagtctgggracaaggaagcagattttcctgattctggctctagcttccctgccaagattttggtttttatttttttatttgaactttagtcgtgtaataaactcaccag

SEQ ID NO: 2865 - DNA, 155 bp, Homo sapiens
gggagtctggggacaaggaagcagattttcctgattctggctctagcttccctgccaagattttggtttttatttttttatttgaactttagtcgtgtaayaaactcaccagtggcaaaccagaaactaaaaaaaaaaaaaaaacacagccagcc

SEQ ID NO: 2866 - DNA, 161 bp, Homo sapiens
tggccagggagtctggggacaaggaagcagattttcctgattctggctctagcttccctgccaagattttggtttttatttttttatttgaactttagtcrtgtaataaactcaccagtggcaaaccagaaactaaaaaaaaaaaaaaaacacagccagcc

SEQ ID NO: 2867 - DNA, 201 bp, Homo sapiens
gcactggggcccttttgctgaggggctctctactggcttctggccgcgctccgcgccgcgcctcctctggattgccccgaaacaccgtggtactgttcgtrccgcagcaggaggcctgggtggtggagcgaatgggccgattccaccggatcctggagcctggtttgaacatcctcatccctgtgttagaccggatccgat

SEQ ID NO: 2868 - DNA, 201 bp, Homo sapiens
agcgaatgggccgattccaccggatcctggagcctggtttgaacatcctcatccctgtgttagaccggatccgatatgtgcagagtctcaaggaaattgtyatcaacgtgcctgagcagtcggctgtgactctcgacaatgtaactctgcaaatcgatggagtcctttacctgcgcatcatggacccttacaaggcaagct

SEQ ID NO: 2869 - DNA, 201 bp, Homo sapiens
cccagctagctcaaacaaccatgagatcagagctcggcaaactctctctggacaaagtcttccgggaacgggagtccctgaatgccagcattgtggatgcyatcaaccaagctgctgactgctggggtatccgctgcctccgttatgagatcaaggatatccatgtgccaccccgggtgaaagagtctatgcagatgcagg

SEQ ID NO: 2870 - DNA, 201 bp, Homo sapiens
gggggagggagctgccggaagtacatccgggggagcggaactgcaagaggaaaggctcgggtaggcttctgggagcgaccgctccgctcgtctcgttggtkccggaggtcgctgcggcggtgggaaatgctggcgcgcgcggcgcggggcactggggcccttttgctgaggggctctctactggcttctggccgcgctccg

SEQ ID NO: 2871 - DNA, 201 bp, Homo sapiens
aagtcttgatgaggaacttgatcgagtcaagatgagttagtggagctgggcttggccagggagtctggggacaaggaagcagattttcctgattctggctytagcttccctgccaagattttggtttttatttttttatttgaactttagtcgtgtaataaactcaccagtggcaaaccagaaactaaaaaaaaaaaaaaa

SEQ ID NO: 2872 - DNA, 114 bp, Homo sapiens
tgtttgctggactstatttaagaccgggcataacaaaccttgcttgggaagacagggaaggagctgcagtgtctttgaggaaagaggggaggggaaaatctcggcccaatcgcc

SEQ ID NO: 2873 - DNA, 201 bp, Homo sapiens
gtctttgaggaaagaggggaggggaaaatctcggcccaatcgccaggcaatattaggcccagtttccatggcaacgggattggggtcagtccccagtgggwgtcctgggcacaacacagcgggactaccagagaatatcactatggcaaccatggcaacgagtcagctccaatccactagtcgctatggtgacagatgggg

SEQ ID NO: 2874 - DNA, 201 bp, Homo sapiens; identical to SEQ ID NO: 2863

SEQ ID NO: 2875 - DNA, 201 bp, Homo sapiens; identical to SEQ ID NO: 2864

SEQ ID NO: 2876 - DNA, 155 bp, Homo sapiens; identical to SEQ ID NO: 2865

SEQ ID NO: 2877 - DNA, 161 bp, Homo sapiens; identical to SEQ ID NO: 2866

SEQ ID NO: 2878 - DNA, 201 bp, Homo sapiens; identical to SEQ ID NO: 2867

SEQ ID NO: 2879 - DNA, 201 bp, Homo sapiens; identical to SEQ ID NO: 2868

SEQ ID NO: 2880 - DNA, 201 bp, Homo sapiens; identical to SEQ ID NO: 2869

SEQ ID NO: 2881 - DNA, 201 bp, Homo sapiens; identical to SEQ ID NO: 2870

SEQ ID NO: 2882 - DNA, 201 bp, Homo sapiens; identical to SEQ ID NO: 2871

SEQ ID NO: 2883 - DNA, 114 bp, Homo sapiens; identical to SEQ ID NO: 2872

SEQ ID NO: 2884 - DNA, 201 bp, Homo sapiens; identical to SEQ ID NO: 2873

SEQ ID NO: 2885 - DNA, 201 bp, Homo sapiens; identical to SEQ ID NO: 2863

SEQ ID NO: 2886 - DNA, 201 bp, Homo sapiens; identical to SEQ ID NO: 2864

SEQ ID NO: 2887 - DNA, 201 bp, Homo sapiens
gggagtctggggacaaggaagcagattttcctgattctggctctagcttccctgccaagattttggtttttatttttttatttgaactttagtcgtgtaayaaactcaccagtggcaaaccagaaactgtcctctttgattggggaatgaagttgggaaagtcactagcattttccttggatccagtcctgtcagcatgat

SEQ ID NO: 2888 - DNA, 201 bp, Homo sapiens
tggccagggagtctggggacaaggaagcagattttcctgattctggctctagcttccctgccaagattttggtttttatttttttatttgaactttagtcrtgtaataaactcaccagtggcaaaccagaaactgtcctctttgattggggaatgaagttgggaaagtcactagcattttccttggatccagtcctgtcag

SEQ ID NO: 2889 - DNA, 201 bp, Homo sapiens; identical to SEQ ID NO: 2867

SEQ ID NO: 2890 - DNA, 201 bp, Homo sapiens; identical to SEQ ID NO: 2868

SEQ ID NO: 2891 - DNA, 201 bp, Homo sapiens; identical to SEQ ID NO: 2869

SEQ ID NO: 2892 - DNA, 201 bp, Homo sapiens; identical to SEQ ID NO: 2870

SEQ ID NO: 2893 - DNA, 201 bp, Homo sapiens
aagtcttgatgaggaacttgatcgagtcaagatgagttagtggagctgggcttggccagggagtctggggacaaggaagcagattttcctgattctggctytagcttccctgccaagattttggtttttatttttttatttgaactttagtcgtgtaataaactcaccagtggcaaaccagaaactgtcctctttgattgg

SEQ ID NO: 2894 - DNA, 114 bp, Homo sapiens; identical to SEQ ID NO: 2872

SEQ ID NO: 2895 - DNA, 201 bp, Homo sapiens; identical to SEQ ID NO: 2873

SEQ ID NO: 2896 - DNA, 201 bp, Homo sapiens
ttcagcaagcaaagcaagatgaagatgtagaagatcgtcggcggacctatagttttgagcaaccctggccgaacgcacggccggcgacgcagagcgggcgrcactcggtgtccgtggaggtgcagatgcagcggcagcggcaggaggagcgcgagagctcccagcaggcccagcgccagtacagctctctgcctcggcaaa

SEQ ID NO: 2897 - DNA, 201 bp, Homo sapiens
tacaccaaaaattggggctttctggtacttcacagcacagccatttgtcgtactttgtcatcactgtggttttctctttcctttctcagctctttgtgacrggagagtcggtcatcctattacagaagctaagccatagtccaacattgtttggtcaccatgggggtccttttgtaactgccttatgactcaacattacca

SEQ ID NO: 2898 - DNA, 113 bp, Homo sapiens
aagtggtgttaccagtgtacgcgcagtgaccttggatgacagtggctctttctcacagcctcccctgagctgtgagaaacagctttctctgtacatatgcractcctaataaa

SEQ ID NO: 2899 - DNA, 201 bp, Homo sapiens
gacatgctgacacgggtttggagcatatacccaacttttctctggatgatatggtaaagctcgtagaagtccccaacgatggagggcctctgggaatccaygtagtgcctttcagtgctcgaggcggcagaaccctggggttattagtaaaacgattggagaaaggtggtaaagctgaacatgaaaatctttttcgtgaga

SEQ ID NO: 2900 - DNA, 201 bp, Homo sapiens
ccttctggtctttcgccaggaagacgccttccacccaagggaactgaatgcagagccaagccagatgcagattccaaaagaaacgaaagcagaagatgagratattgttcttacacctgatggcaccagggaatttctgacatttgaagtcccacttaatgattcaggatctgcaggccttggtgtcagtgtcaaaggtaa

SEQ ID NO: 2901 - DNA, 201 bp, Homo sapiens
tgagaaaacgggtaaaataaaaatacaggaatcctttacatcagaagaggagaggatacgaatgaagcaggagcaggagaggattcaagccaaaactcgasaatttagggaacgacaagctcgagagcgtgactatgctgaaattcaagattttcatcggacatttggctgtgatgatgagttaatgtatgggggagtttc

SEQ ID NO: 2902 - DNA, 201 bp, Homo sapiens
gggaactgaatgcagagccaagccagatgcagattccaaaagaaacgaaagcagaagatgaggatattgttcttacacctgatggcaccagggaatttctsacatttgaagtcccacttaatgattcaggatctgcaggccttggtgtcagtgtcaaaggtaaccggtcaaaagagaaccacgcagatttgggaatctttg

SEQ ID NO: 2903 - DNA, 201 bp, Homo sapiens
ccttccacccaagggaactgaatgcagagccaagccagatgcagattccaaaagaaacgaaagcagaagatgaggatattgttcttacacctgatggcacsagggaatttctgacatttgaagtcccacttaatgattcaggatctgcaggccttggtgtcagtgtcaaaggtaaccggtcaaaagagaaccacgcagatt

SEQ ID NO: 2904 - DNA, 201 bp, Homo sapiens
gtagacagtaacagatcaactcctagcaatcatgatcggatacagcgtctgaggcaagaatttcagcaagcaaagcaagatgaagatgtagaagatcgtcrgcggacctatagttttgagcaaccctggccgaacgcacggccggcgacgcagagcgggcgacactcggtgtccgtggaggtgcagatgcagcggcagcgg

SEQ ID NO: 2905 - DNA, 201 bp, Homo sapiens
gcaatcatgatcggatacagcgtctgaggcaagaatttcagcaagcaaagcaagatgaagatgtagaagatcgtcggcggacctatagttttgagcaaccstggccgaacgcacggccggcgacgcagagcgggcgacactcggtgtccgtggaggtgcagatgcagcggcagcggcaggaggagcgcgagagctcccagc

SEQ ID NO: 2906 - DNA, 201 bp, Homo sapiens
cccctccccttctcaggttgcgaggctgaacagacttcagactcctgagaaagggaggcccttctattcctgagcacgcaaataacggatgcttcatgtcrcgcaataaaagacattttcctatgaagacttgtattttgggagtttttttaaaacctcgatggtactatggagtatttctgttgttggtatcagtgcctt

SEQ ID NO: 2907 - DNA, 201 bp, Homo sapiens
gtatagctgacgagactaaactcaatacagtggatgaccagaaagcaggttctcccagcagagatgtgggtccttccctgggtctgaagaagtcaagctcrttggagagtctgcagaccgcagttgccgaggtgactttgaatggggatattcctttccatcgtccacggccgcggataatcagaggcaggggatgcaatg

SEQ ID NO: 2908 - DNA, 201 bp, Homo sapiens
ttgatgaatcgcccagcagaaatgctgccctcagtaggataatgggtgagtcaggtaaataccagctgtcccctacagtgaatatgccccaagatgacacwgtcattatagaagatgacaggttgccagtgcttcctccacatctctctgaccagtcctcttccagctcccatgatgatgtggggtttgtgacggcagatg

SEQ ID NO: 2909 - DNA, 201 bp, Homo sapiens
ggggcccttccggcaagatgtgcccccctccccttctcaggttgcgaggctgaacagacttcagactcctgagaaagggaggcccttctattcctgagcaygcaaataacggatgcttcatgtcgcgcaataaaagacattttcctatgaagacttgtattttgggagtttttttaaaacctcgatggtactatggagtat

SEQ ID NO: 2910 - DNA, 201 bp, Homo sapiens
ccagacagtcattttgatctgctctctacggtttttcaagtcagaggcaattgatgcttgtctaatgcatccacacactgcatgtctgactggcgatgccrcgctcctaagtagttctgccatgaaacataaaagacaaaggaaaagccgttacacatcacacagagaacattttcgggtcccacagcggtggtggcagga

SEQ ID NO: 2911 - DNA, 201 bp, Homo sapiens
ctgaggcaagaatttcagcaagcaaagcaagatgaagatgtagaagatcgtcggcggacctatagttttgagcaaccctggccgaacgcacggccggcgaygcagagcgggcgacactcggtgtccgtggaggtgcagatgcagcggcagcggcaggaggagcgcgagagctcccagcaggcccagcgccagtacagctct

SEQ ID NO: 2912 - DNA, 201 bp, Homo sapiens
aaccaccatccgctccagcctcggcacctcagaatgtatttagtacgactgtaagcagtggttataacaccaaaaaaataggcaagaggcttaatatccarcttaagaaaggtacagaaggtttgggattcagcatcacttccagagatgtaacaataggtggctcagctccaatctatgtgaaaaacattctcccccggg

SEQ ID NO: 2913 - DNA, 201 bp, Homo sapiens
gatcgtcggcggacctatagttttgagcaaccctggccgaacgcacggccggcgacgcagagcgggcgacactcggtgtccgtggaggtgcagatgcagcrgcagcggcaggaggagcgcgagagctcccagcaggcccagcgccagtacagctctctgcctcggcaaagcaggaaaaatgccagctcggtctcccaggac

SEQ ID NO: 2914 - DNA, 201 bp, Homo sapiens
gaatccatgtagtgcctttcagtgctcgaggcggcagaaccctggggttattagtaaaacgattggagaaaggtggtaaagctgaacatgaaaatcttttkcgtgagaatgattgcattgtcaggattaatgatggcgaccttcgaaatagaagatttgaacaagcacaacatatgtttcgccaagccatgcgtacaccca

SEQ ID NO: 2915 - DNA, 201 bp, Homo sapiens
gactggtagcagtgtttgatgagcaggatccacatcacggaggtgatggcaccagtgccagttccacgggtacccagagcccagagatatttggtagtgascttggcaccaacaatgtctcagcctttcagccttaccaagcaacaagtgaaattgaggtcacaccttcagtccttcgagcaaatatgcctcttcatgttc

SEQ ID NO: 2916 - DNA, 201 bp, Homo sapiens
tcctttccatcgtccacggccgcggataatcagaggcaggggatgcaatgagagcttcagagctgccatcgacaaatcttatgataaacccgcggtagatsatgatgatgaaggcatggagaccttggaagaagacacagaagaaagttcaagatcagggagagagtctgtatccacagccagtgatcagccttcccactc

SEQ ID NO: 2917 - DNA, 201 bp, Homo sapiens; identical to SEQ ID NO: 2902

SEQ ID NO: 2918 - DNA, 201 bp, Homo sapiens; identical to SEQ ID NO: 2903

SEQ ID NO: 2919 - DNA, 201 bp, Homo sapiens; identical to SEQ ID NO: 2899

SEQ ID NO: 2920 - DNA, 201 bp, Homo sapiens
gtcagactgacgagactaaactcaatacagtggatgaccagaaagcaggttctcccagcagagatgtgggtccttccctgggtctgaagaagtcaagctcrttggagagtctgcagaccgcagttgccgaggtgactttgaatggggatattcctttccatcgtccacggccgcggataatcagaggcaggggatgcaatg

SEQ ID NO: 2921 - DNA, 201 bp, Homo sapiens
ttgaggggcttgatgaatcgcccagcagaaatgctgccctcagtaggataatgggtaaataccagctgtcccctacagtgaatatgccccaagatgacacwgtcattatagaagatgacaggttgccagtgcttcctccacatctctctgaccagtcctcttccagctcccatgatgatgtggggtttgtgacggcagatg

SEQ ID NO: 2922 - DNA, 201 bp, Homo sapiens; identical to SEQ ID NO: 2912

SEQ ID NO: 2923 - DNA, 201 bp, Homo sapiens; identical to SEQ ID NO: 2914

SEQ ID NO: 2924 - DNA, 201 bp, Homo sapiens; identical to SEQ ID NO: 2915

SEQ ID NO: 2925 - DNA, 201 bp, Homo sapiens; identical to SEQ ID NO: 2916

SEQ ID NO: 2926 - DNA, 201 bp, Homo sapiens; identical to SEQ ID NO: 2900

SEQ ID NO: 2927 - DNA, 169 bp, Homo sapiens
aagctccgcgcgggggcttcctcggctccttgctgttgccgccgccgcagctgctgccgcggttggtgrggttgggtgagaggaggagctgtcgcggaccctgtagagtcggtctctgttgctctttttgcctgaggagtcttccatcctacgtcgagctctgactccc

SEQ ID NO: 2928 - DNA, 201 bp, Homo sapiens
aaaacaaagttgttagcgtatttacatgaaggcgcattatgttgtcgtgtgtttcagtttcacattaaactgaaccttttactaattgtgagctaaagagrtatatatatatatgtgtgtgtatatatatatatctacatgtctttctgtagcctctgcatactactggctgtcatcacaccagcgtacagtagctaaatt

SEQ ID NO: 2929 - DNA, 201 bp, Homo sapiens
ataatatgaaagaattgatacaaggctatttgtctcgtaaacctggtctgcagaaagtcaaacttacaaaaactgttgtgacaaatgttatgtacatatawtgatatgtaactgcattagtggccattttgaatcacagtggtgatcgtgtgaatatatttaacactgtgttaaattaatttacgttgctattttatttta

SEQ ID NO: 2930 - DNA, 201 bp, Homo sapiens
gttgctattttattttaatcataaacaactaccatgtttcttaatgttttgtgtaaatttaaggtaattatactatccttttaaacttcaagaaaacaaarttgttagcgtatttacatgaaggcgcattatgttgtcgtgtgtttcagtttcacattaaactgaaccttttactaattgtgagctaaagagatatatata

SEQ ID NO: 2931 - DNA, 201 bp, Homo sapiens
gggggcttcctcggctccttgctgttgccgccgccgcagctgctgccgcggttggtggggttgggtgagaggaggagctgtcgcggaccctgtagagtcgrtctctgttgctctttttgcctgaggagtcttccatcctacgtcgagctctgactcccgtgctgtcgagagggagtccccggggacacctcggcacgcagc

SEQ ID NO: 2932 - DNA, 201 bp, Homo sapiens
caacagccacctcagccacagcaaccatattctcagaaggctctgctataggacccggtgttcctcttggtggcagatacctgctaaatgccactgacaaygttatgagattcattactatcttaagatgtgtttatcctcagcttataggaatctctccaggtcaacaggttcaaatattcaagaaggtagaactctcct

SEQ ID NO: 2933 - DNA, 201 bp, Homo sapiens
caaacccagcccttcctagtcagcagactcaggccgcttacccaaatacaatggtcagttccgttcaaggaaacacatatcccagccaggcgccagtatayagtcctcctcctgccgctactgctgctgctgcaactgccgatgtcactctgtaccagaatgcaggacctaatatgccccaggtgccaaactataacttaa

SEQ ID NO: 2934 - DNA, 169 bp, Homo sapiens; identical to SEQ ID NO: 2927

SEQ ID NO: 2935 - DNA, 201 bp, Homo sapiens; identical to SEQ ID NO: 2929

SEQ ID NO: 2936 - DNA, 201 bp, Homo sapiens; identical to SEQ ID NO: 2931

SEQ ID NO: 2937 - DNA, 201 bp, Homo sapiens; identical to SEQ ID NO: 2932

SEQ ID NO: 2938 - DNA, 201 bp, Homo sapiens; identical to SEQ ID NO: 2933

SEQ ID NO: 2939 - DNA, 201 bp, Homo sapiens
gctgaggagtttcgcaggcaacaggcagactttgtggacctgagcttcccaacaatttccagtacgggacccaacggcgccatcattcactacgcgccagkccctgagacgaataggaccttgtccctggatgaggtgtaccttattgactcgggtgctcaatacaaggatggcaccacagatgtgacgcggacaatgcat

SEQ ID NO: 2940 - DNA, 201 bp, Homo sapiens
gggcacgtcaccgccgaatggcagcctccagaaagccaccgcgagtaagggtgaatcaccaggattttcaactgagaaatttaagaataattgaacctaasgaggtgacacactcaggagacacaggtgtggaaacagaatgcctccaaaggtgacttcagagctgcttcggcagctgagacaagccatgaggaactctga

SEQ ID NO: 2941 - DNA, 201 bp, Homo sapiens
tttcccctttcctttccttcttccctacctcccctttttactttagactttaagaagaacagaaaatcttcttatcctctttgatattttattgcaaacaytcagtcttttatgattttttaattgttgagaacaagccaagaataaaattgctgcaccagaaggagggtccctccaaagttgaacacttggtgaaaggaa

SEQ ID NO: 2942 - DNA, 201 bp, Homo sapiens; identical to SEQ ID NO: 2939

SEQ ID NO: 2943 - DNA, 201 bp, Homo sapiens; identical to SEQ ID NO: 2941

SEQ ID NO: 2944 - DNA, 201 bp, Homo sapiens; identical to SEQ ID NO: 2939

SEQ ID NO: 2945 - DNA, 201 bp, Homo sapiens
gggcacgtcaccgccgaatggcagcctccagaaagccaccgcgagtaagggtgaatcaccaggattttcaactgagaaatttaagaataattgaacctaasgaggtgacacactcaggagacacaggtgtggaaacagacggcagaatgcctccaaaggtgacttcagagctgcttcggcagctgagacaagccatgagga

SEQ ID NO: 2946 - DNA, 201 bp, Homo sapiens; identical to SEQ ID NO: 2941

SEQ ID NO: 2947 - DNA, 201 bp, Homo sapiens; identical to SEQ ID NO: 2939

SEQ ID NO: 2948 - DNA, 201 bp, Homo sapiens; identical to SEQ ID NO: 2941

SEQ ID NO: 2949 - DNA, 201 bp, Homo sapiens
aaactgaagaattgcggtttcttagacgtcaggaacttcgggaattaagatttcttcagaaagaagagcaaagagcccaacaacagctcaatagcaaactrcagcaacaacgagaacaaattttccggcgctttgagcaggaaatgatgagtaaaaagcgacaatatgaccaggaaattgagaatctagaaaaacagcaga

SEQ ID NO: 2950 - DNA, 201 bp, Homo sapiens
gaatttttgcttctcttaccgtttgatagaaattttcatcctaaaatacatgtacaaagtttggaaagatgaaaaaaagaggtagcttttagattgcaaaytggaaatgtaaaactcatgaaatttaagcaatataggtttagctatctgtgtttattttctaaaataatacctgagctggttaaatgatttctctccatc

SEQ ID NO: 2951 - DNA, 201 bp, Homo sapiens
gcaaatattcaggcagttgatagtgaagttgggcttacaaaggaagacacccaagagaaattgggggaagacgacaaaactcaaaaagatgtgatcagcartacaagtgatgtgataggaacatgtgaggcagcagatgtggctcagaaagtggatgaagacagtgctgaggatacgcagagtaatgatgggaaagaagtg

SEQ ID NO: 2952 - DNA, 201 bp, Homo sapiens
tagctaattctgtttaaaactctgtcagaggcctgcaggctgtgagttatatttataaatatatcttcagaaattaatcttaaaagaggcattagttcagmatacttttttaaaagtttaaattaaatatttaggcacgtcagaaattacttttccttattttgaaatgaggctacttatgtcttggttttattttgttcc

SEQ ID NO: 2953 - DNA, 201 bp, Homo sapiens
gagttatatttataaatatatcttcagaaattaatcttaaaagaggcattagttcagaatacttttttaaaagtttaaattaaatatttaggcacgtcagraattacttttccttattttgaaatgaggctacttatgtcttggttttattttgttccatgtttaaatcattcactttgatttgagtgggaaaagcctgaa

SEQ ID NO: 2954 - DNA, 201 bp, Homo sapiens
gaccctatgactacaaagctgatgtttggtccctgggtatcactttaatagaaatggctgagatagaaccacctcatcatgaattaaatccaatgcgagtrctgctaaaaatagcaaaatctgagccacctacattagcacagccatccagatggtcttcaaattttaaggactttctaaagaaatgcttagaaaagaatg

SEQ ID NO: 2955 - DNA, 201 bp, Homo sapiens
gctttaggaagtgaagttcaggatgcttctaaagtcactactcagatagataaagagaaaaaagaaattccagtgtcaattaaaaaagagcctgaagttaytgtagtttcacagcccactgaacctcagcctgttctaatacccagtattaatatcaactctgacagtggagaaaataaagaagaaataggttctttatca

SEQ ID NO: 2956 - DNA, 170 bp, Homo sapiens
tgtttgccaggtttcaatgtgggctgcagctttttgtgctccttctctggtttgcagtgtaatgagttcataagctaaattttcagaaagaattttgtttmagattatgcctcttatctacttgagagcaacatgtcttttcaatcatgggattgacacatgaaaaataa

SEQ ID NO: 2957 - DNA, 201 bp, Homo sapiens
ttcttttctgagaaatgatttttataagaaatggggtgattctttaaatgcttttcttaagttgaaggcacaacagttaatggctgtattgttgctattcygttgctgacatgtttttgataaagctttaacattcctgctactaattttggcggagagtgtttgccaggtttcaatgtgggctgcagctttttgtgctcc

SEQ ID NO: 2958 - DNA, 201 bp, Homo sapiens
tgaactacttacatgataataagatcatccacagagatctgaaggctggcaacattctctttaccttagatggagatatcaaattggcggattttggagtrtcagctaaaaacacgaggacaattcaaagaagagattcctttattggtacaccatattggatggctcctgaagtagtcatgtgtgaaacatctaaggaca

SEQ ID NO: 2959 - DNA, 201 bp, Homo sapiens
gaagttgggcttacaaaggaagacacccaagagaaattgggggaagacgacaaaactcaaaaagatgtgatcagcaatacaagtgatgtgataggaacatrtgaggcagcagatgtggctcagaaagtggatgaagacagtgctgaggatacgcagagtaatgatgggaaagaagtggtcgaagtaggccagaaattaatt

SEQ ID NO: 2960 - DNA, 201 bp, Homo sapiens; identical to SEQ ID NO: 2949

SEQ ID NO: 2961 - DNA, 201 bp, Homo sapiens
tcagttatattacttttgaggctggtgaaaaatttaaatgtaactttgtgggaacactgattcatatttagaaaatgtaaatgtctgtagcactttcttgmagttaatttgaaaactttggatgctgaaccttgtttgtcagtgatttagatgatttaaaaatgcatgtgtgatttgaattttataattgttttgacaagc

SEQ ID NO: 2962 - DNA, 201 bp, Homo sapiens; identical to SEQ ID NO: 2950

SEQ ID NO: 2963 - DNA, 201 bp, Homo sapiens; identical to SEQ ID NO: 2951

SEQ ID NO: 2964 - DNA, 201 bp, Homo sapiens; identical to SEQ ID NO: 2952

SEQ ID NO: 2965 - DNA, 201 bp, Homo sapiens
tgctgtgaacacagcagacctgcacacttctgcagatccagctcctacagcttggggcactaggctgcctttcctagtcctgtcaacaaccatacagtgcraattgctgaattagctgctattctatgtggagtcacattaagctttttcttatctttttctatggggaagctatagggtgggtaaggaaaaaatgttgaa

SEQ ID NO: 2966 - DNA, 201 bp, Homo sapiens
taaatcttttcaaaaagtgttttgttataaaatacgctgtttgtacccataccagcccacctcttctgaggccctgtattcaaatagatgatagtgatctrtctttcctgcatgaagtgtaggtggcgagtgggcgaggggcgcagacttctttgaaatcgaagggtacagtcaaatctactgctgatttggttgttttgt

SEQ ID NO: 2967 - DNA, 201 bp, Homo sapiens; identical to SEQ ID NO: 2953

SEQ ID NO: 2968 - DNA, 201 bp, Homo sapiens; identical to SEQ ID NO: 2955

SEQ ID NO: 2969 - DNA, 201 bp, Homo sapiens; identical to SEQ ID NO: 2954

SEQ ID NO: 2970 - DNA, 170 bp, Homo sapiens; identical to SEQ ID NO: 2956

SEQ ID NO: 2971 - DNA, 201 bp, Homo sapiens; identical to SEQ ID NO: 2957

SEQ ID NO: 2972 - DNA, 201 bp, Homo sapiens; identical to SEQ ID NO: 2958

SEQ ID NO: 2973 - DNA, 201 bp, Homo sapiens
tgccatgaaacacatacagacttctccgaacgtgcaccctcatcagccacctcctcccctctttccctgagtgctgtgaacacagcagacctgcacacttytgcagatccagctcctacagcttggggcactaggctgcctttcctagtcctgtcaacaaccatacagtgcgaattgctgaattagctgctattctatgtg

SEQ ID NO: 2974 - DNA, 201 bp, Homo sapiens; identical to SEQ ID NO: 2959

SEQ ID NO: 2975 - DNA, 201 bp, Homo sapiens; identical to SEQ ID NO: 2949

SEQ ID NO: 2976 - DNA, 201 bp, Homo sapiens; identical to SEQ ID NO: 2950

SEQ ID NO: 2977 - DNA, 201 bp, Homo sapiens; identical to SEQ ID NO: 2951

SEQ ID NO: 2978 - DNA, 201 bp, Homo sapiens; identical to SEQ ID NO: 2952

SEQ ID NO: 2979 - DNA, 201 bp, Homo sapiens; identical to SEQ ID NO: 2953

SEQ ID NO: 2980 - DNA, 201 bp, Homo sapiens; identical to SEQ ID NO: 2954

SEQ ID NO: 2981 - DNA, 201 bp, Homo sapiens; identical to SEQ ID NO: 2955

SEQ ID NO: 2982 - DNA, 170 bp, Homo sapiens; identical to SEQ ID NO: 2956

SEQ ID NO: 2983 - DNA, 201 bp, Homo sapiens; identical to SEQ ID NO: 2957

SEQ ID NO: 2984 - DNA, 201 bp, Homo sapiens; identical to SEQ ID NO: 2958

SEQ ID NO: 2985 - DNA, 201 bp, Homo sapiens; identical to SEQ ID NO: 2959

SEQ ID NO: 2986 - DNA, 201 bp, Homo sapiens
gagttatatttataaatatatcttcagaaattaatcttaaaagaggcattagttcagaatacttttttaaaagtttaaattaaatatttaggcacgtcagraattacttttccttattttgaaatgaggctacttatgtcttggttttattttgttccatgtttaaatcattcagtttgatttgagtgggaaaagcctgaa

SEQ ID NO: 2987 - DNA, 201 bp, Homo sapiens; identical to SEQ ID NO: 2955

SEQ ID NO: 2988 - DNA, 201 bp, Homo sapiens; identical to SEQ ID NO: 2958

SEQ ID NO: 2989 - DNA, 201 bp, Homo sapiens; identical to SEQ ID NO: 2951

SEQ ID NO: 2990 - DNA, 201 bp, Homo sapiens; identical to SEQ ID NO: 2961

SEQ ID NO: 2991 - DNA, 201 bp, Homo sapiens; identical to SEQ ID NO: 2950

SEQ ID NO: 2992 - DNA, 201 bp, Homo sapiens; identical to SEQ ID NO: 2952

SEQ ID NO: 2993 - DNA, 201 bp, Homo sapiens; identical to SEQ ID NO: 2949

SEQ ID NO: 2994 - DNA, 201 bp, Homo sapiens; identical to SEQ ID NO: 2959

SEQ ID NO: 2995 - DNA, 201 bp, Homo sapiens; identical to SEQ ID NO: 2954

SEQ ID NO: 2996 - DNA, 201 bp, Homo sapiens
agcagcctgttcctccctatgggatgtatccacccccaggaggaaacccaccctccaggatgccctcatatccgccatacccaggggcccctgtgccgggycagcccatgccaccccccggacagcagcccccaggggcctaccctgggcagccaccagtgacctaccctggtcagcctccagtgccactccctgggcagc

SEQ ID NO: 2997 - DNA, 201 bp, Homo sapiens
gaaatgtcttcctggtaccaacttgttttcttctgcttgattctgccctgtggctcagaggtctggccttatcagccagtgaaagttcatgtaaccttacrtagagatttgtgtgcaggaaaccctgagcatacactagtttgcagggactcgtaaggacatgggaagggaggttcccgaaatccaggcaggaggcccaga

SEQ ID NO: 2998 - DNA, 201 bp, Homo sapiens
accctgggcagccaccagtgacctaccctggtcagcctccagtgccactccctgggcagcagcagccagtgccgagctacccaggatacccggggtctggractgtcacccccgctgtgcccccaacccagtttggaagccgaggcaccatcactgatgctcccggctttgaccccctgcgagatgccgaggtcctgcgga

SEQ ID NO: 2999 - DNA, 196 bp, Homo sapiens
cacacaggtgtgtgtctggggaagagacttacagaagtggagttgctgagtcaaagttgtggtggtggctgccctttcaagaagctgggtcccacrggccagcaggggctctcaggcagagcctgaatgtgctttcgtcttctcttccagatctaaccatgagctaccctggctatcccccgcccccaggtggcta

SEQ ID NO: 3000 - DNA, 201 bp, Homo sapiens
gctcagaggtctggccttatcagccagtgaaagttcatgtaaccttacgtagagatttgtgtgcaggaaaccctgagcatacactagtttgcagggactcrtaaggacatgggaagggaggttcccgaaatccaggcaggaggcccagacacctgaaaggcaaagggatcttggttggttgcaggtgcagtgaagtccact

SEQ ID NO: 3001 - DNA, 201 bp, Homo sapiens
catatccgccatacccaggggcccctgtgccgggccagcccatgccaccccccggacagcagcccccaggggcctaccctgggcagccaccagtgacctaycctggtcagcctccagtgccactccctgggcagcagcagccagtgccgagctacccaggatacccggggtctgggactgtcacccccgctgtgcccccaa

SEQ ID NO: 3002 - DNA, 201 bp, Homo sapiens
gtgccactccctgggcagcagcagccagtgccgagctacccaggatacccggggtctgggactgtcacccccgctgtgcccccaacccagtttggaagccraggcaccatcactgatgctcccggctttgaccccctgcgagatgccgaggtcctgcggaaggccatgaaaggcttcgggacggatgagcaggccatcatt

SEQ ID NO: 3003 - DNA, 201 bp, Homo sapiens
gcggctcctcatctctctctctcagggaaaccgtgatgaaagcacaaacgtggacatgtcactcgcccagagagatgcccaggagctgtatgcggccgggragaaccgcctgggaacagacgagtccaagttcaatgcggttctgtgctcccggagccgggcccacctggtagcagttttcaatgagtaccagagaatgac

SEQ ID NO: 3004 - DNA, 201 bp, Homo sapiens
cccacctgccggcaacaccagtgccaggaaaaggccaaaagaatgtctgtttctaacaaatccacaaatagccccgagattcaccgtcctagagcttaggyctgtcttccacccctcctgacccgtatagtgtgccacaggacctgggtcggtctagaactctctcaggatgccttttctaccccatccctcacagcctct

SEQ ID NO: 3005 - DNA, 201 bp, Homo sapiens
tgctcccggctttgaccccctgcgagatgccgaggtcctgcggaaggccatgaaaggcttcgggacggatgagcaggccatcattgactgcctggggagtygctccaacaagcagcggcagcagatcctactttccttcaagacggcttacggcaaggatttgatcaaagatctgaaatctgaactgtcaggaaactttga

SEQ ID NO: 3006 - DNA, 201 bp, Homo sapiens
gaggcaccatcactgatgctcccggctttgaccccctgcgagatgccgaggtcctgcggaaggccatgaaaggcttcgggacggatgagcaggccatcatygactgcctggggagtcgctccaacaagcagcggcagcagatcctactttccttcaagacggcttacggcaaggatttgatcaaagatctgaaatctgaac

SEQ ID NO: 3007 - DNA, 201 bp, Homo sapiens
gaaaggcaaagggatcttggttggttgcaggtgcagtgaagtccactgaaggtgtggtgcgaagaatgcagtccttcacccaggtcccaggagggaagaagggtgtgtgctaattcctggtgcccctcggcgggggccagagagaaggatggggacaacccagagagtcacaagaccagtgcctcccctcagggtgcctcc

SEQ ID NO: 3008 - DNA, 201 bp, Homo sapiens
catacaagtctgtttgctgcatacacatttctggtgagggcgactgggtgggtgaagcaccgtgtcctcgctgaggagagaaagggaggcgtgcctgagarggtagcctgtgcatctggtgagtgtgtcacgagctttgttactgccaaactcactcctttttagaaaaaacaaaaaaaaagggccagaaagtcattcctt

SEQ ID NO: 3009 - DNA, 201 bp, Homo sapiens
tttatttggaggcatattttcttttcttacagtcattgccagacagaggcatacaagtctgtttgctgcatacacatttctggtgagggcgactgggtggktgaagcaccgtgtcctcgctgaggagagaaagggaggcgtgcctgagaaggtagcctgtgcatctggtgagtgtgtcacgagctttgttactgccaaact

SEQ ID NO: 3010 - DNA, 201 bp, Homo sapiens
tctgtggtggcaatgactgaacagtgactggtggctcacttctgcccacctgccggcaacaccagtgccaggaaaaggccaaaagaatgtctgtttctaamaaatccacaaatagccccgagattcaccgtcctagagcttaggcctgtcttccacccctcctgacccgtatagtgtgccacaggacctgggtcggtctag

SEQ ID NO: 3011 - DNA, 201 bp, Homo sapiens
ggccgtggtgaaatgtctcaagaataccccagccttctttgcggagaggctcaacaaggccatgaggggggcaggaacaaaggaccggaccctgattcgcrtcatggtgtctcgcagcgagaccgacctcctggacatcagatcagagtataagcggatgtacggcaagtcgctgtaccacgacatctcgggagatacttc

SEQ ID NO: 3012 - DNA, 201 bp, Homo sapiens
gaggagagaaagggaggcgtgcctgagaaggtagcctgtgcatctggtgagtgtgtcacgagctttgttactgccaaactcactcctttttagaaaaaacaaaaaaaaagggccagaaagtcattccttccatcttccttgcagaaaccacgagaacaaagccagttccctgtcagtgacagggcttcttgtaatttgtgg

SEQ ID NO: 3013 - DNA, 201 bp, Homo sapiens
cgcccccaggtggctacccaccagctgcaccaggtggtggtccctggggaggtgctgcctaccctcctccgcccagcatgccccccatcgggctggataaygtggccacctatgcggggcagttcaaccaggactatctctcgggaatggcggccaacatgtctgggacatttggaggagccaacatgcccaacctgtacc

SEQ ID NO: 3014 - DNA, 201 bp, Homo sapiens; identical to SEQ ID NO: 2996

SEQ ID NO: 3015 - DNA, 201 bp, Homo sapiens; identical to SEQ ID NO: 2997

SEQ ID NO: 3016 - DNA, 201 bp, Homo sapiens; identical to SEQ ID NO: 2998

SEQ ID NO: 3017 - DNA, 201 bp, Homo sapiens; identical to SEQ ID NO: 3000

SEQ ID NO: 3018 - DNA, 201 bp, Homo sapiens; identical to SEQ ID NO: 3007

SEQ ID NO: 3019 - DNA, 201 bp, Homo sapiens; identical to SEQ ID NO: 3001

SEQ ID NO: 3020 - DNA, 201 bp, Homo sapiens; identical to SEQ ID NO: 3008

SEQ ID NO: 3021 - DNA, 201 bp, Homo sapiens; identical to SEQ ID NO: 3003

SEQ ID NO: 3022 - DNA, 201 bp, Homo sapiens
gtgccactccctgggcagcagcagccagtgccgagctacccaggatacccggggtctgggactgtcacccccgctgtgcccccaacccagtttggaagccraggcaccatcactgatgctcccggctttgaccccctgcgagatgccgaggtcctgcggaaggccatgaaaggcttcggatttgatcaaagatctgaaatc

SEQ ID NO: 3023 - DNA, 201 bp, Homo sapiens; identical to SEQ ID NO: 3004

SEQ ID NO: 3024 - DNA, 201 bp, Homo sapiens; identical to SEQ ID NO: 3009

SEQ ID NO: 3025 - DNA, 201 bp, Homo sapiens; identical to SEQ ID NO: 3010

SEQ ID NO: 3026 - DNA, 201 bp, Homo sapiens; identical to SEQ ID NO: 3011

SEQ ID NO: 3027 - DNA, 201 bp, Homo sapiens; identical to SEQ ID NO: 3013

SEQ ID NO: 3028 - DNA, 201 bp, Homo sapiens; identical to SEQ ID NO: 3012

SEQ ID NO: 3029 - DNA, 201 bp, Homo sapiens; identical to SEQ ID NO: 2996

SEQ ID NO: 3030 - DNA, 201 bp, Homo sapiens; identical to SEQ ID NO: 2997

SEQ ID NO: 3031 - DNA, 201 bp, Homo sapiens; identical to SEQ ID NO: 2998

SEQ ID NO: 3032 - DNA, 201 bp, Homo sapiens; identical to SEQ ID NO: 3000

SEQ ID NO: 3033 - DNA, 201 bp, Homo sapiens; identical to SEQ ID NO: 3001

SEQ ID NO: 3034 - DNA, 201 bp, Homo sapiens; identical to SEQ ID NO: 3002

SEQ ID NO: 3035 - DNA, 201 bp, Homo sapiens; identical to SEQ ID NO: 3003

SEQ ID NO: 3036 - DNA, 201 bp, Homo sapiens; identical to SEQ ID NO: 3004

SEQ ID NO: 3037 - DNA, 201 bp, Homo sapiens; identical to SEQ ID NO: 3005

SEQ ID NO: 3038 - DNA, 201 bp, Homo sapiens; identical to SEQ ID NO: 3006

SEQ ID NO: 3039 - DNA, 201 bp, Homo sapiens; identical to SEQ ID NO: 3007

SEQ ID NO: 3040 - DNA, 201 bp, Homo sapiens; identical to SEQ ID NO: 3008

SEQ ID NO: 3041 - DNA, 201 bp, Homo sapiens; identical to SEQ ID NO: 3009

SEQ ID NO: 3042 - DNA, 201 bp, Homo sapiens; identical to SEQ ID NO: 3010

SEQ ID NO: 3043 - DNA, 201 bp, Homo sapiens; identical to SEQ ID NO: 3011

SEQ ID NO: 3044 - DNA, 201 bp, Homo sapiens; identical to SEQ ID NO: 3012

SEQ ID NO: 3045 - DNA, 201 bp, Homo sapiens; identical to SEQ ID NO: 3013

SEQ ID NO: 3046 - DNA, 201 bp, Homo sapiens
tgatttggagaacctgctggatcacttggcagaagtgacaccagctctggagtacctcagtctgctgggcaacgtggcctgtcccaacgagctggtcagcytggaaaaggatgaggaagactacaagagatacagatgctttgttctgtacaagctgcccaacttgaaatttctggatgcccagaaagtaaccagacaaga

SEQ ID NO: 3047 - DNA, 137 bp, Homo sapiens
acgtttactatgggaaaaactcagagggcaacaggtttatccgagatgaccagctctgaagccaacttctgtataccttcacccatttcatgaaaataaawtcaaaagggaaatcaaaaataaagaaaacgctaaag

SEQ ID NO: 3048 - DNA, 140 bp, Homo sapiens
gttgaagaaagaggatctggctgaaagacccgcaactttyacttgttgagaacctttagccagcgccggcgtgcatgtgttttagttttattctttttcccttgcccccaaagccgtggagtacctgctgttgctctcat

SEQ ID NO: 3049 - DNA, 201 bp, Homo sapiens
gcccagaaagtaaccagacaagaacgagaggaggcgttggtcagaggagtcttcatgaaggtggtgaagcccaaggcttctagtgaggacgttgccagctycccggagcgccactacacgcccttgccttctgcttccagggaactcaccagtcaccaagatgaagtttcattcttgtcgcccaggctggagtgcagtggt

SEQ ID NO: 3050 - DNA, 201 bp, Homo sapiens; identical to SEQ ID NO: 3046

SEQ ID NO: 3051 - DNA, 137 bp, Homo sapiens; identical to SEQ ID NO: 3047

SEQ ID NO: 3052 - DNA, 140 bp, Homo sapiens; identical to SEQ ID NO: 3048

SEQ ID NO: 3053 - DNA, 201 bp, Homo sapiens
gcccagaaagtaaccagacaagaacgagaggaggcgttggtcagaggagtcttcatgaaggtggtgaagcccaaggcttctagtgaggacgttgccagctycccggagcgccactacacgcccttgccttctgcttccagggaactcaccagtcaccaaggtgtcctggggaagtgtcgctacgtttactatgggaaaaac

SEQ ID NO: 3054 - DNA, 201 bp, Homo sapiens; identical to SEQ ID NO: 3046

SEQ ID NO: 3055 - DNA, 137 bp, Homo sapiens; identical to SEQ ID NO: 3047

SEQ ID NO: 3056 - DNA, 140 bp, Homo sapiens; identical to SEQ ID NO: 3048

SEQ ID NO: 3057 - DNA, 201 bp, Homo sapiens
gcccagaaagtaaccagacaagaacgagaggaggcgttggtcagaggagtcttcatgaaggtggtgaagcccaaggcttctagtgaggacgttgccagctycccggagcgccactacacgcccttgccttctgcttccagggaactcaccagtcaccaagatttaaatattccagtgttgagaatccacagtaaacttgct

SEQ ID NO: 3058 - DNA, 201 bp, Homo sapiens
atgctgaagcccagggatggcgtccgcctgaaggtgcagtaccgccctgaggagttcacgaaggccaagggcctgcctggtgacagcttctacatcagggycctgtacgaccggctggcagatgtggagcaagagttgagctttaagaaggacgacatcctctacgtggatgacaccttaccccagggcacgttcgggtcc

SEQ ID NO: 3059 - DNA, 201 bp, Homo sapiens
agcggctccacgaggaggaccagaaggagatcggtgacctccgtgcccagcagcagcaggtgttgaagcacaacgggtcatccgagattctcaacaaactrtatgacacggccatggacaagttggaggtggtcaagaaggactatgacgcccttcggaagaggtacagtgagaaagtcgccatccacaatgcagacctga

SEQ ID NO: 3060 - DNA, 201 bp, Homo sapiens
ggtacccactccactctccagggcagtggcaccaccaccccggagcatccatctgtcatcgacccactgatggagcaggacgaggggcctagcaccccccmagccaagcagagcagctccaggattgcgggagatgccaacaagaagaccctggagccacgcgttgtcttcatcaaaaagtcccagctggagcttggggtg

SEQ ID NO: 3061 - DNA, 201 bp, Homo sapiens
cccgctctaggagaatgctgtgctgtggatgactgcagctggccgcctgaggggacgccagactcagctcttttctagcgactgaaagtagaagtctgtcygtctatgaacatgcgggggaaggatccggaaccaggacccagaagcacctcctttgtagacagagggccacggctgcgtgcgatccaggcccaggcccac

SEQ ID NO: 3062 - DNA, 201 bp, Homo sapiens
ggaggaagtccctgggtgggaaggtggtcacgccgctgcacatcaacctcagtggacagaaagacagtggcatcagtctggagaatggagtgtatgctgcygctgtgctgcctggaagccctgccgctaaagaagggtcccttgctgtgggagacaggatcgttgcgatcaatggcattgcactggacaacaagtctctga

SEQ ID NO: 3063 - DNA, 201 bp, Homo sapiens
atggtcaatcaagaacaaaataaagtcctgtggattccagcctgcccgctctaggagaatgctgtgctgtggatgactgcagctggccgcctgaggggacrccagactcagctcttttctagcgactgaaagtagaagtctgtctgtctatgaacatgcgggggaaggatccggaaccaggacccagaagcacctcctttg

SEQ ID NO: 3064 - DNA, 201 bp, Homo sapiens
tgctgtgctgtggatgactgcagctggccgcctgaggggacgccagactcagctcttttctagcgactgaaagtagaagtctgtctgtctatgaacatgcrggggaaggatccggaaccaggacccagaagcacctcctttgtagacagagggccacggctgcgtgcgatccaggcccaggcccacacactctgcccgtgt

SEQ ID NO: 3065 - DNA, 201 bp, Homo sapiens
agcagcagcaggtgttgaagcacaacgggtcatccgagattctcaacaaactgtatgacacggccatggacaagttggaggtggtcaagaaggactatgaygcccttcggaagaggtacagtgagaaagtcgccatccacaatgcagacctgagccgcctggagcagctgggggaggagaaccagcggttgctgaagcaga

SEQ ID NO: 3066 - DNA, 201 bp, Homo sapiens
agttcacgaaggccaagggcctgcctggtgacagcttctacatcagggccctgtacgaccggctggcagatgtggagcaagagttgagctttaagaaggaygacatcctctacgtggatgacaccttaccccagggcacgttcgggtcctggatggcttggcagctggacgagaatgcccagaagatccagcgcgggcaga

SEQ ID NO: 3067 - DNA, 189 bp, Homo sapiens
atgccctcagactcagaaagcagcagctccctcagcagtgtgggcactaccgggaaggcgccgtccccaccacccctcctcactgaccrgcaagtgaatgagaaggtggagaacctctccattcagctgcggctgatgacccgggagagaaacgagctccgcaagcgcctggcctttgctacgcatggc

SEQ ID NO: 3068 - DNA, 201 bp, Homo sapiens
tgtctgtctatgaacatgcgggggaaggatccggaaccaggacccagaagcacctcctttgtagacagagggccacggctgcgtgcgatccaggcccaggmccacacactctgcccgtgtcacacgtgtgctttaacacaaaacagataacactaaagacgggttcagcacccacctttctttagccagctgatcagagat

SEQ ID NO: 3069 - DNA, 179 bp, Homo sapiens
tcgcagaccctctgggggtaggggctgttttctaagttacaggcagagtgggactgagatggtacagtgtgcacagacaggtactgagctgacagactggrattttctgtactaaaatgttactttgtatcaaaagttaaacaggctttagtacaacaaataaaggtcaatttctgtaa

SEQ ID NO: 3070 - DNA, 201 bp, Homo sapiens
ttttacaggtacaagttttctagctcagacaaactatgaaaaactgtagactattctcaaggtattaactcgcagaccctctgggggtaggggctgttttytaagttacaggcagagtgggactgagatggtacagtgtgcacagacaggtactgagctgacagactgggattttctgtactaaaatgttactttgtatca

SEQ ID NO: 3071 - DNA, 201 bp, Homo sapiens
ttgtcatcttcatccactacaagagcgccaagcacatcaaggagcagagagaccccatctacctgagggacaaggtgactcagaggcattccaaagagcartttgaggcggcgcagaagcttgagcaggagtacagcaggtacttcacaggggtcatccagggaggagccctgtcaagcatttgcactcagatcttggcaa

SEQ ID NO: 3072 - DNA, 201 bp, Homo sapiens
tgtagactattctcaaggtattaactcgcagaccctctgggggtaggggctgttttctaagttacaggcagagtgggactgagatggtacagtgtgcacaracaggtactgagctgacagactgggattttctgtactaaaatgttactttgtatcaaaagttaaacaggctttagtacaacaaataaaggtcaatttctg

SEQ ID NO: 3073 - DNA, 201 bp, Homo sapiens
cctccagcgcccgcctgggttcttcgagtaacttgcagttcaaggcggaacgcattaaaatcccatcaacaccaagatatccgcggagtgtcgtgggctcygagagaggttcagtgtcacattctgaatgcagcactcctccacagtcacccctgaacatcgacaccctgtcctcttgtagccagtcccagacctcagcct

SEQ ID NO: 3074 - DNA, 201 bp, Homo sapiens
gagaactctccccggagctccaggagtgggcaccttactcgcctgggcattccagccggcacagcaaccccccgctataccctagcaggccgtctgtgggyactgttccccggagtttgacccccagcaccactgtgagctccatcctgcggaaccccatctacactgtgcgcagtcacagggtcggcccctgcagctctc

SEQ ID NO: 3075 - DNA, 201 bp, Homo sapiens
ccctcctcactgaccggcaagtgaatgagaaggtggagaacctctccattcagctgcggctgatgacccgggagagaaacgagctccgcaagcgcctggcstttgctacgcatggcacggcctttgacaagaggccctaccacaggctgaatcctgactatgagaggctgaagatccagtgcgtgcgagccatgtcggacc

SEQ ID NO: 3076 - DNA, 201 bp, Homo sapiens
ccgctaaagaagggtcccttgctgtgggagacaggatcgttgcgatcaatggcattgcactggacaacaagtctctgaatgaatgtgaatctctgctgcgsagctgccaggactccctgaccctgtccctcctgaaggtattccctcagagctcctcgtggagtggccagaacatttttgaaaatatcaaagactctgata

SEQ ID NO: 3077 - DNA, 201 bp, Homo sapiens
tggagcagctgggggaggagaaccagcggttgctgaagcagacagagatgctgacccagcagagggacacggccatccagctgcagcaccagtgcgccctytccctgaggaggtttgaggcgatccaccatgagctgaacaaggccacggcgcagaacaaggacctgcagtgggagatggagctgctgcagtcagagctga

SEQ ID NO: 3078 - DNA, 201 bp, Homo sapiens
gcaaatatgtgatggaccaagaattctccaggaggctcagcatgtctgaagtcaaagatgacaatagcgccacaaagacgctgtcagcggctgcacgccgrtccttttttcggaggaaacacaagcacaaacgcagcgggtccaaggacgggaaagacctgctcgccttggatgccttttccagtgactccattccactct

SEQ ID NO: 3079 - DNA, 201 bp, Homo sapiens
gaacctcaatgggggctgctttgctttgggaggttcttgttggtgggaccagagctttgacaaacctcctgctccttggtggcacctctcctggaaggacrtcacaactccaggtgctcagactgcctgtggcagcagaaccagtgcctttggcattttcctcccacaatggggaaggtgactttggcattcttacaaact

SEQ ID NO: 3080 - DNA, 201 bp, Homo sapiens; identical to SEQ ID NO: 3066

SEQ ID NO: 3081 - DNA, 179 bp, Homo sapiens; identical to SEQ ID NO: 3069

SEQ ID NO: 3082 - DNA, 201 bp, Homo sapiens; identical to SEQ ID NO: 3068

SEQ ID NO: 3083 - DNA, 201 bp, Homo sapiens; identical to SEQ ID NO: 3071

SEQ ID NO: 3084 - DNA, 201 bp, Homo sapiens; identical to SEQ ID NO: 3072

SEQ ID NO: 3085 - DNA, 201 bp, Homo sapiens; identical to SEQ ID NO: 3070

SEQ ID NO: 3086 - DNA, 201 bp, Homo sapiens; identical to SEQ ID NO: 3073

SEQ ID NO: 3087 - DNA, 201 bp, Homo sapiens; identical to SEQ ID NO: 3074

SEQ ID NO: 3088 - DNA, 201 bp, Homo sapiens; identical to SEQ ID NO: 3058

SEQ ID NO: 3089 - DNA, 201 bp, Homo sapiens; identical to SEQ ID NO: 3078

SEQ ID NO: 3090 - DNA, 201 bp, Homo sapiens; identical to SEQ ID NO: 3060

SEQ ID NO: 3091 - DNA, 201 bp, Homo sapiens; identical to SEQ ID NO: 3061

SEQ ID NO: 3092 - DNA, 201 bp, Homo sapiens; identical to SEQ ID NO: 3079

SEQ ID NO: 3093 - DNA, 201 bp, Homo sapiens; identical to SEQ ID NO: 3063

SEQ ID NO: 3094 - DNA, 201 bp, Homo sapiens; identical to SEQ ID NO: 3064

SEQ ID NO: 3095 - DNA, 177 bp, Homo sapiens
tcgcagaccctctgggggtaggggctgttttctaagttacaggcagagtgggactgagatggtacagtgtgcacagacaggtactgagctgacagactggrattttctgtactaaaatgttactttgtatcaaaagttaaacaggctttagtacaacaaataaaggtcaatttctgt

SEQ ID NO: 3096 - DNA, 201 bp, Homo sapiens; identical to SEQ ID NO: 3072

SEQ ID NO: 3097 - DNA, 201 bp, Homo sapiens; identical to SEQ ID NO: 3060

SEQ ID NO: 3098 - DNA, 201 bp, Homo sapiens
tgctgtgctgtggatgactgcagctggccgcctgaggggacrccagactcagctcttttctagcgactgaaagtagaagtctgtcygtctatgaacatgcrggggaaggatccggaaccaggacccagaagcacctcctttgtagacagagggccacggctgcgtgcgatccaggcccaggmccacacactctgcccgtgt

SEQ ID NO: 3099 - DNA, 201 bp, Homo sapiens; identical to SEQ ID NO: 3070

SEQ ID NO: 3100 - DNA, 201 bp, Homo sapiens; identical to SEQ ID NO: 3075

SEQ ID NO: 3101 - DNA, 201 bp, Homo sapiens; identical to SEQ ID NO: 3062

SEQ ID NO: 3102 - DNA, 201 bp, Homo sapiens; identical to SEQ ID NO: 3073

SEQ ID NO: 3103 - DNA, 201 bp, Homo sapiens; identical to SEQ ID NO: 3078

SEQ ID NO: 3104 - DNA, 201 bp, Homo sapiens
cccgctctaggagaatgctgtgctgtggatgactgcagctggccgcctgaggggacrccagactcagctcttttctagcgactgaaagtagaagtctgtcygtctatgaacatgcgggggaaggatccggaaccaggacccagaagcacctcctttgtagacagagggccacggctgcgtgcgatccaggcccaggmccac

SEQ ID NO: 3105 - DNA, 201 bp, Homo sapiens
atggtcaatcaagaacaaaataaagtcctgtggattccagcctgcccgctctaggagaatgctgtgctgtggatgactgcagctggccgcctgaggggacrccagactcagctcttttctagcgactgaaagtagaagtctgtcygtctatgaacatgcgggggaaggatccggaaccaggacccagaagcacctcctttg

SEQ ID NO: 3106 - DNA, 201 bp, Homo sapiens; identical to SEQ ID NO: 3071

SEQ ID NO: 3107 - DNA, 201 bp, Homo sapiens; identical to SEQ ID NO: 3066

SEQ ID NO: 3108 - DNA, 201 bp, Homo sapiens; identical to SEQ ID NO: 3074

SEQ ID NO: 3109 - DNA, 201 bp, Homo sapiens; identical to SEQ ID NO: 3076

SEQ ID NO: 3110 - DNA, 201 bp, Homo sapiens; identical to SEQ ID NO: 3058

SEQ ID NO: 3111 - DNA, 201 bp, Homo sapiens; identical to SEQ ID NO: 3079

SEQ ID NO: 3112 - DNA, 201 bp, Homo sapiens; identical to SEQ ID NO: 3059

SEQ ID NO: 3113 - DNA, 201 bp, Homo sapiens
tgtcygtctatgaacatgcgggggaaggatccggaaccaggacccagaagcacctcctttgtagacagagggccacggctgcgtgcgatccaggcccaggmccacacactctgcccgtgtcacacgtgtgctttaacacaaaacagataacactaaagacgggttcagcacccacctttctttagccagctgatcagagat

SEQ ID NO: 3114 - DNA, 201 bp, Homo sapiens; identical to SEQ ID NO: 3077

SEQ ID NO: 3115 - DNA, 201 bp, Homo sapiens
atgccctcagactcagaaagcagcagctccctcagcagtgtgggcactaccgggaaggcgccgtccccaccacccctcctcactgaccggcaagtgaatgrgaaggtggagaacctctccattcagctgcggctgatgacccgggagagaaacgagctccgcaagcgcctggcctttgctacgcatggcacggcctttgac

SEQ ID NO: 3116 - DNA, 201 bp, Homo sapiens; identical to SEQ ID NO: 3065

SEQ ID NO: 3117 - DNA, 201 bp, Homo sapiens
tccacacgctgtttgttggggtagcttccatcggcagtctggcccattgtcagtcatgcttcttctggccggggagattatagagagattgtttgaagatygggttattattgaaagtctttttttttgtttgttttgttttggtttgtttgtttatctacacttgtttatgctgtgagccaaacctctatttaaaaagtt

SEQ ID NO: 3118 - DNA, 201 bp, Homo sapiens
gaattctgatacatcctgccaacactgtgtgtgtgtgtgtgtgtgtgtgtgtgtgtgtgtgtgtgtgtgaaagagagacagaagggaatggtttgagaggktgcttgtgtgcatgtgtgtgcatatgtaaagagatttttgtggtttaagtaactcagaatagctgtagcaaatgactgaatacatgtgaacaaacagaag

SEQ ID NO: 3119 - DNA, 201 bp, Homo sapiens
ttctgggtccatatctcccagatgaaaaactgttaaccaataccatattttatagttggtgtccatttctttccaacactgtttgttatgattcttccttsagtacttatatacagacctgctcattatctaaacaatcttaccttctaagtaaaccttgattgtgatttccagtttttattttctctgacgtagtagaaa

SEQ ID NO: 3120 - DNA, 201 bp, Homo sapiens
catgtgaacaaacagaaggaagttcactctggagtgtctttgggaggcagccattccaaatgccctcctccatttagcttcaataaagggccttttgctgrtggagggcactcaagggctgggtgagagggccacgtgtttggtattacattactgctatgcaccacttgaaggagctctatcaccagcctcaaacccgaa

SEQ ID NO: 3121 - DNA, 201 bp, Homo sapiens
acctcctggcagacccttctcttccaccaaacgtgtgcacatccttgagagccgtgagcaacttgctcagcacacagctcaccttccaggccattcacaascccagagtgaatcccgttacttcgctcagtgaaaactatacctgttctgactctgaagagagctctgaaaaagacaagcttgctattccaaagcgcctga

SEQ ID NO: 3122 - DNA, 201 bp, Homo sapiens
gcgaggagataccaacccaaaagccagaccagtgacaatggatagaatgggctgtgtttccaaacagattgacttgtcaaagactctcttcaagccagcayaacatttagacacaacactgtagaaatttgagatgggcaaatggctattgcattttgggattcttcgcattttgtgtgtatatttttacagtgaggtaca

SEQ ID NO: 3123 - DNA, 201 bp, Homo sapiens
ctcttccaccaaacgtgtgcacatccttgagagccgtgagcaacttgctcagcacacagctcaccttccaggccattcacaagcccagagtgaatcccgtyacttcgctcagtgaaaactatacctgttctgactctgaagagagctctgaaaaagacaagcttgctattccaaagcgcctgagaaggagtttgcctcctg

SEQ ID NO: 3124 - DNA, 201 bp, Homo sapiens
cctatgctatttctgcagctaaccatgtaaaggctaaaaagcaaagtcgaccaggtgccctcgctaaaatttcacctctttcatcgccctgctcctcacckctccaagggactcctgccagcagcctggtcagcaaaatttctgcagtgcagtttccagaatctgctgacacaactgccaaacaaagcctaggttctcaca

SEQ ID NO: 3125 - DNA, 201 bp, Homo sapiens
accatcgtgcggaccccgcatcgccgcgggactcgggctgccgtggctgctggggagacctggtgctgcagccgctccggagctctcggaaactttcctcygcgctgtgcgcgggctccctgtcctttctgctggcgctgctggtgaggctggtccgcggggaggtcggctgtgacctggagcagtgtaaggaggcggcgg

SEQ ID NO: 3126 - DNA, 156 bp, Homo sapiens
agtgaagagggcaccctataccatggcagtgcccggcgacgctgcacgagtcaggracaagcccgtccacagtggggtgagtcaagcccccacggcgggccgggactgccaccatcgtgcggaccccgcatcgccgcgggactcgggctgccgtgg

SEQ ID NO: 3127 - DNA, 201 bp, Homo sapiens
ccacacgctgtttgttggggtagcttccatcggcagtctggcccattgtcagtcatgcttcttctggccggggagattatagagagattgtttgaagattsggttattattgaaagtctttttttttgtttgttttgttttggtttgtttgtttatctacacttgtttatgctgtgagccaaacctctatttaaaaagttg

SEQ ID NO: 3128 - DNA, 201 bp, Homo sapiens
tattacattactgctatgcaccacttgaaggagctctatcaccagcctcaaacccgaaagactgaggcattttccagtctacttgcctaatgaatgtatargaactgtctatgagtatggatgtcactcaactaagatcaaatcaccatttaaggggatggcattctttatacctaaacacctaagagctgaagtcaggtc

SEQ ID NO: 3129 - DNA, 201 bp, Homo sapiens
cactccccgccgcgggggtggtgctcagctgcttggccgccgcgacatggctggtgctgaggctgaggctgggcgtcctcatgatcgccttgactagcgckgtcaggaccgtgtccctcatttccttagagaggttcaaggtcgcctggagaccttacctggcgtacctggccggcgtgctggggatcctcttggccaggt

SEQ ID NO: 3130 - DNA, 201 bp, Homo sapiens
gcgaggagataccaacccaaaagccagaccagtgacaatggatagaatgggctgtgtttccaaacagattgacttgtcaaagactctcttcaagccagcayaagcatttagatcacaacactgtagaaatttgagatgggcaaatggctattgcattttgggattcttcgcattttgtgtgtatatttttacagtgaggta

SEQ ID NO: 3131 - DNA, 201 bp, Homo sapiens
tattacattactgctatgcaccacttgaaggagctctatcaccagcctgaaacccgaagactgaggcattttccaggtctacttgcctaatgaatgtatargaactgtctatgagtatggatgtcactcaactaagatcaaatcaccatttaagggggatggcattctttatacctaaacacctaagagctgaagtcaggt

SEQ ID NO: 3132 - DNA, 201 bp, Homo sapiens
gaattctgatacatcctgccaacactgtgtgtgtgtgtgtgtgtgtgtgtgtgtgtgtgtgtgtgtgtgaaagagagacagaagggatggtttgagagggktcgcttgtgtgcatgtgtgtgctatatgtaaagagatttttgtggtttaagtaactcagaatagctgtagcaaatgactgaatacatgtgaacaaacaga

SEQ ID NO: 3133 - DNA, 201 bp, Homo sapiens
cctcctggcagacccttctcttccaccaaacgtgtgccacatccttgagagccgtgagcaacttgctcagcacacagctcaccttccaggccattcacaascccagagtgaatcccgttacttcgctcagtgaaaactatacctgttctgactctgaagagagctctgaaaaagacaagcttgctattccaaagcgcctga

SEQ ID NO: 3134 - DNA, 201 bp, Homo sapiens
tcttccaccaaacgtgtgccacatccttgagagccgtgagcaacttgctcagcacacagctcaccttccaggccattcacaagcccagagtgaatcccgtyacttcgctcagtgaaaactatacctgttctgactctgaagagagctctgaaaaagacaagcttgctattccaaagcgcctgagaaggagtttgcctcctg

SEQ ID NO: 3135 - DNA, 201 bp, Homo sapiens; identical to SEQ ID NO: 3124

SEQ ID NO: 3136 - DNA, 201 bp, Homo sapiens
accatcgtgcggaccccgcatcgccgcgggactcgggctgccgtggctgctggggagacctggtgctgcagccgctccggagctctcggaaactttcctcygcgctgtgcgcgggctgcctatcctttctgctggcgctgctggtgaggctggtccgcggggaggtcggctgtgacctggagcagtgtaaggaggcggcgg

SEQ ID NO: 3137 - DNA, 201 bp, Homo sapiens; identical to SEQ ID NO: 3129

SEQ ID NO: 3138 - DNA, 201 bp, Homo sapiens
agtggcaataaatttatctgatgttgacttgagtaaatatatcaccactattgctggagtcatgacactaagtcaagttaaaggctttgttcgaaagaatrgtgtcaatgaagccaaaatagatgagatcaagaatgacaatgtccaagacacagcagaacagaaagttcaactgcttcgtaattggcatcaacttcatgg

SEQ ID NO: 3139 - DNA, 201 bp, Homo sapiens
gatgttgacttgagtaaatatatcaccactattgctggagtcatgacactaagtcaagttaaaggctttgttcgaaagaatggtgtcaatgaagccaaaakagatgagatcaagaatgacaatgtccaagacacagcagaacagaaagttcaactgcttcgtaattggcatcaacttcatggaaagaaagaagcgtatgac

SEQ ID NO: 3140 - DNA, 201 bp, Homo sapiens
agtcatgacactaagtcaagttaaaggctttgttcgaaagaatggtgtcaatgaagccaaaatagatgagatcaagaatgacaatgtccaagacacagcaraacagaaagttcaactgcttcgtaattggcatcaacttcatggaaagaaagaagcgtatgacacattgattaaagatctcaaaaaagccaatctttgtac

SEQ ID NO: 3141 - DNA, 201 bp, Homo sapiens
catgacactaagtcaagttaaaggctttgttcgaaagaatggtgtcaatgaagccaaaatagatgagatcaagaatgacaatgtccaagacacagcagaayagaaagttcaactgcttcgtaattggcatcaacttcatggaaagaaagaagcgtatgacacattgattaaagatctcaaaaaagccaatctttgtactct

SEQ ID NO: 3142 - DNA, 201 bp, Homo sapiens
gaacagaaagttcaactgcttcgtaattggcatcaacttcatggaaagaaagaagcgtatgacacattgattaaagatctcaaaaaagccaatctttgtaytcttgcagagaaaattcagactatcatcctcaaggacattactagtgactcagaaaattcaaacttcagaaatgaaatccaaagcttggtctagagtgaa

SEQ ID NO: 3143 - DNA, 201 bp, Homo sapiens
ttactacagttgagactcagaacttggaaggcctgcatcatgatggccaattctgccataagccctgtcctccaggtgaaaggaaagctagggactgcacrgtcaatggggatgaaccagactgcgtgccctgccaagaagggaaggagtacacagacaaagcccatttttcttccaaatgcagaagatgtagattgtgtg

SEQ ID NO: 3144 - DNA, 201 bp, Homo sapiens
ttaccatatttctaaactttgtttataactctgagaagatcatatttatgtaaagtatatgtatttgagtgcagaatttaaataaggctctacctcaaagwcctttgcacagtttattggtgtcatattatacaatatttcaattgtgaattcacatagaaaacattaaattataatgtttgactattatatatgtgtatg

SEQ ID NO: 3145 - DNA, 201 bp, Homo sapiens
tgttgacttgagtaaatatatcaccactattgctggagtcatgacactaagtcaagttaaaggctttgttcgaaagaatggtgtcaatgaagccaaaatabatgagatcaagaatgacaatgtccaagacacagcagaacagaaagttcaactgcttcgtaattggcatcaacttcatggaaagaaagaagcgtatgacac

SEQ ID NO: 3146 - DNA, 201 bp, Homo sapiens
ttttgccaattccactaattgtttgggtgaagagaaaggaagtacagaaaacatgcagaaagcacagaaaggaaaaccaaggttctcatgaatctccaacyttaaatcctgaaacagtggcaataaatttatctgatgttgacttgagtaaatatatcaccactattgctggagtcatgacactaagtcaagttaaaggct

SEQ ID NO: 3147 - DNA, 201 bp, Homo sapiens
tgttcaataatgtcccatgtaaaacctgctacaaatggcagcttatacatagcaatggtaaaatcatcatctggatttaggaattgctcttgtcatacccycaagtttctaagatttaagattctccttactactatcctacgtttaaatatctttgaaagtttgtattaaatgtgaattttaagaaataatatttatatt

SEQ ID NO: 3148 - DNA, 201 bp, Homo sapiens
ctgacatcaactccaagggattggaattgaggaagactgttactacagttgagactcagaacttggaaggcctgcatcatgatggccaattctgccataarccctgtcctccaggtgaaaggaaagctagggactgcacagtcaatggggatgaaccagactgcgtgccctgccaagaagggaaggagtacacagacaaag

SEQ ID NO: 3149 - DNA, 201 bp, Homo sapiens
agacgcttctggggagtgagggaagcggtttacgagtgacttggctggagcctcaggggcgggcactggcacggaacacaccctgaggccagccctggctrcccaggcggagctgcctcttctcccgcgggttggtggacccgctcagtacggagttggggaagctctttcacttcggaggattgctcaacaaccatgctg

SEQ ID NO: 3150 - DNA, 201 bp, Homo sapiens
ctgcttcgtaattggcatcaacttcatggaaagaaagaagcgtatgacacattgattaaagatctcaaaaaagccaatctttgtactcttgcagagaaaaktcagactatcatcctcaaggacattactagtgactcagaaaattcaaacttcagaaatgaaatccaaagcttggtctagagtgaaaaacaacaaattcag

SEQ ID NO: 3151 - DNA, 201 bp, Homo sapiens
aggttctcatgaatctccaaccttaaatcctgaaacagtggcaataaatttatctgatgttgacttgagtaaatatatcaccactattgctggagtcatgmcactaagtcaagttaaaggctttgttcgaaagaatggtgtcaatgaagccaaaatagatgagatcaagaatgacaatgtccaagacacagcagaacagaa

SEQ ID NO: 3152 - DNA, 201 bp, Homo sapiens
ctgttactacagttgagactcagaacttggaaggcctgcatcatgatggccaattctgccataagccctgtcctccaggtgaaaggaaagctagggactgmacagtcaatggggatgaaccagactgcgtgccctgccaagaagggaaggagtacacagacaaagcccatttttcttccaaatgcagaagatgtagattgt

SEQ ID NO: 3153 - DNA, 201 bp, Homo sapiens
gtcatgacactaagtcaagttaaaggctttgttcgaaagaatggtgtcaatgaagccaaaatagatgagatcaagaatgacaatgtccaagacacagcagracagaaagttcaactgcttcgtaattggcatcaacttcatggaaagaaagaagcgtatgacacattgattaaagatctcaaaaaagccaatctttgtact

SEQ ID NO: 3154 - DNA, 201 bp, Homo sapiens
gttgacttgagtaaatatatcaccactattgctggagtcatgacactaagtcaagttaaaggctttgttcgaaagaatggtgtcaatgaagccaaaatagdtgagatcaagaatgacaatgtccaagacacagcagaacagaaagttcaactgcttcgtaattggcatcaacttcatggaaagaaagaagcgtatgacaca

SEQ ID NO: 3155 - DNA, 201 bp, Homo sapiens
tcctgaaacagtggcaataaatttatctgatgttgacttgagtaaatatatcaccactattgctggagtcatgacactaagtcaagttaaaggctttgttygaaagaatggtgtcaatgaagccaaaatagatgagatcaagaatgacaatgtccaagacacagcagaacagaaagttcaactgcttcgtaattggcatca

SEQ ID NO: 3156 - DNA, 201 bp, Homo sapiens
cttggaaggcctgcatcatgatggccaattctgccataagccctgtcctccaggtgaaaggaaagctagggactgcacagtcaatggggatgaaccagacygcgtgccctgccaagaagggaaggagtacacagacaaagcccatttttcttccaaatgcagaagatgtagattgtgtgatgaaggacatggcttagaagt

SEQ ID NO: 3157 - DNA, 201 bp, Homo sapiens
aaatcctgaaacagtggcaataaatttatctgatgttgacttgagtaaatatatcaccactattgctggagtcatgacactaagtcaagttaaaggctttsttcgaaagaatggtgtcaatgaagccaaaatagatgagatcaagaatgacaatgtccaagacacagcagaacagaaagttcaactgcttcgtaattggca

SEQ ID NO: 3158 - DNA, 201 bp, Homo sapiens
gtggcaataaatttatctgatgttgacttgagtaaatatatcaccactattgctggagtcatgacactaagtcaagttaaaggctttgttcgaaagaatgrtgtcaatgaagccaaaatagatgagatcaagaatgacaatgtccaagacacagcagaacagaaagttcaactgcttcgtaattggcatcaacttcatgga

SEQ ID NO: 3159 - DNA, 201 bp, Homo sapiens
ctgttgctagattatcgtccaaaagtgttaatgcccaagtgactgacatcaactccaagggattggaattgaggaagactgttactacagttgagactcaraacttggaaggcctgcatcatgatggccaattctgccataagccctgtcctccaggtgaaaggaaagctagggactgcacagtcaatggggatgaaccag

SEQ ID NO: 3160 - DNA, 201 bp, Homo sapiens
ggcactggcacggaacacaccctgaggccagccctggctgcccaggcggagctgcctcttctcccgcgggttggtggacccgctcagtacggagttggggragctctttcacttcggaggattgctcaacaaccatgctgggcatctggaccctcctacctctggttcttacgtctgttgctagattatcgtccaaaagtg

SEQ ID NO: 3161 - DNA, 201 bp, Homo sapiens
cttttgccaattccactaattgtttgggtgaagagaaaggaagtacagaaaacatgcagaaagcacagaaaggaaaaccaaggttctcatgaatctccaamcttaaatcctgaaacagtggcaataaatttatctgatgttgacttgagtaaatatatcaccactattgctggagtcatgacactaagtcaagttaaaggc

SEQ ID NO: 3162 - DNA, 201 bp, Homo sapiens
ccgctcagtacggagttggggaagctctttcacttcggaggattgctcaacaaccatgctgggcatctggaccctcctacctctggttcttacgtctgttrctagattatcgtccaaaagtgttaatgcccaagtgactgacatcaactccaagggattggaattgaggaagactgttactacagttgagactcagaactt

SEQ ID NO: 3163 - DNA, 201 bp, Homo sapiens
aaggagtacacagacaaagcccatttttcttccaaatgcagaagatgtagattgtgtgatgaaggacatggcttagaagtggaaataaactgcacccggayccagaataccaagtgcagatgtaaaccaaactttttttgtaactctactgtatgtgaacactgtgacccttgcaccaaatgtgaacatggaatcatcaag

SEQ ID NO: 3164 - DNA, 201 bp, Homo sapiens
ggaggattgctcaacaaccatgctgggcatctggaccctcctacctctggttcttacgtctgttgctagattatcgtccaaaagtgttaatgcccaagtgrctgacatcaactccaagggattggaattgaggaagactgttactacagttgagactcagaacttggaaggcctgcatcatgatggccaattctgccataa

SEQ ID NO: 3165 - DNA, 201 bp, Homo sapiens
ggttctcatgaatctccaaccttaaatcctgaaacagtggcaataaatttatctgatgttgacttgagtaaatatatcaccactattgctggagtcatgamactaagtcaagttaaaggctttgttcgaaagaatggtgtcaatgaagccaaaatagatgagatcaagaatgacaatgtccaagacacagcagaacagaaa

SEQ ID NO: 3166 - DNA, 201 bp, Homo sapiens
cctgaaacagtggcaataaatttatctgatgttgacttgagtaaatatatcaccactattgctggagtcatgacactaagtcaagttaaaggctttgttcvaaagaatggtgtcaatgaagccaaaatagatgagatcaagaatgacaatgtccaagacacagcagaacagaaagttcaactgcttcgtaattggcatcaa

SEQ ID NO: 3167 - DNA, 201 bp, Homo sapiens
ttatctgatgttgacttgagtaaatatatcaccactattgctggagtcatgacactaagtcaagttaaaggctttgttcgaaagaatggtgtcaatgaagmcaaaatagatgagatcaagaatgacaatgtccaagacacagcagaacagaaagttcaactgcttcgtaattggcatcaacttcatggaaagaaagaagcg

SEQ ID NO: 3168 - DNA, 201 bp, Homo sapiens
gctggagtcatgacactaagtcaagttaaaggctttgttcgaaagaatggtgtcaatgaagccaaaatagatgagatcaagaatgacaatgtccaagacahagcagaacagaaagttcaactgcttcgtaattggcatcaacttcatggaaagaaagaagcgtatgacacattgattaaagatctcaaaaaagccaatctt

SEQ ID NO: 3169 - DNA, 201 bp, Homo sapiens
aagtcaagttaaaggctttgttcgaaagaatggtgtcaatgaagccaaaatagatgagatcaagaatgacaatgtccaagacacagcagaacagaaagttyaactgcttcgtaattggcatcaacttcatggaaagaaagaagcgtatgacacattgattaaagatctcaaaaaagccaatctttgtactcttgcagagaa

SEQ ID NO: 3170 - DNA, 201 bp, Homo sapiens; identical to SEQ ID NO: 3154

SEQ ID NO: 3171 - DNA, 201 bp, Homo sapiens; identical to SEQ ID NO: 3153

SEQ ID NO: 3172 - DNA, 201 bp, Homo sapiens; identical to SEQ ID NO: 3138

SEQ ID NO: 3173 - DNA, 201 bp, Homo sapiens; identical to SEQ ID NO: 3152

SEQ ID NO: 3174 - DNA, 201 bp, Homo sapiens; identical to SEQ ID NO: 3139

SEQ ID NO: 3175 - DNA, 201 bp, Homo sapiens
aaatcctgtagtggcaataaatttatctgatgttgacttgagtaaatatatcaccactattgctggagtcatgacactaagtcaagttaaaggctttgttygaaagaatggtgtcaatgaagccaaaatagatgagatcaagaatgacaatgtccaagacacagcagaacagaaagttcaactgcttcgtaattggcatca

SEQ ID NO: 3176 - DNA, 201 bp, Homo sapiens; identical to SEQ ID NO: 3156

SEQ ID NO: 3177 - DNA, 201 bp, Homo sapiens; identical to SEQ ID NO: 3140

SEQ ID NO: 3178 - DNA, 201 bp, Homo sapiens; identical to SEQ ID NO: 3141

SEQ ID NO: 3179 - DNA, 201 bp, Homo sapiens
cttaaatcctgtagtggcaataaatttatctgatgttgacttgagtaaatatatcaccactattgctggagtcatgacactaagtcaagttaaaggctttsttcgaaagaatggtgtcaatgaagccaaaatagatgagatcaagaatgacaatgtccaagacacagcagaacagaaagttcaactgcttcgtaattggca

SEQ ID NO: 3180 - DNA, 201 bp, Homo sapiens; identical to SEQ ID NO: 3158

SEQ ID NO: 3181 - DNA, 201 bp, Homo sapiens; identical to SEQ ID NO: 3142

SEQ ID NO: 3182 - DNA, 201 bp, Homo sapiens; identical to SEQ ID NO: 3143

SEQ ID NO: 3183 - DNA, 201 bp, Homo sapiens; identical to SEQ ID NO: 3144

SEQ ID NO: 3184 - DNA, 201 bp, Homo sapiens; identical to SEQ ID NO: 3145

SEQ ID NO: 3185 - DNA, 201 bp, Homo sapiens
ttttgccaattccactaattgtttgggtgaagagaaaggaagtacagaaaacatgcagaaagcacagaaaggaaaaccaaggttctcatgaatctccaacyttaaatcctgtagtggcaataaatttatctgatgttgacttgagtaaatatatcaccactattgctggagtcatgacactaagtcaagttaaaggctttg

SEQ ID NO: 3186 - DNA, 201 bp, Homo sapiens; identical to SEQ ID NO: 3148

SEQ ID NO: 3187 - DNA, 201 bp, Homo sapiens; identical to SEQ ID NO: 3159

SEQ ID NO: 3188 - DNA, 201 bp, Homo sapiens; identical to SEQ ID NO: 3149

SEQ ID NO: 3189 - DNA, 201 bp, Homo sapiens
cttttgccaattccactaattgtttgggtgaagagaaaggaagtacagaaaacatgcagaaagcacagaaaggaaaaccaaggttctcatgaatctccaamcttaaatcctgtagtggcaataaatttatctgatgttgacttgagtaaatatatcaccactattgctggagtcatgacactaagtcaagttaaaggcttt

SEQ ID NO: 3190 - DNA, 201 bp, Homo sapiens; identical to SEQ ID NO: 3160

SEQ ID NO: 3191 - DNA, 201 bp, Homo sapiens; identical to SEQ ID NO: 3162

SEQ ID NO: 3192 - DNA, 201 bp, Homo sapiens; identical to SEQ ID NO: 3163

SEQ ID NO: 3193 - DNA, 201 bp, Homo sapiens; identical to SEQ ID NO: 3150

SEQ ID NO: 3194 - DNA, 201 bp, Homo sapiens; identical to SEQ ID NO: 3164

SEQ ID NO: 3195 - DNA, 201 bp, Homo sapiens
ccaaggttctcatgaatctccaaccttaaatcctgtagtggcaataaatttatctgatgttgacttgagtaaatatatcaccactattgctggagtcatgmcactaagtcaagttaaaggctttgttcgaaagaatggtgtcaatgaagccaaaatagatgagatcaagaatgacaatgtccaagacacagcagaacagaa

SEQ ID NO: 3196 - DNA, 201 bp, Homo sapiens
caaggttctcatgaatctccaaccttaaatcctgtagtggcaataaatttatctgatgttgacttgagtaaatatatcaccactattgctggagtcatgamactaagtcaagttaaaggctttgttcgaaagaatggtgtcaatgaagccaaaatagatgagatcaagaatgacaatgtccaagacacagcagaacagaaa

SEQ ID NO: 3197 - DNA, 201 bp, Homo sapiens
aatcctgtagtggcaataaatttatctgatgttgacttgagtaaatatatcaccactattgctggagtcatgacactaagtcaagttaaaggctttgttcvaaagaatggtgtcaatgaagccaaaatagatgagatcaagaatgacaatgtccaagacacagcagaacagaaagttcaactgcttcgtaattggcatcaa

SEQ ID NO: 3198 - DNA, 201 bp, Homo sapiens; identical to SEQ ID NO: 3167

SEQ ID NO: 3199 - DNA, 201 bp, Homo sapiens; identical to SEQ ID NO: 3168

SEQ ID NO: 3200 - DNA, 201 bp, Homo sapiens; identical to SEQ ID NO: 3169

SEQ ID NO: 3201 - DNA, 201 bp, Homo sapiens; identical to SEQ ID NO: 3152

SEQ ID NO: 3202 - DNA, 201 bp, Homo sapiens; identical to SEQ ID NO: 3154

SEQ ID NO: 3203 - DNA, 201 bp, Homo sapiens; identical to SEQ ID NO: 3153

SEQ ID NO: 3204 - DNA, 201 bp, Homo sapiens; identical to SEQ ID NO: 3138

SEQ ID NO: 3205 - DNA, 201 bp, Homo sapiens; identical to SEQ ID NO: 3155

SEQ ID NO: 3206 - DNA, 201 bp, Homo sapiens; identical to SEQ ID NO: 3139

SEQ ID NO: 3207 - DNA, 201 bp, Homo sapiens
cttggaaggcctgcatcatgatggccaattctgccataagccctgtcctccaggtgaaaggaaagctagggactgcacagtcaatggggatgaaccagacygcgtgccctgccaagaagggaaggagtacacagacaaagcccatttttcttccaaatgcagaagatgtagattgtgtgatgaaggacatgatgtgaacat

SEQ ID NO: 3208 - DNA, 201 bp, Homo sapiens; identical to SEQ ID NO: 3140

SEQ ID NO: 3209 - DNA, 201 bp, Homo sapiens; identical to SEQ ID NO: 3141

SEQ ID NO: 3210 - DNA, 201 bp, Homo sapiens; identical to SEQ ID NO: 3157

SEQ ID NO: 3211 - DNA, 201 bp, Homo sapiens; identical to SEQ ID NO: 3158

SEQ ID NO: 3212 - DNA, 201 bp, Homo sapiens; identical to SEQ ID NO: 3143

SEQ ID NO: 3213 - DNA, 201 bp, Homo sapiens; identical to SEQ ID NO: 3144

SEQ ID NO: 3214 - DNA, 201 bp, Homo sapiens; identical to SEQ ID NO: 3142

SEQ ID NO: 3215 - DNA, 201 bp, Homo sapiens; identical to SEQ ID NO: 3146

SEQ ID NO: 3216 - DNA, 201 bp, Homo sapiens; identical to SEQ ID NO: 3145

SEQ ID NO: 3217 - DNA, 201 bp, Homo sapiens; identical to SEQ ID NO: 3148

SEQ ID NO: 3218 - DNA, 201 bp, Homo sapiens; identical to SEQ ID NO: 3159

SEQ ID NO: 3219 - DNA, 201 bp, Homo sapiens; identical to SEQ ID NO: 3149

SEQ ID NO: 3220 - DNA, 201 bp, Homo sapiens; identical to SEQ ID NO: 3161

SEQ ID NO: 3221 - DNA, 201 bp, Homo sapiens; identical to SEQ ID NO: 3160

SEQ ID NO: 3222 - DNA, 201 bp, Homo sapiens; identical to SEQ ID NO: 3162

SEQ ID NO: 3223 - DNA, 201 bp, Homo sapiens; identical to SEQ ID NO: 3150

SEQ ID NO: 3224 - DNA, 201 bp, Homo sapiens; identical to SEQ ID NO: 3151

SEQ ID NO: 3225 - DNA, 201 bp, Homo sapiens; identical to SEQ ID NO: 3164

SEQ ID NO: 3226 - DNA, 201 bp, Homo sapiens; identical to SEQ ID NO: 3165

SEQ ID NO: 3227 - DNA, 201 bp, Homo sapiens; identical to SEQ ID NO: 3166

SEQ ID NO: 3228 - DNA, 201 bp, Homo sapiens; identical to SEQ ID NO: 3167

SEQ ID NO: 3229 - DNA, 201 bp, Homo sapiens; identical to SEQ ID NO: 3168

SEQ ID NO: 3230 - DNA, 201 bp, Homo sapiens; identical to SEQ ID NO: 3169

SEQ ID NO: 3231 - DNA, 201 bp, Homo sapiens
gactattttctatttttcagatgttgacttgagtaaatatatcaccactattgctggagtcatgacactaagtcaagttaaaggctttgttcgaaagaatrgtgtcaatgaagccaaaatagatgagatcaagaatgacaatgtccaagacacagcagaacagaaagttcaactgcttcgtaattggcatcaacttcatgg

SEQ ID NO: 3232 - DNA, 201 bp, Homo sapiens; identical to SEQ ID NO: 3139

SEQ ID NO: 3233 - DNA, 201 bp, Homo sapiens; identical to SEQ ID NO: 3140

SEQ ID NO: 3234 - DNA, 201 bp, Homo sapiens; identical to SEQ ID NO: 3141

SEQ ID NO: 3235 - DNA, 201 bp, Homo sapiens
ctaatttcagtgacatattatgggatcttgttatttctcatacaattctacctgctcagcataaagcatttatcaggcagtttgtttaaatttataatgartactcatagttaaaaataatcaagtaacaataagacacaatagtctgaggcttaagaaacttttccttcataatcagctagatgtattacagaactcctg

SEQ ID NO: 3236 - DNA, 201 bp, Homo sapiens
agaactcctgcctaaaaagatctagaggttaaagtgtactgtagactcaggtattatcagtgtacccaactctataacaacatacatgattccattcagtkgttctttgatctgtgatttagagataagatgatcataaactctttgcttatacttttagatttgtgggtcattgatcattggatccataagagatgttat

SEQ ID NO: 3237 - DNA, 201 bp, Homo sapiens; identical to SEQ ID NO: 3142

SEQ ID NO: 3238 - DNA, 201 bp, Homo sapiens
tcaactgtgaccctgggactacaggcatgcaccaccatgccaggttaattttttatttttattttttatagagacagggttcactttgttgcccaggctgrtctcaaacttttgacctcaagcaatccttctgcctcagcctcccaaagttctgggattataggtgtgagccatcacatccggcctgttactttctttatt

SEQ ID NO: 3239 - DNA, 201 bp, Homo sapiens; identical to SEQ ID NO: 3144

SEQ ID NO: 3240 - DNA, 201 bp, Homo sapiens; identical to SEQ ID NO: 3143

SEQ ID NO: 3241 - DNA, 201 bp, Homo sapiens; identical to SEQ ID NO: 3147

SEQ ID NO: 3242 - DNA, 201 bp, Homo sapiens
gttgataaaatttctttgttctttcagtgaagagaaaggaagtacagaaaacatgcagaaagcacagaaaggaaaaccaaggttctcatgaatctccaacyttaaatcctgtaggtattgaaataggtatcagctttccttgaaaagaaaaatagagaaattagtgatttggctttttgttacttccttttacttttttgt

SEQ ID NO: 3243 - DNA, 201 bp, Homo sapiens; identical to SEQ ID NO: 3145

SEQ ID NO: 3244 - DNA, 201 bp, Homo sapiens; identical to SEQ ID NO: 3148

SEQ ID NO: 3245 - DNA, 201 bp, Homo sapiens; identical to SEQ ID NO: 3149

SEQ ID NO: 3246 - DNA, 201 bp, Homo sapiens; identical to SEQ ID NO: 3150

SEQ ID NO: 3247 - DNA, 201 bp, Homo sapiens
actaatgggaatttcatttagaaaaacaaattttcagactattttctatttttcagatgttgacttgagtaaatatatcaccactattgctggagtcatgmcactaagtcaagttaaaggctttgttcgaaagaatggtgtcaatgaagccaaaatagatgagatcaagaatgacaatgtccaagacacagcagaacagaa

SEQ ID NO: 3248 - DNA, 201 bp, Homo sapiens
accaagtgcaaagaggaaggtaattatttttttacggttatattctcctttcccccaaccccatggaaagatgtgaagaaaaaccaatcactcttgattastagaaagtcctttatttaatcttaaagattgcttattttcatataaaatgtccaatgttccaacctacaggatccagatctaacttggggtggctttgtc

SEQ ID NO: 3249 - DNA, 201 bp, Homo sapiens; identical to SEQ ID NO: 3152

SEQ ID NO: 3250 - DNA, 201 bp, Homo sapiens; identical to SEQ ID NO: 3154

SEQ ID NO: 3251 - DNA, 201 bp, Homo sapiens; identical to SEQ ID NO: 3153

SEQ ID NO: 3252 - DNA, 201 bp, Homo sapiens
aaattttcagactattttctatttttcagatgttgacttgagtaaatatatcaccactattgctggagtcatgacactaagtcaagttaaaggctttgttygaaagaatggtgtcaatgaagccaaaatagatgagatcaagaatgacaatgtccaagacacagcagaacagaaagttcaactgcttcgtaattggcatca

SEQ ID NO: 3253 - DNA, 201 bp, Homo sapiens; identical to SEQ ID NO: 3156

SEQ ID NO: 3254 - DNA, 201 bp, Homo sapiens
ttgcctcattcttacctataaaaagctaccactttggtagatttatgtattgttaatttcttgcccctgaatgcagccttgagagctgactgataagaacraatgaaattattcctcagctagtttctgagcaacagttttggggcattgagtggtattctcatccttcctatgaacaggtgttctctgcagcagcagaat

SEQ ID NO: 3255 - DNA, 201 bp, Homo sapiens
ggaaacagtggcaataaatttatctggtaaggcttttatcattttatttcatagagatggcatcctttagagtaataggccaatttcagagtaaaataatrttactaatttcagtgacatattatgggatcttgttatttctcatacaattctacctgctcagcataaagcatttatcaggcagtttgtttaaatttataa

SEQ ID NO: 3256 - DNA, 201 bp, Homo sapiens
attactgggtatatggcaggatttggagttagaactcaaggttgtcttgtttctgtattcccctagtcagctcttcatagacctttaggacttagctataytctgaagtactataaaaagagaaataaacatggttttcactaatgggaatttcatttagaaaaacaaattttcagactattttctatttttcagatgttg

SEQ ID NO: 3257 - DNA, 201 bp, Homo sapiens
aacaaattttcagactattttctatttttcagatgttgacttgagtaaatatatcaccactattgctggagtcatgacactaagtcaagttaaaggctttsttcgaaagaatggtgtcaatgaagccaaaatagatgagatcaagaatgacaatgtccaagacacagcagaacagaaagttcaactgcttcgtaattggca

SEQ ID NO: 3258 - DNA, 201 bp, Homo sapiens
actattttctatttttcagatgttgacttgagtaaatatatcaccactattgctggagtcatgacactaagtcaagttaaaggctttgttcgaaagaatgrtgtcaatgaagccaaaatagatgagatcaagaatgacaatgtccaagacacagcagaacagaaagttcaactgcttcgtaattggcatcaacttcatgga

SEQ ID NO: 3259 - DNA, 201 bp, Homo sapiens
gctagtttctgagcaacagttttggggcattgagtggtattctcatccttcctatgaacaggtgttctctgcagcagcagaattggccaaaaatcagaagyaattcttcactattcattgagatctccctatgcaaaaagagaacacaagaagcaaaggcattcccaggaaacacattgcagggaacactttaaaaacttg

SEQ ID NO: 3260 - DNA, 201 bp, Homo sapiens
caatccttctgcctcagcctcccaaagttctgggattataggtgtgagccatcacatccggcctgttactttctttatttaaacattgcttgtgtttgtgkgtgcataggttaaaggggcctcacagatgaattatgatatggtacccaaattaaaagtaaacttgtacacaaaaaccgtaagaatcaacaaaggagggaa

SEQ ID NO: 3261 - DNA, 201 bp, Homo sapiens; identical to SEQ ID NO: 3159

SEQ ID NO: 3262 - DNA, 201 bp, Homo sapiens
gtgggagttaggattctttaaattaatatggtaaaaaaaatttcaatttgagccattttctggtattaagaataagaatagttacagggaagaaaattttrgagtagttatatttattatttattttaataagtctatatgaaaaataacctcaacctattttatgaattctttaggtttcttgcctttaaaaactaagac

SEQ ID NO: 3263 - DNA, 201 bp, Homo sapiens
cattttctggtattaagaataagaatagttacagggaagaaaattttagagtagttatatttattatttattttaataagtctatatgaaaaataacctcmacctattttatgaattctttaggtttcttgcctttaaaaactaagacaatattgcttagtttctggcaaggccggaacctttcagaataaaaattgaatg

SEQ ID NO: 3264 - DNA, 201 bp, Homo sapiens
agttgataaaatttctttgttctttcagtgaagagaaaggaagtacagaaaacatgcagaaagcacagaaaggaaaaccaaggttctcatgaatctccaamcttaaatcctgtaggtattgaaataggtatcagctttccttgaaaagaaaaatagagaaattagtgatttggctttttgttacttccttttacttttttg

SEQ ID NO: 3265 - DNA, 201 bp, Homo sapiens; identical to SEQ ID NO: 3160

SEQ ID NO: 3266 - DNA, 201 bp, Homo sapiens; identical to SEQ ID NO: 3162

SEQ ID NO: 3267 - DNA, 201 bp, Homo sapiens; identical to SEQ ID NO: 3163

SEQ ID NO: 3268 - DNA, 201 bp, Homo sapiens; identical to SEQ ID NO: 3164

SEQ ID NO: 3269 - DNA, 201 bp, Homo sapiens
ctaatgggaatttcatttagaaaaacaaattttcagactattttctatttttcagatgttgacttgagtaaatatatcaccactattgctggagtcatgamactaagtcaagttaaaggctttgttcgaaagaatggtgtcaatgaagccaaaatagatgagatcaagaatgacaatgtccaagacacagcagaacagaaa

SEQ ID NO: 3270 - DNA, 201 bp, Homo sapiens
aattttcagactattttctatttttcagatgttgacttgagtaaatatatcaccactattgctggagtcatgacactaagtcaagttaaaggctttgttcvaaagaatggtgtcaatgaagccaaaatagatgagatcaagaatgacaatgtccaagacacagcagaacagaaagttcaactgcttcgtaattggcatcaa

SEQ ID NO: 3271 - DNA, 201 bp, Homo sapiens
ttttcagatgttgacttgagtaaatatatcaccactattgctggagtcatgacactaagtcaagttaaaggctttgttcgaaagaatggtgtcaatgaagmcaaaatagatgagatcaagaatgacaatgtccaagacacagcagaacagaaagttcaactgcttcgtaattggcatcaacttcatggaaagaaagaagcg

SEQ ID NO: 3272 - DNA, 201 bp, Homo sapiens; identical to SEQ ID NO: 3168

SEQ ID NO: 3273 - DNA, 201 bp, Homo sapiens; identical to SEQ ID NO: 3169

SEQ ID NO: 3274 - DNA, 201 bp, Homo sapiens; identical to SEQ ID NO: 3154

SEQ ID NO: 3275 - DNA, 201 bp, Homo sapiens; identical to SEQ ID NO: 3153

SEQ ID NO: 3276 - DNA, 201 bp, Homo sapiens; identical to SEQ ID NO: 3138

SEQ ID NO: 3277 - DNA, 201 bp, Homo sapiens; identical to SEQ ID NO: 3155

SEQ ID NO: 3278 - DNA, 201 bp, Homo sapiens; identical to SEQ ID NO: 3139

SEQ ID NO: 3279 - DNA, 201 bp, Homo sapiens; identical to SEQ ID NO: 3140

SEQ ID NO: 3280 - DNA, 201 bp, Homo sapiens; identical to SEQ ID NO: 3141

SEQ ID NO: 3281 - DNA, 201 bp, Homo sapiens; identical to SEQ ID NO: 3157

SEQ ID NO: 3282 - DNA, 201 bp, Homo sapiens; identical to SEQ ID NO: 3158

SEQ ID NO: 3283 - DNA, 201 bp, Homo sapiens; identical to SEQ ID NO: 3144

SEQ ID NO: 3284 - DNA, 201 bp, Homo sapiens; identical to SEQ ID NO: 3142

SEQ ID NO: 3285 - DNA, 201 bp, Homo sapiens; identical to SEQ ID NO: 3147

SEQ ID NO: 3286 - DNA, 201 bp, Homo sapiens; identical to SEQ ID NO: 3146

SEQ ID NO: 3287 - DNA, 201 bp, Homo sapiens; identical to SEQ ID NO: 3145

SEQ ID NO: 3288 - DNA, 201 bp, Homo sapiens
ctgacatcaactccaagggattggaattgaggaagactgttactacagttgagactcagaacttggaaggcctgcatcatgatggccaattctgccataarccctgtcctccagatgtgaacatggaatcatcaaggaatgcacactcaccagcaacaccaagtgcaaagaggaaggatccagatctaacttggggtggct

SEQ ID NO: 3289 - DNA, 201 bp, Homo sapiens
ctgttgctagattatcgtccaaaagtgttaatgcccaagtgactgacatcaactccaagggattggaattgaggaagactgttactacagttgagactcaraacttggaaggcctgcatcatgatggccaattctgccataagccctgtcctccagatgtgaacatggaatcatcaaggaatgcacactcaccagcaacac

SEQ ID NO: 3290 - DNA, 201 bp, Homo sapiens; identical to SEQ ID NO: 3149

SEQ ID NO: 3291 - DNA, 201 bp, Homo sapiens; identical to SEQ ID NO: 3160

SEQ ID NO: 3292 - DNA, 201 bp, Homo sapiens; identical to SEQ ID NO: 3161

SEQ ID NO: 3293 - DNA, 201 bp, Homo sapiens; identical to SEQ ID NO: 3162

SEQ ID NO: 3294 - DNA, 201 bp, Homo sapiens; identical to SEQ ID NO: 3150

SEQ ID NO: 3295 - DNA, 201 bp, Homo sapiens; identical to SEQ ID NO: 3151

SEQ ID NO: 3296 - DNA, 201 bp, Homo sapiens; identical to SEQ ID NO: 3164

SEQ ID NO: 3297 - DNA, 201 bp, Homo sapiens; identical to SEQ ID NO: 3165

SEQ ID NO: 3298 - DNA, 201 bp, Homo sapiens; identical to SEQ ID NO: 3166

SEQ ID NO: 3299 - DNA, 201 bp, Homo sapiens; identical to SEQ ID NO: 3167

SEQ ID NO: 3300 - DNA, 201 bp, Homo sapiens; identical to SEQ ID NO: 3168

SEQ ID NO: 3301 - DNA, 201 bp, Homo sapiens; identical to SEQ ID NO: 3169

SEQ ID NO: 3302 - DNA, 201 bp, Homo sapiens; identical to SEQ ID NO: 3154

SEQ ID NO: 3303 - DNA, 201 bp, Homo sapiens; identical to SEQ ID NO: 3153

SEQ ID NO: 3304 - DNA, 201 bp, Homo sapiens; identical to SEQ ID NO: 3138

SEQ ID NO: 3305 - DNA, 201 bp, Homo sapiens; identical to SEQ ID NO: 3152

SEQ ID NO: 3306 - DNA, 201 bp, Homo sapiens; identical to SEQ ID NO: 3139

SEQ ID NO: 3307 - DNA, 201 bp, Homo sapiens; identical to SEQ ID NO: 3175

SEQ ID NO: 3308 - DNA, 201 bp, Homo sapiens; identical to SEQ ID NO: 3156

SEQ ID NO: 3309 - DNA, 201 bp, Homo sapiens; identical to SEQ ID NO: 3140

SEQ ID NO: 3310 - DNA, 201 bp, Homo sapiens; identical to SEQ ID NO: 3141

SEQ ID NO: 3311 - DNA, 201 bp, Homo sapiens; identical to SEQ ID NO: 3179

SEQ ID NO: 3312 - DNA, 201 bp, Homo sapiens; identical to SEQ ID NO: 3158

SEQ ID NO: 3313 - DNA, 201 bp, Homo sapiens; identical to SEQ ID NO: 3142

SEQ ID NO: 3314 - DNA, 201 bp, Homo sapiens; identical to SEQ ID NO: 3143

SEQ ID NO: 3315 - DNA, 201 bp, Homo sapiens; identical to SEQ ID NO: 3144

SEQ ID NO: 3316 - DNA, 201 bp, Homo sapiens; identical to SEQ ID NO: 3145

SEQ ID NO: 3317 - DNA, 201 bp, Homo sapiens
ccagcaacaccaagtgcaaagaggaagtgaagagaaaggaagtacagaaaacatgcagaaagcacagaaaggaaaaccaaggttctcatgaatctccaacyttaaatcctgtagtggcaataaatttatctgatgttgacttgagtaaatatatcaccactattgctggagtcatgacactaagtcaagttaaaggctttg

SEQ ID NO: 3318 - DNA, 201 bp, Homo sapiens; identical to SEQ ID NO: 3148

SEQ ID NO: 3319 - DNA, 201 bp, Homo sapiens; identical to SEQ ID NO: 3159

SEQ ID NO: 3320 - DNA, 201 bp, Homo sapiens; identical to SEQ ID NO: 3149

SEQ ID NO: 3321 - DNA, 201 bp, Homo sapiens
accagcaacaccaagtgcaaagaggaagtgaagagaaaggaagtacagaaaacatgcagaaagcacagaaaggaaaaccaaggttctcatgaatctccaamcttaaatcctgtagtggcaataaatttatctgatgttgacttgagtaaatatatcaccactattgctggagtcatgacactaagtcaagttaaaggcttt

SEQ ID NO: 3322 - DNA, 201 bp, Homo sapiens; identical to SEQ ID NO: 3160

SEQ ID NO: 3323 - DNA, 201 bp, Homo sapiens; identical to SEQ ID NO: 3162

SEQ ID NO: 3324 - DNA, 201 bp, Homo sapiens; identical to SEQ ID NO: 3163

SEQ ID NO: 3325 - DNA, 201 bp, Homo sapiens; identical to SEQ ID NO: 3150

SEQ ID NO: 3326 - DNA, 201 bp, Homo sapiens; identical to SEQ ID NO: 3164

SEQ ID NO: 3327 - DNA, 201 bp, Homo sapiens; identical to SEQ ID NO: 3195

SEQ ID NO: 3328 - DNA, 201 bp, Homo sapiens; identical to SEQ ID NO: 3196

SEQ ID NO: 3329 - DNA, 201 bp, Homo sapiens; identical to SEQ ID NO: 3197

SEQ ID NO: 3330 - DNA, 201 bp, Homo sapiens; identical to SEQ ID NO: 3167

SEQ ID NO: 3331 - DNA, 201 bp, Homo sapiens; identical to SEQ ID NO: 3168

SEQ ID NO: 3332 - DNA, 201 bp, Homo sapiens; identical to SEQ ID NO: 3169

SEQ ID NO: 3333 - DNA, 201 bp, Homo sapiens; identical to SEQ ID NO: 3152

SEQ ID NO: 3334 - DNA, 201 bp, Homo sapiens; identical to SEQ ID NO: 3154

SEQ ID NO: 3335 - DNA, 201 bp, Homo sapiens; identical to SEQ ID NO: 3153

SEQ ID NO: 3336 - DNA, 201 bp, Homo sapiens; identical to SEQ ID NO: 3138

SEQ ID NO: 3337 - DNA, 201 bp, Homo sapiens; identical to SEQ ID NO: 3155

SEQ ID NO: 3338 - DNA, 201 bp, Homo sapiens; identical to SEQ ID NO: 3139

SEQ ID NO: 3339 - DNA, 201 bp, Homo sapiens; identical to SEQ ID NO: 3207

SEQ ID NO: 3340 - DNA, 201 bp, Homo sapiens; identical to SEQ ID NO: 3140

SEQ ID NO: 3341 - DNA, 201 bp, Homo sapiens; identical to SEQ ID NO: 3141

SEQ ID NO: 3342 - DNA, 201 bp, Homo sapiens; identical to SEQ ID NO: 3157

SEQ ID NO: 3343 - DNA, 201 bp, Homo sapiens; identical to SEQ ID NO: 3158

SEQ ID NO: 3344 - DNA, 201 bp, Homo sapiens; identical to SEQ ID NO: 3143

SEQ ID NO: 3345 - DNA, 201 bp, Homo sapiens; identical to SEQ ID NO: 3144

SEQ ID NO: 3346 - DNA, 201 bp, Homo sapiens; identical to SEQ ID NO: 3142

SEQ ID NO: 3347 - DNA, 201 bp, Homo sapiens; identical to SEQ ID NO: 3147

SEQ ID NO: 3348 - DNA, 201 bp, Homo sapiens; identical to SEQ ID NO: 3146

SEQ ID NO: 3349 - DNA, 201 bp, Homo sapiens; identical to SEQ ID NO: 3145

SEQ ID NO: 3350 - DNA, 201 bp, Homo sapiens; identical to SEQ ID NO: 3148

SEQ ID NO: 3351 - DNA, 201 bp, Homo sapiens; identical to SEQ ID NO: 3159

SEQ ID NO: 3352 - DNA, 201 bp, Homo sapiens; identical to SEQ ID NO: 3149

SEQ ID NO: 3353 - DNA, 201 bp, Homo sapiens; identical to SEQ ID NO: 3161

SEQ ID NO: 3354 - DNA, 201 bp, Homo sapiens; identical to SEQ ID NO: 3160

SEQ ID NO: 3355 - DNA, 201 bp, Homo sapiens; identical to SEQ ID NO: 3162

SEQ ID NO: 3356 - DNA, 201 bp, Homo sapiens; identical to SEQ ID NO: 3150

SEQ ID NO: 3357 - DNA, 201 bp, Homo sapiens; identical to SEQ ID NO: 3151

SEQ ID NO: 3358 - DNA, 201 bp, Homo sapiens; identical to SEQ ID NO: 3164

SEQ ID NO: 3359 - DNA, 201 bp, Homo sapiens; identical to SEQ ID NO: 3165

SEQ ID NO: 3360 - DNA, 201 bp, Homo sapiens; identical to SEQ ID NO: 3166

SEQ ID NO: 3361 - DNA, 201 bp, Homo sapiens; identical to SEQ ID NO: 3167

SEQ ID NO: 3362 - DNA, 201 bp, Homo sapiens; identical to SEQ ID NO: 3168

SEQ ID NO: 3363 - DNA, 201 bp, Homo sapiens; identical to SEQ ID NO: 3169

SEQ ID NO: 3364 - DNA, 201 bp, Homo sapiens; identical to SEQ ID NO: 3154

SEQ ID NO: 3365 - DNA, 201 bp, Homo sapiens; identical to SEQ ID NO: 3153

SEQ ID NO: 3366 - DNA, 201 bp, Homo sapiens; identical to SEQ ID NO: 3138

SEQ ID NO: 3367 - DNA, 201 bp, Homo sapiens; identical to SEQ ID NO: 3155

SEQ ID NO: 3368 - DNA, 201 bp, Homo sapiens; identical to SEQ ID NO: 3139

SEQ ID NO: 3369 - DNA, 201 bp, Homo sapiens; identical to SEQ ID NO: 3140

SEQ ID NO: 3370 - DNA, 201 bp, Homo sapiens; identical to SEQ ID NO: 3141

SEQ ID NO: 3371 - DNA, 201 bp, Homo sapiens; identical to SEQ ID NO: 3157

SEQ ID NO: 3372 - DNA, 201 bp, Homo sapiens; identical to SEQ ID NO: 3158

SEQ ID NO: 3373 - DNA, 201 bp, Homo sapiens; identical to SEQ ID NO: 3144

SEQ ID NO: 3374 - DNA, 201 bp, Homo sapiens; identical to SEQ ID NO: 3142

SEQ ID NO: 3375 - DNA, 201 bp, Homo sapiens; identical to SEQ ID NO: 3146

SEQ ID NO: 3376 - DNA, 201 bp, Homo sapiens; identical to SEQ ID NO: 3145

SEQ ID NO: 3377 - DNA, 201 bp, Homo sapiens; identical to SEQ ID NO: 3288

SEQ ID NO: 3378 - DNA, 201 bp, Homo sapiens; identical to SEQ ID NO: 3289

SEQ ID NO: 3379 - DNA, 201 bp, Homo sapiens; identical to SEQ ID NO: 3149

SEQ ID NO: 3380 - DNA, 201 bp, Homo sapiens; identical to SEQ ID NO: 3160

SEQ ID NO: 3381 - DNA, 201 bp, Homo sapiens; identical to SEQ ID NO: 3161

SEQ ID NO: 3382 - DNA, 201 bp, Homo sapiens; identical to SEQ ID NO: 3162

SEQ ID NO: 3383 - DNA, 201 bp, Homo sapiens; identical to SEQ ID NO: 3150

SEQ ID NO: 3384 - DNA, 201 bp, Homo sapiens; identical to SEQ ID NO: 3151

SEQ ID NO: 3385 - DNA, 201 bp, Homo sapiens; identical to SEQ ID NO: 3164

SEQ ID NO: 3386 - DNA, 201 bp, Homo sapiens; identical to SEQ ID NO: 3165

SEQ ID NO: 3387 - DNA, 201 bp, Homo sapiens; identical to SEQ ID NO: 3166

SEQ ID NO: 3388 - DNA, 201 bp, Homo sapiens; identical to SEQ ID NO: 3167

SEQ ID NO: 3389 - DNA, 201 bp, Homo sapiens; identical to SEQ ID NO: 3168

SEQ ID NO: 3390 - DNA, 201 bp, Homo sapiens; identical to SEQ ID NO: 3169

SEQ ID NO: 3391 - DNA, 201 bp, Homo sapiens; identical to SEQ ID NO: 2794

SEQ ID NO: 3392 - DNA, 201 bp, Homo sapiens; identical to SEQ ID NO: 2796

SEQ ID NO: 3393 - DNA, 201 bp, Homo sapiens
ttaatgagtttgagatcgagcagcaccaggaatgtgcctatgaccacctggaaatgtatgacgggccggacagcctggcccccattctgggccgtttctgyggcagcaagaaaccagaccccacggtggcttccggcagcagtatgtttctcaggttttattcggatgcctcagtgcagaggaaaggcttccaggcagtgc

SEQ ID NO: 3394 - DNA, 201 bp, Homo sapiens
cacggagcagcagctggagcattaccacgacccttgcaaagccgctgtcttttggggagacattgccttagatgaagatgacttgaagctgtttcacattsacaaagccagagactggaccaagcagacagtgggggcaacaggacacagcacaggtgggcttgaagagcaggcatctgagagcagcccagacaccacagc

SEQ ID NO: 3395 - DNA, 201 bp, Homo sapiens
gggcaagtagctccgagcggctgcttcccggttgcctcgacgaagacagggggcgccgcgctccgcttgctccgcgcctgagccatgcccagcagccctgwgtaaccaccgagtcccggccggagccgaccgacccagtgtgcgccgtctttcggccgagctgagctttcgtgcacgcaactccctctgccccagccggcc

SEQ ID NO: 3396 - DNA, 201 bp, Homo sapiens
agaaaggctttcatgcccgatacaccagcaccaagttccaggatgccctgcacatgaagaaatagtgctgatgttcttgaaagacagaaactgagaatttkttttgttttgttttgtttttaacaacaatagcaccttgaaaatctgccctaaaacagtgtacagtatttttctcaaacaaaaactcagaatccagcctta

SEQ ID NO: 3397 - DNA, 201 bp, Homo sapiens
gactgtggatgaagtttgtgtccgatggctctatcaataaagcgggctttgcagccaattttttcaaggaggtggatgagtgttcctggccagatcacggygggtgcgagcatcgctgtgtgaacacgctgggcagctacaagtgtgcctgtgaccctggctacgagctggccgccgataagaagatgtgtgaagtggcct

SEQ ID NO: 3398 - DNA, 201 bp, Homo sapiens
aaagtcttgtaagtttggccaacaaggtggagagaaaaatgttcttttgcttctgtctgcaatgttatcattcatgaactgttaaagtgttaaagattagrattgaagtcactgaccattccggctatgcttcttcataccattctccttgtcccttgctcctatgtggcaaaaggtcagccttggggttggccgttcctc

SEQ ID NO: 3399 - DNA, 201 bp, Homo sapiens
gctacctgcgggggagacatgaacaaagatgccggtcagattcaatctcccaactatccggatgactacagaccttccaaggaatgtgtctggaggattayggtttcagaggggtttcacgtgggacttaccttccaagcttttgagattgaaaggcacgacagctgtgcatatgactacctggaagtccgggatggcccc

SEQ ID NO: 3400 - DNA, 127 bp, Homo sapiens
ccgcagcctcggccgccgggcaagtakctccgagcggctgcttcccggttgcctcgacgaagacagggggcgccgcgctccgcttgctccgcgcctgagccatgcccagcagccctgtgtaaccacc

SEQ ID NO: 3401 - DNA, 201 bp, Homo sapiens
gccacagagtgaaactcacctttaatgagtttgagatcgagcagcaccaggaatgtgcctatgaccacctggaaatgtatgacgggccggacagcctggcycccattctgggccgtttctgcggcagcaagaaaccagaccccacggtggcttccggcagcagtatgtttctcaggttttattcggatgcctcagtgcaga

SEQ ID NO: 3402 - DNA, 201 bp, Homo sapiens
gcggctcagtcagggagacatagctcaagcccggaagctgtacaaatgcccagcgtgtggggagaccctgcaggacacaacgggaaacttttctgcacctsgtttcccaaatgggtacccatcttactcccactgcgtctggaggatctcggtcaccccaggggaaaagatcgtattaaacttcacatccatggatttgtt

SEQ ID NO: 3403 - DNA, 201 bp, Homo sapiens
cggcagcagtatgtttctcaggttttattcggatgcctcagtgcagaggaaaggcttccaggcagtgcacagcacagagtgcgggggcaggctgaaggctraagtgcagaccaaagagctctattcccacgcccagtttggggacaacaactacccgagcgaggcccgctgtgactgggtgatcgtggcagaggacggcta

SEQ ID NO: 3404 - DNA, 201 bp, Homo sapiens
ggtggtggcccccgctcagtaccggatctcccttcagtttgaagtgtttgaactggaaggcaatgacgtctgtaagtacgactttgtagaggtgcgcagcrgcctgtcccccgacgccaagctgcacggcaggttctgcggctctgagacgccggaggtcatcacctcgcagagcaacaacatgcgcgtggagttcaagtc

SEQ ID NO: 3405 - DNA, 201 bp, Homo sapiens
gagcagcagctggagcattaccacgacccttgcaaagccgctgtcttttggggagacattgccttagatgaagatgacttgaagctgtttcacattgacawagccagagactggaccaagcagacagtgggggcaacaggacacagcacaggtgggcttgaagagcaggcatctgagagcagcccagacaccacagccatg

SEQ ID NO: 3406 - DNA, 201 bp, Homo sapiens
agagacatacgactttgacagcatcatgcactacgcccggaacaccttctcaagaggagttttcttagacaccatccttccccgtcaagatgacaatggcrtcaggccaaccattggccagcgcgtgcggctcagtcagggagacatagctcaagcccggaagctgtacaaatgcccagcgtgtggggagaccctgcagga

SEQ ID NO: 3407 - DNA, 201 bp, Homo sapiens
gtggatgagtgttcctggccagatcacggcgggtgcgagcatcgctgtgtgaacacgctgggcagctacaagtgtgcctgtgaccctggctacgagctggmcgccgataagaagatgtgtgaagtggcctgtggcggtttcattaccaagctgaatggaaccatcaccagccctgggtggccgaaggagtatcccacaaac

SEQ ID NO: 3408 - DNA, 201 bp, Homo sapiens
ctgggcagctacaagtgtgcctgtgaccctggctacgagctggccgccgataagaagatgtgtgaagtggcctgtggcggtttcattaccaagctgaatgsaaccatcaccagccctgggtggccgaaggagtatcccacaaacaaaaactgtgtctggcaggtggtggcccccgctcagtaccggatctcccttcagttt

SEQ ID NO: 3409 - DNA, 201 bp, Homo sapiens
gtgttaaagattagaattgaagtcactgaccattccggctatgcttcttcataccattctccttgtcccttgctcctatgtggcaaaaggtcagccttggrgttggccgttcctctaatctggacttgcttgcaaaggtgccaggctgtcttctgtccatgttgggcataagggatgaaaacttggccgagactaatgtgt

SEQ ID NO: 3410 - DNA, 201 bp, Homo sapiens
cccccgacgccaagctgcacggcaggttctgcggctctgagacgccggaggtcatcacctcgcagagcaacaacatgcgcgtggagttcaagtccgacaayaccgtctccaagcgcggcttcagggcccacttcttctcagataaggacgagtgtgccaaggacaacggcgggtgtcagcatgagtgcgtcaacaccttcg

SEQ ID NO: 3411 - DNA, 201 bp, Homo sapiens
ccgcctcgcccagcctgccccctactcagccatcaaggaggctgtaaaagcagcagccaaggggcccatggctggcatccttgcctacaccgaggatgagstcgtctctacggacttcctcggtgatacccactcgtccatcttcgatgctaaggccggcattgcgctcaatgacaatttcgtgaagctcatttcatggta

SEQ ID NO: 3412 - DNA, 201 bp, Homo sapiens
cggtgaccagagcaccgcccccacctgagcctaaggctgaagtagagccccagccacaaccagagcccacaccagtcagggaggaaataaagccaccaccrccaccactgcctcctcaccccgctactcctcctcctaagatggtgtctgtggcccgggagctgactgtgggcatcaatggatttggacgcatcggtcgcc

SEQ ID NO: 3413 - DNA, 119 bp, Homo sapiens
aggacccacagccctggcsctccgcacgcacctcggtaacatcacagcaggtccaggccaatgataaccttataagaggccatgtcgaagcgcgacatcgtcctcaccaatgtcaccgt

SEQ ID NO: 3414 - DNA, 201 bp, Homo sapiens
gcccctacgtggtggagtccacaggcgtgtacctctccatacaggcagcttcggaccacatctctgcaggtgctcaacgtgtggtcatctccgcgccctcrccggatgcaccaatgttcgtcatgggtgtcaatgaaaatgactataaccctggctccatgaacattgtgagcaacgcgtcctgcaccaccaactgtttgg

SEQ ID NO: 3415 - DNA, 201 bp, Homo sapiens
caggcgtgtacctctccatacaggcagcttcggaccacatctctgcaggtgctcaacgtgtggtcatctccgcgccctcaccggatgcaccaatgttcgtyatgggtgtcaatgaaaatgactataaccctggctccatgaacattgtgagcaacgcgtcctgcaccaccaactgtttggctcccctcgccaaagtcatcc

SEQ ID NO: 3416 - DNA, 201 bp, Homo sapiens
gactgtgggcatcaatggatttggacgcatcggtcgcctggtcctgcgcgcctgcatggagaagggtgttaaggtggtggctgtgaatgatccattcattracccggaatacatggtgtacatgtttaagtatgactccacccacggccgatacaagggaagtgtggaattcaggaatggacaactggtcgtggacaacca

SEQ ID NO: 3417 - DNA, 201 bp, Homo sapiens
tcctcaccccgctactcctcctcctaagatggtgtctgtggcccgggagctgactgtgggcatcaatggatttggacgcatcggtcgcctggtcctgcgckcctgcatggagaagggtgttaaggtggtggctgtgaatgatccattcattgacccggaatacatggtgtacatgtttaagtatgactccacccacggccg

SEQ ID NO: 3418 - DNA, 201 bp, Homo sapiens; identical to SEQ ID NO: 3411

SEQ ID NO: 3419 - DNA, 201 bp, Homo sapiens; identical to SEQ ID NO: 3412

SEQ ID NO: 3420 - DNA, 119 bp, Homo sapiens; identical to SEQ ID NO: 3413

SEQ ID NO: 3421 - DNA, 201 bp, Homo sapiens
gcccctacgtggtggagtccacaggcgtgtacctctccatacaggcagcttcggaccacatctctgcaggtgctcaacgtgtggtcatctccgcgccctcrccggatgcaccaatgttcgtcatgggtgtcaatgaaaatgactataaccctggctccatgaacattgtgagtgtccgtgcacaccttggctgtttcagca

SEQ ID NO: 3422 - DNA, 201 bp, Homo sapiens; identical to SEQ ID NO: 3417

SEQ ID NO: 3423 - DNA, 201 bp, Homo sapiens; identical to SEQ ID NO: 3416

SEQ ID NO: 3424 - DNA, 201 bp, Homo sapiens
caggcgtgtacctctccatacaggcagcttcggaccacatctctgcaggtgctcaacgtgtggtcatctccgcgccctcaccggatgcaccaatgttcgtyatgggtgtcaatgaaaatgactataaccctggctccatgaacattgtgagtgtccgtgcacaccttggctgtttcagcaacgcgtcctgcaccaccaact

SEQ ID NO: 3425 - DNA, 201 bp, Homo sapiens
cgtgtggtcatctccgcgccctcaccggatgcaccaatgttcgtcatgggtgtcaatgaaaatgactataaccctggctccatgaacattgtgagtgtccrtgcacaccttggctgtttcagcaacgcgtcctgcaccaccaactgtttggctcccctcgccaaagtcatccacgagcgatttgggatcgtggaagggttg

SEQ ID NO: 3426 - DNA, 201 bp, Homo sapiens
cctgtgctgatatctgaaaactgcccagagaactgctccattcataccaaaaccaaatacacctattactatggaaagagaaagaagatctccaagccccscatcggggaaagcaaccccgacagcggacaccccaaacccgccaggcggaggaagcgacggaaatccattttcgtgcagaagaaacggaggtcttctgcc

SEQ ID NO: 3427 - DNA, 110 bp, Homo sapiens
cccttccgacggtgcaggagtgcatggagctgaagctggggcctgccatcaagttatgccaccagatcgagagagtcaaagtggctttctacgcccagtaygccaactga

SEQ ID NO: 3428 - DNA, 201 bp, Homo sapiens
ggctggtgtgaagccaattcttatcctttgactgcaccacacaaaacagtctcacaaaagaagagaaagattgcagtcgtgcaaccagagaaacaattgcygcccacagtgcctgttaagaaaatacctcatgacctttgtttattccctcacctggacaccacaggaaccgtcaacgggaaatactgctgtcctcagctc

SEQ ID NO: 3429 - DNA, 201 bp, Homo sapiens
ggatgaagcttgagacagtgaatatgtgcgagcccttttacatctctcctgcgtcggtgactaaggtttttaacaatcacttttttcaagtgactattgaygacctaagacctgaaccaagtaaactgtcaatgctgtgccatgcagattctttggggattttgccagtacagtggtgccttaaaaatggagtcagcctca

SEQ ID NO: 3430 - DNA, 201 bp, Homo sapiens
ggaggaagattacgccttcgctatgtgggattggaggacactgaatcctatgaccagtggttgttttacttggattacagacttcgaccagttggttggtktcaagagaataaatacagaatggacccaccttcagaaatctatcctttgaagatggcctctgaatggaaatgtactctggaaaaatcccttattgatgct

SEQ ID NO: 3431 - DNA, 201 bp, Homo sapiens
cagaatggacccaccttcagaaatctatcctttgaagatggcctctgaatggaaatgtactctggaaaaatcccttattgatgctgccaaatttcctcttycaatggaagtgtttaaggatcacgcagatttgcgaagccatttcttcacagttgggatgaagcttgagacagtgaatatgtgcgagcccttttacatctc

SEQ ID NO: 3432 - DNA, 201 bp, Homo sapiens
tttgtttagtcctgtgctgatatctgaaaactgcccagagaactgctccattcataccaaaaccaaatacacctattactatggaaagagaaagaagatckccaagccccccatcggggaaagcaaccccgacagcggacaccccaaacccgccaggcggaggaagcgacggaaatccattttcgtgcagaagaaacggag

SEQ ID NO: 3433 - DNA, 201 bp, Homo sapiens
acgatgacgcccagaagtgtgagctgatctgccagtcggcggacacgggggacgtggtgttcatgaaccaggtggttcacgatgggacacgctgcagctaycgggacccatacagcgtctgtgcgcgtggcgagtgtgtgcctgtcggctgtgacaaggaggtggggtccatgaaggcggatgacaagtgtggagtctgcg

SEQ ID NO: 3434 - DNA, 128 bp, Homo sapiens
cctgggatgctggggcacacgcggagtcattcctgtgagaaccagcctggcctgtgttaaactcttgtgccttggaaatccagatctttaaaattttatgyatttattaacatcgccattggacccca

SEQ ID NO: 3435 - DNA, 201 bp, Homo sapiens
gtgggcccctggcctgcaacccctttggagagtggaggtcctggggggctccccgccctccccctgttgccctcccctccctgggatgctggggcacacgyggagtcattcctgtgagaaccagcctggcctgtgttaaactcttgtgccttggaaatccagatctttaaaattttatgtatttattaacatcgccattgg

SEQ ID NO: 3436 - DNA, 106 bp, Homo sapiens
ggagtcattcctgtgagaaccagcctggcctgtgttaaactcttgtgccttggaaatccagatctttaaaattttatgtatttattaacatcgccattggrcccca

SEQ ID NO: 3437 - DNA, 201 bp, Homo sapiens
tgctggagtcggacatcttcatcttctacctggctcaagctgggccagagtgtgtggttctcccaggggtggttggaccccaggactgaggaccagagtcyactcatagcctggccctggagatgacaagggccacccaggccaagtgccccagggcagggtgccagcccctggcctggtgctggagtggggaagacacac

SEQ ID NO: 3438 - DNA, 201 bp, Homo sapiens
aagtgccccagggcagggtgccagcccctggcctggtgctggagtggggaagacacactcacccacggtgctgtaagggcctgagctgtgctcagctgccrgccatgctacctccaagggacaggtaacagtcttagatcctctggctctcaggaagtggcagggggtcccaggacacctccggggtcttggaggatgtct

SEQ ID NO: 3439 - DNA, 201 bp, Homo sapiens
cagccaggccgagaggaggggggcctgggaatgtggcatgaggcttcccagctgcagggctggagggggtggaacacaagatgatcgcaggcccagctccyggaagccaagagctccatgcagttccaccagctgaggccaggcagcagaggccagtttgtctttgctggccagaagatggtgctcatggccatactctgg

SEQ ID NO: 3440 - DNA, 201 bp, Homo sapiens
ctggaggagatggacacctatgagtgggcgctcaagagctgggccccctgcagcaaggcctgtggaggagggatccagttcaccaaatacggctgccggcrcagacgagaccaccacatggtgcagcgacacctgtgtgaccacaagaagaggcccaagcccatccgccggcgctgcaaccagcacccgtgctctcagcct

SEQ ID NO: 3441 - DNA, 201 bp, Homo sapiens
actcctactatgtgcaccagaatgccaagcacagctgggtgccctacgagcctgacgatgacgcccagaagtgtgagctgatctgccagtcggcggacacrggggacgtggtgttcatgaaccaggtggttcacgatgggacacgctgcagctaccgggacccatacagcgtctgtgcgcgtggcgagtgtgtgcctgtcg

SEQ ID NO: 3442 - DNA, 201 bp, Homo sapiens
ggcccctgcctgaagccattgccatcctggctctccccccaactgagggtggcccccgcagcagcctggcctacaagtacgtcatccatgaggacctgctkccccttatcgggagcaacaatgtgctcctggaggagatggacacctatgagtgggcgctcaagagctgggccccctgcagcaaggcctgtggaggaggga

SEQ ID NO: 3443 - DNA, 201 bp, Homo sapiens
cgggccccaaccctggcccagaccctggcccaacctcactgccccccttctccactcctggaagccccttaccaggaccccaggaccctgcagatgctgcrgagcctcctggaaagccaacgggatcagaggaccatcagcatggccgagccacacagctcccaggagctctggatacaagctccccagggacccagcatc

SEQ ID NO: 3444 - DNA, 201 bp, Homo sapiens
acctgagacatcccggcaccagcctccctgctgcctccccggtgacatgagctgtgccctgccatcccactggcacgtttacactctgtgtactgccccgygactcccagctcagaggacacacatagcagggcaggcgcaagcacagacttcattttaaatcattcgccttcttctcgtttggggctgtgatgctcttta

SEQ ID NO: 3445 - DNA, 201 bp, Homo sapiens
tgtggagagggcatccagcagcggcaggtggtgtgcaggaccaacgccaacagcctcgggcattgcgagggggataggccagacactgtccaggtctgcarcctgcctgcctgtggaggaaatcaccagaactccacggtgagggccgatgtctgggaacttgggacgccagaggggcagtgggtgccacaatctgaaccc

SEQ ID NO: 3446 - DNA, 201 bp, Homo sapiens
agtgctcgatcgctactgctccattcccggctaccaccggctctgctgtgtgtcctgcatcaagaaggcctcgggccccaaccctggcccagaccctggcycaacctcactgccccccttctccactcctggaagccccttaccaggaccccaggaccctgcagatgctgcagagcctcctggaaagccaacgggatcaga

SEQ ID NO: 3447 - DNA, 201 bp, Homo sapiens
tgcagcctgcctgcctgtggaggaaatcaccagaactccacggtgagggccgatgtctgggaacttgggacgccagaggggcagtgggtgccacaatctgracccctacatcccattaacaagatatcatcaacggagccctgcacgggagacaggtctgtcttctgccagatggaagtgctcgatcgctactgctccatt

SEQ ID NO: 3448 - DNA, 201 bp, Homo sapiens
atggaagtgctcgatcgctactgctccattcccggctaccaccggctctgctgtgtgtcctgcatcaagaaggcctcgggccccaaccctggcccagaccytggcccaacctcactgccccccttctccactcctggaagccccttaccaggaccccaggaccctgcagatgctgcagagcctcctggaaagccaacggga

SEQ ID NO: 3449 - DNA, 201 bp, Homo sapiens
ggggtgacaactcccactgcaggactgtgaaggggacgctgggcaaggcctccaagcaggcaggagctctcaagctggtgcagatcccagcaggtgccagrcacatccagattgaggcactggagaagtccccccaccgcattgtggtgaagaaccaggtcaccggcagcttcatcctcaaccccaagggcaaggaagcca

SEQ ID NO: 3450 - DNA, 201 bp, Homo sapiens
ggagcatctcccctaccacccccggggggctgccttggggctggactcagacacctacgccagtccctgaggacaaagggcaacctggagaagacctgagrcatcccggcaccagcctccctgctgcctccccggtgacatgagctgtgccctgccatcccactggcacgtttacactctgtgtactgccccgtgactccc

SEQ ID NO: 3451 - DNA, 201 bp, Homo sapiens
gcccccggcgggactgaccctctcagggcccctgttggtctcccctgccaagaccagggtcaactattgctccctcctcacagaccctgggcctgggcagrtctgaatcccggctggtctgtagctagaagctgtcagggctgcctgccttcccggaactgtgaggacccctgtggaggccctgcatatttggcccctctc

SEQ ID NO: 3452 - DNA, 201 bp, Homo sapiens
tgaccctctcagggcccctgttggtctcccctgccaagaccagggtcaactattgctccctcctcacagaccctgggcctgggcagatctgaatcccggcyggtctgtagctagaagctgtcagggctgcctgccttcccggaactgtgaggacccctgtggaggccctgcatatttggcccctctccccagaaaggcaaa

SEQ ID NO: 3453 - DNA, 201 bp, Homo sapiens
ggcccctgttggtctcccctgccaagaccagggtcaactattgctccctcctcacagaccctgggcctgggcagatctgaatcccggctggtctgtagctrgaagctgtcagggctgcctgccttcccggaactgtgaggacccctgtggaggccctgcatatttggcccctctccccagaaaggcaaagcagggccaggg

SEQ ID NO: 3454 - DNA, 201 bp, Homo sapiens
gaggccaggcagcagaggccagtttgtctttgctggccagaagatggtgctcatggccatactctggccttgcagatgtcactagtgttacttctagtgastccagattacagactggccccccaatctcaccccagcccaccagagaagggggctcaggacaccctggaccccaagtcctcagcatccagggatttccaa

SEQ ID NO: 3455 - DNA, 201 bp, Homo sapiens
caagtgccccagggcagggtgccagcccctggcctggtgctggagtggggaagacacactcacccacggtgctgtaagggcctgagctgtgctcagctgcyggccatgctacctccaagggacaggtaacagtcttagatcctctggctctcaggaagtggcagggggtcccaggacacctccggggtcttggaggatgtc

SEQ ID NO: 3456 - DNA, 201 bp, Homo sapiens
acaggtaacagtcttagatcctctggctctcaggaagtggcagggggtcccaggacacctccggggtcttggaggatgtctcctaaactcctgccaggtgatagaggtgcttctcacttcttccttccccaaggcaaaggggctgttctgagccagcctggaggaacatgagtagtgggcccctggcctgcaacccctttg

SEQ ID NO: 3457 - DNA, 201 bp, Homo sapiens
acctttgagccctgcaagcagctgtggtgcagccatcctgacaacccgtacttctgcaagaccaagaaggggcccccgctggatgggactgagtgtgcacmcggcaagtggtgcttcaaaggtcactgcatctggaagtcgccggagcagacatatggccaggatggaggctggagctcctggaccaagtttgggtcatgt

SEQ ID NO: 3458 - DNA, 201 bp, Homo sapiens
ggagtgtgtgtacactggaggtgtcactggaatgcctggggcagctgttgccatcagcaactgtgacggattggcgggcctcatccgcacagacagcaccracttcttcattgagcctctggagcggggccagcaggagaaggaggccagcgggaggacacatgtggtgtaccgccgggaggccgtccagcaggagtgggc

SEQ ID NO: 3459 - DNA, 201 bp, Homo sapiens
agcatccctttgcccctgagacaccaatccctggagcatcctggagcatctcccctaccacccccggggggctgccttggggctggactcagacacctacrccagtccctgaggacaaagggcaacctggagaagacctgagacatcccggcaccagcctccctgctgcctccccggtgacatgagctgtgccctgccatc

SEQ ID NO: 3460 - DNA, 201 bp, Homo sapiens
gcagcccttacggcaggagtgtgtgtacactggaggtgtcactggaatgcctggggcagctgttgccatcagcaactgtgacggattggcgggcctcatcygcacagacagcaccgacttcttcattgagcctctggagcggggccagcaggagaaggaggccagcgggaggacacatgtggtgtaccgccgggaggccgt

SEQ ID NO: 3461 - DNA, 201 bp, Homo sapiens
gcacccgtgctctcagcctgtgtgggtgacggaggagtggggtgcctgcagccggagctgtgggaagctgggggtgcagacacgggggatacagtgcctgmtgcccctctccaatggaacccacaaggtcatgccggccaaagcctgtgccggggaccggcctgaggcccgacggccctgtctccgagtgccctgcccagc

SEQ ID NO: 3462 - DNA, 201 bp, Homo sapiens
tgctgctggtggtggacgactcggtggttcgcttccatggcaaggagcatgtgcagaactatgtcctcaccctcatgaatatcgtagatgagatttaccaygatgagtccctgggggttcatataaatattgccctcgtccgcttgatcatggttggctaccgacagtccctgagcctgatcgagcgcgggaacccctcac

SEQ ID NO: 3463 - DNA, 201 bp, Homo sapiens
actggccccccaatctcaccccagcccaccagagaagggggctcaggacaccctggaccccaagtcctcagcatccagggatttccaaactggcgctcacyccctgactccaccaggatggcaacttcaattatcactctcagcctggaaggggactctgtgggacacagagggaacacgatttctcaggctgtcccttca

SEQ ID NO: 3464 - DNA, 201 bp, Homo sapiens
gcagccggagctgtgggaagctgggggtgcagacacgggggatacagtgcctgctgcccctctccaatggaacccacaaggtcatgccggccaaagcctgygccggggaccggcctgaggcccgacggccctgtctccgagtgccctgcccagcccagtggaggctgggagcctggtcccagtgctctgccacctgtggag

SEQ ID NO: 3465 - DNA, 201 bp, Homo sapiens
ggtaggtgggggactgttcacagccaggccgagaggaggggggcctgggaatgtggcatgaggcttcccagctgcagggctggagggggtggaacacaagrtgatcgcaggcccagctcccggaagccaagagctccatgcagttccaccagctgaggccaggcagcagaggccagtttgtctttgctggccagaagatgg

SEQ ID NO: 3466 - DNA, 201 bp, Homo sapiens
agggcatccagcagcggcaggtggtgtgcaggaccaacgccaacagcctcgggcattgcgagggggataggccagacactgtccaggtctgcagcctgccygcctgtggaggaaatcaccagaactccacggtgagggccgatgtctgggaacttgggacgccagaggggcagtgggtgccacaatctgaacccctacatc

SEQ ID NO: 3467 - DNA, 201 bp, Homo sapiens
ggggatacagtgcctgctgcccctctccaatggaacccacaaggtcatgccggccaaagcctgtgccggggaccggcctgaggcccgacggccctgtctcygagtgccctgcccagcccagtggaggctgggagcctggtcccagtgctctgccacctgtggagagggcatccagcagcggcaggtggtgtgcaggaccaa

SEQ ID NO: 3468 - DNA, 201 bp, Homo sapiens
aggctgcagctgctcagaagctccaggcattttgtttctggtgaccgcccctaatgggatatcggtgatcactggtccacccttcctgtcagggcttttcyggggctgctcttggaaatgaagtcttaagtactgaataactcccctggggatagctggggcatttgtctagctgggctactttctaacactttgccatag

SEQ ID NO: 3469 - DNA, 201 bp, Homo sapiens
atgatgtcaggattcagctgaagagcaagtgggatgagtccatcttcacgaaaggctgcatccaggcgctggaaagctggctcccgcggaacatttacatygtggctggcgtcttcatcgccatctcgctgttgcagatatttggcatcttcctggcaaggacgctgatctcagacatcgaggcagtgaaggccggccatc

SEQ ID NO: 3470 - DNA, 201 bp, Homo sapiens
gaccaagggtcccccttgttacctgcccaaacttgtgactgcatccctctggagtctacccagagacagagaatgtgtctttatgtgggagtggtgactckgaaagacagagagggctcctgtggctgccaggagggcttgactcagaccccctgcagctcaagcatgtctgcaggacaccctggtcccctctccactggc

SEQ ID NO: 3471 - DNA, 201 bp, Homo sapiens
aagttaagggtacttttaagtggatactgttttgatgaaattgccaacttcagggagcccagcttggagaaggaggacgtgagtattccttacaaggctcygaaacaattctttcttcacttagttttctttctgtgctctgcatcttatattccagcagggtcttccaatgcatggtttaataactaccagaactggcca

SEQ ID NO: 3472 - DNA, 201 bp, Homo sapiens
agcgtgacgtgacctctctgtttctgcttgctggtgctgaagaccaagggtcccccttgttacctgcccaaacttgtgactgcatccctctggagtctacmcagagacagagaatgtgtctttatgtgggagtggtgactctgaaagacagagagggctcctgtggctgccaggagggcttgactcagaccccctgcagct

SEQ ID NO: 3473 - DNA, 201 bp, Homo sapiens
cacatatcaggggttgtttgcaggatcctcagccatgttcaagtgaagtaagcctgagccagtgcgtggactggtgccacgggagtgccttgtccactgtmcccctgtgtccaccagctattctcctggcgccggaactgcctctggtcttgatagcattaagccctgatggcgccggtggcgcggtgggcatggttcttc

SEQ ID NO: 3474 - DNA, 201 bp, Homo sapiens
ggccgtgggtagagggacccacaggcgtggacagggcatctctctccatcaagcaaagcagcatgggggcctgcccgtaacgggaggcggacgtggccccrctgggcctctgagtgccagcgcagtctgctgggacatgcacatatcaggggttgtttgcaggatcctcagccatgttcaagtgaagtaagcctgagccag

SEQ ID NO: 3475 - DNA, 201 bp, Homo sapiens
ccgctgggcctctgagtgccagcgcagtctgctgggacatgcacatatcaggggttgtttgcaggatcctcagccatgttcaagtgaagtaagcctgagcmagtgcgtggactggtgccacgggagtgccttgtccactgtccccctgtgtccaccagctattctcctggcgccggaactgcctctggtcttgatagcatt

SEQ ID NO: 3476 - DNA, 201 bp, Homo sapiens
ttacaaggctccgaaacaattctttcttcacttagttttctttctgtgctctgcatcttatattccagcagggtcttccaatgcatggtttaataactacyagaactggccaggtgcagtggctcacgcctgtaatcccagaactttgggaggctaagacaggcagatcacttgaggccaggagttcgagaccagcctgga

SEQ ID NO: 3477 - DNA, 201 bp, Homo sapiens
gggggttggtggcagtgcccacctcactagatgcctctgacccagcctcccctgggggagtgggtggccacagaccctccctgccagagctcctggaaggytcctgcaggcctgacccatctattcctgtagacctggtttaggatgaagtctcggtgcgatttttgcagagttgggtttatctttcaactatagaccctt

SEQ ID NO: 3478 - DNA, 201 bp, Homo sapiens
atcgttcagggatggactgcaaccttaatttacttgccggagtgtacattctagtgtggtgtatactggtggctgttgatgatgatttttttttttttttttacacaattctctgtagactaggagaagaatgcttgtgtttttcggaagtgtgatgcttctctttgactgccaaactcttttatggaatatatctttata

SEQ ID NO: 3479 - DNA, 201 bp, Homo sapiens
catcgttcagggatggactgcaaccttaatttacttgccggagtgtacattctagtgtggtgtatactggtggctgttgatgatgatttttttttttttttttacacaattctctgtagactaggagaagaatgcttgtgtttttcggaagtgtgatgcttctctttgactgccaaactcttttatggaatatatctttat

SEQ ID NO: 3480 - DNA, 201 bp, Homo sapiens; identical to SEQ ID NO: 3468

SEQ ID NO: 3481 - DNA, 201 bp, Homo sapiens
tcatcgttcagggatggactgcaaccttaatttacttgccggagtgtacattctagtgtggtgtatactggtggctgttgatgatgatttttttttttttttttacacaattctctgtagactaggagaagaatgcttgtgtttttcggaagtgtgatgcttctctttgactgccaaactcttttatggaatatatcttta

SEQ ID NO: 3482 - DNA, 201 bp, Homo sapiens; identical to SEQ ID NO: 3469

SEQ ID NO: 3483 - DNA, 201 bp, Homo sapiens; identical to SEQ ID NO: 3470

SEQ ID NO: 3484 - DNA, 201 bp, Homo sapiens
tttatctttcaactatagacccttctggctgttctcagccatatcatgtgactctgaatagttggatgaggaatggaaagaaagcaaggatgagagccggkcacgtggcagtctccgcccagcatcggctgtccgcacagaggcacagggcaggcctcctgtgcactccccacctagcactggcctgtcctgaatccccgc

SEQ ID NO: 3485 - DNA, 201 bp, Homo sapiens; identical to SEQ ID NO: 3472

SEQ ID NO: 3486 - DNA, 201 bp, Homo sapiens; identical to SEQ ID NO: 3473

SEQ ID NO: 3487 - DNA, 201 bp, Homo sapiens; identical to SEQ ID NO: 3474

SEQ ID NO: 3488 - DNA, 201 bp, Homo sapiens; identical to SEQ ID NO: 3475

SEQ ID NO: 3489 - DNA, 201 bp, Homo sapiens
tcgttcagggatggactgcaaccttaatttacttgccggagtgtacattctagtgtggtgtatactggtggctgttgatgatgatttttttttttttttttacacaattctctgtagactaggagaagaatgcttgtgtttttcggaagtgtgatgcttctctttgactgccaaactcttttatggaatatatctttatat

SEQ ID NO: 3490 - DNA, 201 bp, Homo sapiens
tgtgtgtcctgggtgtgccggcctttctgtgaagggggttggtggcagtgcccacctcactagatgcctctgacccagcctcccctgggggagtgggtggycacagaccctccctgccagagctcctggaaggctcctgcaggcctgacccatctattcctgtagacctggtttaggatgaagtctcggtgcgatttttgc

SEQ ID NO: 3491 - DNA, 201 bp, Homo sapiens
atctttcaactatagacccttctggctgttctcagccatatcatgtgactctgaatagttggatgaggaatggaaagaaagcaaggatgagagccgggcaygtggcagtctccgcccagcatcggctgtccgcacagaggcacagggcaggcctcctgtgcactccccacctagcactggcctgtcctgaatccccgcctt

SEQ ID NO: 3492 - DNA, 201 bp, Homo sapiens; identical to SEQ ID NO: 3477

SEQ ID NO: 3493 - DNA, 201 bp, Homo sapiens; identical to SEQ ID NO: 3478

SEQ ID NO: 3494 - DNA, 201 bp, Homo sapiens; identical to SEQ ID NO: 3479

SEQ ID NO: 3495 - DNA, 201 bp, Homo sapiens; identical to SEQ ID NO: 3468

SEQ ID NO: 3496 - DNA, 201 bp, Homo sapiens; identical to SEQ ID NO: 3481

SEQ ID NO: 3497 - DNA, 201 bp, Homo sapiens; identical to SEQ ID NO: 3469

SEQ ID NO: 3498 - DNA, 201 bp, Homo sapiens; identical to SEQ ID NO: 3470

SEQ ID NO: 3499 - DNA, 201 bp, Homo sapiens; identical to SEQ ID NO: 3484

SEQ ID NO: 3500 - DNA, 201 bp, Homo sapiens; identical to SEQ ID NO: 3472

SEQ ID NO: 3501 - DNA, 201 bp, Homo sapiens; identical to SEQ ID NO: 3473

SEQ ID NO: 3502 - DNA, 201 bp, Homo sapiens; identical to SEQ ID NO: 3474

SEQ ID NO: 3503 - DNA, 201 bp, Homo sapiens; identical to SEQ ID NO: 3475

SEQ ID NO: 3504 - DNA, 201 bp, Homo sapiens; identical to SEQ ID NO: 3489

SEQ ID NO: 3505 - DNA, 201 bp, Homo sapiens; identical to SEQ ID NO: 3490

SEQ ID NO: 3506 - DNA, 201 bp, Homo sapiens; identical to SEQ ID NO: 3491

SEQ ID NO: 3507 - DNA, 201 bp, Homo sapiens; identical to SEQ ID NO: 3468

SEQ ID NO: 3508 - DNA, 201 bp, Homo sapiens; identical to SEQ ID NO: 3469

SEQ ID NO: 3509 - DNA, 201 bp, Homo sapiens; identical to SEQ ID NO: 3470

SEQ ID NO: 3510 - DNA, 201 bp, Homo sapiens; identical to SEQ ID NO: 3471

SEQ ID NO: 3511 - DNA, 201 bp, Homo sapiens; identical to SEQ ID NO: 3472

SEQ ID NO: 3512 - DNA, 201 bp, Homo sapiens; identical to SEQ ID NO: 3473

SEQ ID NO: 3513 - DNA, 201 bp, Homo sapiens; identical to SEQ ID NO: 3474

SEQ ID NO: 3514 - DNA, 201 bp, Homo sapiens; identical to SEQ ID NO: 3475

SEQ ID NO: 3515 - DNA, 201 bp, Homo sapiens; identical to SEQ ID NO: 3476

SEQ ID NO: 3516 - DNA, 201 bp, Homo sapiens
aggctgcagctgctcagaagctccaggcattttgtttctggtgaccgcccctaatgggatatcggtgatcactggtccacccttcctgtcagggcttttcyggggctgctcttggaaatgaagtcttaagtactgaataactcccctggggatagctggggcatttgtctagctgggctaccttctaacactttgccatag

SEQ ID NO: 3517 - DNA, 201 bp, Homo sapiens; identical to SEQ ID NO: 3473

SEQ ID NO: 3518 - DNA, 201 bp, Homo sapiens; identical to SEQ ID NO: 3475

SEQ ID NO: 3519 - DNA, 201 bp, Homo sapiens; identical to SEQ ID NO: 3470

SEQ ID NO: 3520 - DNA, 201 bp, Homo sapiens
ggccgtgggtagagggacccacaggcgtggaccgggcatctccctccatcaagcaaagcagcatgggggcctgcccgtaacgggaggcggacgtggccccrctgggcctctgagtgccagcgcagtctgctgggacatgcacatatcaggggttgtttgcaggatcctcagccatgttcaagtgaagtaagcctgagccag

SEQ ID NO: 3521 - DNA, 201 bp, Homo sapiens
tcgttcagggatggactgcaaccttaatttacttgccggagtgtacattctagtgtggtgtatactggtggctgttgatgacgatttttttttttttttttcacaattctctgtagactaggagaagaatgcttgtgtttttcggaagtgtgatgcttctctttgactgccaaactcttttatggaatatatctttatatt

SEQ ID NO: 3522 - DNA, 201 bp, Homo sapiens
atcgttcagggatggactgcaaccttaatttacttgccggagtgtacattctagtgtggtgtatactggtggctgttgatgacgattttttttttttttttacacaattctctgtagactaggagaagaatgcttgtgtttttcggaagtgtgatgcttctctttgactgccaaactcttttatggaatatatctttatat

SEQ ID NO: 3523 - DNA, 201 bp, Homo sapiens
catcgttcagggatggactgcaaccttaatttacttgccggagtgtacattctagtgtggtgtatactggtggctgttgatgacgattttttttttttttttacacaattctctgtagactaggagaagaatgcttgtgtttttcggaagtgtgatgcttctctttgactgccaaactcttttatggaatatatctttata

SEQ ID NO: 3524 - DNA, 201 bp, Homo sapiens
tcatcgttcagggatggactgcaaccttaatttacttgccggagtgtacattctagtgtggtgtatactggtggctgttgatgacgattttttttttttttttacacaattctctgtagactaggagaagaatgcttgtgtttttcggaagtgtgatgcttctctttgactgccaaactcttttatggaatatatctttat

SEQ ID NO: 3525 - DNA, 201 bp, Homo sapiens
atgatgtcaggattcagctgaagagcaagtgggatgagtccatcttcacgaaaggctgcatccaggcgctggaaagctggctcccgcggaacatttacatygtggctggcgtcttcatcgccatctcgctgttgcagatatttggcatcttcctggcaaggacgctgatctcagacatcgaggcagtgaaggccggccgtc

SEQ ID NO: 3526 - DNA, 201 bp, Homo sapiens; identical to SEQ ID NO: 3472

SEQ ID NO: 3527 - DNA, 128 bp, Homo sapiens
cgggcctggccccgagcagctgaagccyggggtcagcaggcgctgcgggcgcagctccggtgcaagcgaggacacgacacatgcagtggcttctggactgcgcgatgactggacgcaagtaacttcta

SEQ ID NO: 3528 - DNA, 201 bp, Homo sapiens
ggccccggccggtcacattgactgatggccaccgcctgacgaatcgagtgcctgtgtgtctacctctctgaagcctgagcaccatgattcccacagccagstcttggctccaagatgagcacccacaggaagccgacccaggcctgaggggccaggaacttgctgggtcagatctgtgtggccagccctgtccacaccatg

SEQ ID NO: 3529 - DNA, 201 bp, Homo sapiens
atgcagtggcttctggactgcgcgatgactggacgcaagtaacttctaggtctgcagacaagaggaagagaagatgaaggaagactgtctgccgagttctyacgtgcccatcagtgacagcaagtccattcagaagtcggagctcttaggcctgctgaaaacctacaactgctaccatgagggcaagagcttccagctgag

SEQ ID NO: 3530 - DNA, 201 bp, Homo sapiens
ggcccctggaggaggcagaggaggccccccagctgatgcggaccaagagcgacgccagttgcatgagccagaggaggcccaagtgccgcgcccccggtgasgcccagcgcatccggcgacaccggttctctatcaacggccacttctacaatcataagacctccgtgtttactccagcctatggatccgtgaccaatgtga

SEQ ID NO: 3531 - DNA, 201 bp, Homo sapiens
gacacatgcagtggcttctggactgcgcgatgactggacgcaagtaacttctaggtctgcagacaagaggaagagaagatgaaggaagactgtctgccgarttctcacgtgcccatcagtgacagcaagtccattcagaagtcggagctcttaggcctgctgaaaacctacaactgctaccatgagggcaagagcttccag

SEQ ID NO: 3532 - DNA, 201 bp, Homo sapiens
ctctgatcatcgaggggctcctcaacattgcctgggggctgaggcggcccatccggctgcagatgcaggatgaccgggagcaggtgcacctcccctccacytcatggatgcccagacggcctagctgccctctaaaggagccatcgccccagaacgggaacatcacagcccaggggccaagcattcagccagtgcacaagg

SEQ ID NO: 3533 - DNA, 201 bp, Homo sapiens
agacagctcggggcccctggaggaggcagaggaggccccccagctgatgcggaccaagagcgacgccagttgcatgagccagaggaggcccaagtgccgcrcccccggtgaggcccagcgcatccggcgacaccggttctctatcaacggccacttctacaatcataagacctccgtgtttactccagcctatggatccgt

SEQ ID NO: 3534 - DNA, 201 bp, Homo sapiens
caagcattcagccagtgcacaaggctgagagttccacagacagctcggggcccctggaggaggcagaggaggccccccagctgatgcggaccaagagcgaygccagttgcatgagccagaggaggcccaagtgccgcgcccccggtgaggcccagcgcatccggcgacaccggttctctatcaacggccacttctacaatc

SEQ ID NO: 3535 - DNA, 201 bp, Homo sapiens
ggggctcctcaacattgcctgggggctgaggcggcccatccggctgcagatgcaggatgaccgggagcaggtgcacctcccctccacctcatggatgcccrgacggcctagctgccctctaaaggagccatcgccccagaacgggaacatcacagcccaggggccaagcattcagccagtgcacaaggctgagagttccac

SEQ ID NO: 3536 - DNA, 201 bp, Homo sapiens; identical to SEQ ID NO: 3528

SEQ ID NO: 3537 - DNA, 166 bp, Homo sapiens
caagtaacttctaggtctgcagacaagaggaagagaagatgaaggaagactgtctgccgagttctyacgtgcccatcagtgacagcaagtccattcagaagtcggagctcttaggcctgctgaaaacctacaactgctaccatgagggcaagagcttccagctgag

SEQ ID NO: 3538 - DNA, 201 bp, Homo sapiens; identical to SEQ ID NO: 3530

SEQ ID NO: 3539 - DNA, 161 bp, Homo sapiens
caagtaacttctaggtctgcagacaagaggaagagaagatgaaggaagactgtctgccgarttctcacgtgcccatcagtgacagcaagtccattcagaagtcggagctcttaggcctgctgaaaacctacaactgctaccatgagggcaagagcttccag

SEQ ID NO: 3540 - DNA, 201 bp, Homo sapiens; identical to SEQ ID NO: 3532

SEQ ID NO: 3541 - DNA, 201 bp, Homo sapiens; identical to SEQ ID NO: 3533

SEQ ID NO: 3542 - DNA, 201 bp, Homo sapiens; identical to SEQ ID NO: 3534

SEQ ID NO: 3543 - DNA, 201 bp, Homo sapiens; identical to SEQ ID NO: 3535

SEQ ID NO: 3544 - DNA, 128 bp, Homo sapiens; identical to SEQ ID NO: 3527

SEQ ID NO: 3545 - DNA, 201 bp, Homo sapiens; identical to SEQ ID NO: 3528

SEQ ID NO: 3546 - DNA, 201 bp, Homo sapiens; identical to SEQ ID NO: 3529

SEQ ID NO: 3547 - DNA, 201 bp, Homo sapiens; identical to SEQ ID NO: 3530

SEQ ID NO: 3548 - DNA, 201 bp, Homo sapiens; identical to SEQ ID NO: 3531

SEQ ID NO: 3549 - DNA, 201 bp, Homo sapiens; identical to SEQ ID NO: 3532

SEQ ID NO: 3550 - DNA, 201 bp, Homo sapiens; identical to SEQ ID NO: 3533

SEQ ID NO: 3551 - DNA, 201 bp, Homo sapiens; identical to SEQ ID NO: 3534

SEQ ID NO: 3552 - DNA, 201 bp, Homo sapiens; identical to SEQ ID NO: 3535

SEQ ID NO: 3553 - DNA, 201 bp, Homo sapiens
aaccaattgaacagaaatttgttagcatcagtgacctcctggtaccaaaagacttgggaacagaaagccagatctttatttcccgcacatatgatgccacyactcattttgagacaacgtgtgatgacattaaaaacatctataagaggatgacaggatcagagtttgactttgaggaaatgaagcgcaagaagaatgaca

SEQ ID NO: 3554 - DNA, 201 bp, Homo sapiens
ctatggggaagactaacagcagtacatgttattatgtaattaggacacatttaaaatttggcaaataatgcatataatgaaatcaatattgtaaggcctgyttttgtaatgaaaatggagagaatgaagagcgctgtgccagtaaatactccccttcacctttctaattattaacttgttttcatggagtggctattcagc

SEQ ID NO: 3555 - DNA, 201 bp, Homo sapiens
ggataccgacacagacaacttgagacagtttttttaatcttttaatcagtgtagctatgtgctgctgctgctcaagagctggatccatacaggttgtgtgycatctgtcctcttgaggttcaggagattctaaattgaatattccacggtttgggacagcatccggaagttttccctatgactttatattttgtattatgt

SEQ ID NO: 3556 - DNA, 201 bp, Homo sapiens
tacaggttgtgtgtcatctgtcctcttgaggttcaggagattctaaattgaatattccacggtttgggacagcatccggaagttttccctatgactttatrttttgtattatgtcaaatgttatggcagggcccaaatagcatagccacaagtttggtttatgtgggcataaaattctaaccaaaccccagacatagggag

SEQ ID NO: 3557 - DNA, 201 bp, Homo sapiens
tgtttgaaaaacgtcgcttcaggaaattcctagtgtatgttgccaacttcgatgaaaaagatccaagaacttttgaaggcattgatcctaagaagaccacratgcgagatgtgtataagaaatttgatttgggtcaagacgttatagattttactggtcatgctcttgcactttacagaactgatgattacttagatcaac

SEQ ID NO: 3558 - DNA, 201 bp, Homo sapiens
cgccagctccattttcctctgaatgtatcctgtcaggtataatgtcagtgaatggcaagaaagttcttcatatggatcgaaacccttactacggaggagaragtgcatctataacaccattggaagatttatacaaaagatttaaaataccaggatcaccacccgagtcaatggggagaggaagagactggaatgttgact

SEQ ID NO: 3559 - DNA, 201 bp, Homo sapiens; identical to SEQ ID NO: 3553

SEQ ID NO: 3560 - DNA, 201 bp, Homo sapiens; identical to SEQ ID NO: 3554

SEQ ID NO: 3561 - DNA, 201 bp, Homo sapiens; identical to SEQ ID NO: 3555

SEQ ID NO: 3562 - DNA, 201 bp, Homo sapiens; identical to SEQ ID NO: 3556

SEQ ID NO: 3563 - DNA, 201 bp, Homo sapiens; identical to SEQ ID NO: 3557

SEQ ID NO: 3564 - DNA, 201 bp, Homo sapiens
tcccctttccttcgcgcccaagagcgcctcccagcctcgtagggtggtcacggagcccctgcgccttttccttgctcgggtcctgcgtccgcgcctgcccygccatgaatgaggagtacgacgtgatcgtgctgggcaccggcctgacggaatgtatcctgtcaggtataatgtcagtgaatggcaagaaagttcttcata

SEQ ID NO: 3565 - DNA, 201 bp, Homo sapiens
tgctgggcaccggcctgacggaatgtatcctgtcaggtataatgtcagtgaatggcaagaaagttcttcatatggatcgaaacccttactacggaggagaragtgcatctataacaccattggaagatttatacaaaagatttaaaataccaggatcaccacccgagtcaatggggagaggaagagactggaatgttgact

SEQ ID NO: 3566 - DNA, 201 bp, Homo sapiens; identical to SEQ ID NO: 3553

SEQ ID NO: 3567 - DNA, 201 bp, Homo sapiens; identical to SEQ ID NO: 3554

SEQ ID NO: 3568 - DNA, 201 bp, Homo sapiens
ggataccgacacagacaacttgagacagtttttttaatcttttaatcagtgtagctatgtgctgctgctgctcaagagctggatccatacaggttgtgtgycatctgtcctcttgaggttcaggagattctaaattgaatattccacggtttgggacagcatccggaagttttccctatgactttatatttgtgggcataa

SEQ ID NO: 3569 - DNA, 201 bp, Homo sapiens
tacaggttgtgtgtcatctgtcctcttgaggttcaggagattctaaattgaatattccacggtttgggacagcatccggaagttttccctatgactttatrtttgtgggcataaaattctaaccaaaccccagacatagggagtcatttggagaaagcctgtatgtggtgttttaacctaataaagttgatgagagagaag

SEQ ID NO: 3570 - DNA, 201 bp, Homo sapiens; identical to SEQ ID NO: 3557

SEQ ID NO: 3571 - DNA, 201 bp, Homo sapiens; identical to SEQ ID NO: 3564

SEQ ID NO: 3572 - DNA, 201 bp, Homo sapiens; identical to SEQ ID NO: 3565

SEQ ID NO: 3573 - DNA, 201 bp, Homo sapiens
aatccaggggaaatgatgaactagtgaagcaggagatgctggtacagtatctgcaggatgcctacagcttctcccggaagattacagaggccattggcatmatcagcaagatgatgtatgaaaacacaactacagtggtgcaggaggtgattgaattctttgtgatggtcttccaatttggggtaccccaggccctgtttg

SEQ ID NO: 3574 - DNA, 201 bp, Homo sapiens
  misc_feature (1)...(201): n = A,T,C or G, or insertion/deletion polymorphism (see Tables 1-2)
ggtcgcctgctgtcctctggagcgctgttcctctgtcatgcttcttggcatgatggcacgaggaaagccagaaattgtgggaagcaatttagacacactgntgagcatagggctggatgagaagtttccacaggactacaggctggcccagcaggtgtgccatgccattgccaacatctcggacaggagaaagccttctct

SEQ ID NO: 3575 - DNA, 201 bp, Homo sapiens
aagcttcgggcctgtcataccagaggtttggatggaatcaaggagcttgagattggccaagcaggtagccagagagcgccatcagccaagaaaccatccastggttctaggtaccagcctctggcttctacagcctcagacaatgactttgtcacaccagagccccgccgtactacccgtcggcatccaaacacccagcag

SEQ ID NO: 3576 - DNA, 201 bp, Homo sapiens
caggagaatcgcctgaacccagaggcggaggttgtagtgagccgaaatcacaccattgcactccagcttgggcaacaatagcgaacctccatctcaaattwaaaaaaaaatgcctacacgctctttaaaatgcaaggctttctcttaaattagcctaactgaactgcgttgagctgcttcaactttggaatatatgtttgc

SEQ ID NO: 3577 - DNA, 201 bp, Homo sapiens
tatcccgccactcccaggagcttccagctatcctggatgatacaactttgagtggatcagatagaaacgcccatctaaatgccctcaaaatgaactgttaygctctgatacgtctcctggaatcctttgagaccatggccagccagacaaaccttgtggacctggaccttggtgggaagggtaagaaagctcggaccaagg

SEQ ID NO: 3578 - DNA, 201 bp, Homo sapiens
ggagtccgaacccttcagtcatatagacccagaggagtcagaggagaccaggctcttgaatatcttaggacttatcttcaaaggcccagcagcttccacayaagaaaagaatccccgggagtctacaggaaacatggtcacaggacagactgtctgtaaaaataaacccaatatgtcggatcctgaggaatccaggggaaa

SEQ ID NO: 3579 - DNA, 201 bp, Homo sapiens
cacttcccattgtccggtctaacctcatggttgccactggggatctggccatccgctttcccaatctggtggacccctggactcctcatctgtatgctcgyctccgggaccctgctcagcaagtgcggaaaacagcggggctggtgatgacccacctgatcctcaaggacatggtgaaggtgaaggggcaggtcagcgaga

SEQ ID NO: 3580 - DNA, 201 bp, Homo sapiens
taggaagtctgttcctgtcctccctgtgcagggtatcctgtagggtgacctggaattcgaattctgtttcccttgtaaaatatttgtctgtctcttttttwaaaaaaaaaaaaaggccgggcactgtggctcacgcctgtaatcccagcactttgcgataccaaggcgggtggataacctgaggtagggagttcgagacca

SEQ ID NO: 3581 - DNA, 201 bp, Homo sapiens
aggaagtctgttcctgtcctccctgtgcagggtatcctgtagggtgacctggaattcgaattctgtttcccttgtaaaatatttgtctgtctctttttttwaaaaaaaaaaaaggccgggcactgtggctcacgcctgtaatcccagcactttgcgataccaaggcgggtggataacctgaggtagggagttcgagaccag

SEQ ID NO: 3582 - DNA, 201 bp, Homo sapiens
agctcaggggcccctggctatgctgcagcactttgatactatctacagcattttgcatcactttcgaagtatagatcctggcctcaaagaagatactctgsaattcctgataaaagtggtatcccgccactcccaggagcttccagctatcctggatgatacaactttgagtggatcagatagaaacgcccatctaaatgc

SEQ ID NO: 3583 - DNA, 201 bp, Homo sapiens
gctgtgggacgtctggcagacaagtcagtgctagtatgtaaaaatgccatccagctgctggccagttttctagccaataatcctttctcctgcaagcttastgatgctgaccttgccggaccactgcagaaggagacccagaaattacaagagatgagggcccagaggcgaactgcagcagcttctgcagtgctggaccca

SEQ ID NO: 3584 - DNA, 201 bp, Homo sapiens
aggggcaggtcagcgagatggcggtgctgctcatcgaccccgagcctcagattgctgccctggccaagaacttcttcaatgagctctcccacaagggcaaygcaatctataatctccttccagatatcatcagccgcctgtcagaccccgagctgggggtggaggaagagcctttccacaccatcatgaaacagctcctct

SEQ ID NO: 3585 - DNA, 201 bp, Homo sapiens
cagcgagatggcggtgctgctcatcgaccccgagcctcagattgctgccctggccaagaacttcttcaatgagctctcccacaagggcaatgcaatctatratctccttccagatatcatcagccgcctgtcagaccccgagctgggggtggaggaagagcctttccacaccatcatgaaacagctcctctcctacatcac

SEQ ID NO: 3586 - DNA, 201 bp, Homo sapiens
ctcgcctccgggaccctgctcagcaagtgcggaaaacagcggggctggtgatgacccacctgatcctcaaggacatggtgaaggtgaaggggcaggtcagygagatggcggtgctgctcatcgaccccgagcctcagattgctgccctggccaagaacttcttcaatgagctctcccacaagggcaatgcaatctataatc

SEQ ID NO: 3587 - DNA, 201 bp, Homo sapiens
tgcttgacaattttgactgttttggagacaaactgtcagatgagtccatcttcagtgcttttttgtcagttgtgggcaagctgcgacgtggggccaagcckgagggcaaggctataatagatgaatttgagcagaagcttcgggcctgtcataccagaggtttggatggaatcaaggagcttgagattggccaagcaggta

SEQ ID NO: 3588 - DNA, 201 bp, Homo sapiens
cctttccacaccatcatgaaacagctcctctcctacatcaccaaggacaagcagacagagagcctggtggaaaagctgtgtcagcggttccgcacatccckaactgagcggcagcagcgagacctggcctactgtgtgtcacagctgcccctcacagagcgaggcctccgtaagatgcttgacaattttgactgttttgga

SEQ ID NO: 3589 - DNA, 201 bp, Homo sapiens
ccctcacagagcgaggcctccgtaagatgcttgacaattttgactgttttggagacaaactgtcagatgagtccatcttcagtgcttttttgtcagttgtrggcaagctgcgacgtggggccaagcctgagggcaaggctataatagatgaatttgagcagaagcttcgggcctgtcataccagaggtttggatggaatca

SEQ ID NO: 3590 - DNA, 201 bp, Homo sapiens; identical to SEQ ID NO: 3573

SEQ ID NO: 3591 - DNA, 201 bp, Homo sapiens; identical to SEQ ID NO: 3574
  misc_feature (1)...(201): n = A,T,C or G, or insertion/deletion polymorphism (see Tables 1-2)

SEQ ID NO: 3592 - DNA, 201 bp, Homo sapiens; identical to SEQ ID NO: 3575

SEQ ID NO: 3593 - DNA, 201 bp, Homo sapiens; identical to SEQ ID NO: 3576

SEQ ID NO: 3594 - DNA, 201 bp, Homo sapiens; identical to SEQ ID NO: 3577

SEQ ID NO: 3595 - DNA, 201 bp, Homo sapiens; identical to SEQ ID NO: 3578

SEQ ID NO: 3596 - DNA, 201 bp, Homo sapiens; identical to SEQ ID NO: 3579

SEQ ID NO: 3597 - DNA, 201 bp, Homo sapiens; identical to SEQ ID NO: 3580

SEQ ID NO: 3598 - DNA, 201 bp, Homo sapiens; identical to SEQ ID NO: 3581

SEQ ID NO: 3599 - DNA, 201 bp, Homo sapiens; identical to SEQ ID NO: 3582

SEQ ID NO: 3600 - DNA, 201 bp, Homo sapiens; identical to SEQ ID NO: 3583

SEQ ID NO: 3601 - DNA, 201 bp, Homo sapiens; identical to SEQ ID NO: 3584

SEQ ID NO: 3602 - DNA, 201 bp, Homo sapiens; identical to SEQ ID NO: 3585

SEQ ID NO: 3603 - DNA, 201 bp, Homo sapiens; identical to SEQ ID NO: 3586

SEQ ID NO: 3604 - DNA, 201 bp, Homo sapiens; identical to SEQ ID NO: 3587

SEQ ID NO: 3605 - DNA, 201 bp, Homo sapiens; identical to SEQ ID NO: 3588

SEQ ID NO: 3606 - DNA, 201 bp, Homo sapiens; identical to SEQ ID NO: 3589

SEQ ID NO: 3607 - DNA, 120 bp, Homo sapiens
gttgggaggcaccacaaatkcctaacaaactgctgaagcgccctccgaagggacagacctcatctccaccccgccccgtccctccgccagactggagcgcaaactatggtcgcattgatc

SEQ ID NO: 3608 - DNA, 201 bp, Homo sapiens
gtccctctgaggctcaccaggtgtagttggccttgttctttgggggtattagcccttctactttctttctcacccaccctgtaccctcttctgtgtgtctytgctatccccctttcctcccaccacccatgtgcatgagcaaatgtgcaacaaaaccctgggactttgcagtcaaatgaagctgagcttcccacatcccgt

SEQ ID NO: 3609 - DNA, 201 bp, Homo sapiens
cggggttgtcaccgttatccgggaggcgtggtcagcactaataaaggcggaggccggcgcggcagctgcagtaagttccagcgcagctagaccgcggggtrgtcggcgcgaggcggagcttggcagttccgtccacttcagccgcagcgtccctcgccgggtgtctcgccgcagcctccggagaggaacagaccctcactc

SEQ ID NO: 3610 - DNA, 201 bp, Homo sapiens
acgtggacaaggtcctggagagggaccagaagctgtcagagctggatgaccgagctgatgccttgcaggcaggagcatcacaatttgagagcagtgctgcmaagctaaagaggaagtattggtggaaaaactgcaagatgatgatcatgctgggagccatctgtgccatcatcgtggtagttattgtaaggcgggactgaa

SEQ ID NO: 3611 - DNA, 201 bp, Homo sapiens
ggcgcggcagctgcagtaagttccagcgcagctagaccgcggggtagtcggcgcgaggcggagcttggcagttccgtccacttcagccgcagcgtccctcrccgggtgtctcgccgcagcctccggagaggaacagaccctcactctctctgtcagaaaaatgtctgctccagctcagccacctgctgaagggacagaagg

SEQ ID NO: 3612 - DNA, 201 bp, Homo sapiens
gcgcggcagctgcagtaagttccagcgcagctagaccgcggggtagtcggcgcgaggcggagcttggcagttccgtccacttcagccgcagcgtccctcgycgggtgtctcgccgcagcctccggagaggaacagaccctcactctctctgtcagaaaaatgtctgctccagctcagccacctgctgaagggacagaaggg

SEQ ID NO: 3613 - DNA, 163 bp, Homo sapiens
cactgtgtgtctgtcatcacctctttgtctttttttcctaaccctgatctcatacttgtatagagtaataacaacagttgtacttccaccaaaggcatgtkgcatatttaccaatgtcatgtattctgaacaaaggcaaaaaatacaaattcctaccattaaa

SEQ ID NO: 3614 - DNA, 120 bp, Homo sapiens; identical to SEQ ID NO: 3607

SEQ ID NO: 3615 - DNA, 201 bp, Homo sapiens; identical to SEQ ID NO: 3609

SEQ ID NO: 3616 - DNA, 201 bp, Homo sapiens
acgtggacaaggtcctggagagggaccagaagctgtcagagctggatgaccgagctgatgccttgcaggcaggagcatcacaatttgagagcagtgctgcmaagctaaagaggaagtattggtggaaaaactgcaagatgatgatcatgctgggagccatctgtgccatcatcgtggtagttattgtaatctactttttta

SEQ ID NO: 3617 - DNA, 201 bp, Homo sapiens
cctggaccaggcctgaagagggtcctgggggtggaccaaagtccaacttggtttcagtgcagtacccttttcgaaagtaaaaacttgttttttgtagttayttctaatctgttcgtccaggattttccgtgtctttggggatcttacaactttactttgttctccagaggcctggagaacacttagggattgtgaaaatag

SEQ ID NO: 3618 - DNA, 201 bp, Homo sapiens
aaaacctggccactggtaggagctagggaggggctgggaagatggcagctcactcagtactgcctggtcatgtggagctttccttcctggaccaggcctgragagggtcctgggggtggaccaaagtccaacttggtttcagtgcagtacccttttcgaaagtaaaaacttgttttttgtagttatttctaatctgttcgt

SEQ ID NO: 3619 - DNA, 201 bp, Homo sapiens; identical to SEQ ID NO: 3611

SEQ ID NO: 3620 - DNA, 201 bp, Homo sapiens; identical to SEQ ID NO: 3612

SEQ ID NO: 3621 - DNA, 120 bp, Homo sapiens; identical to SEQ ID NO: 3607

SEQ ID NO: 3622 - DNA, 201 bp, Homo sapiens; identical to SEQ ID NO: 3609

SEQ ID NO: 3623 - DNA, 201 bp, Homo sapiens
acgtggacaaggtcctggagagggaccagaagctgtcagagctggatgaccgagctgatgccttgcaggcaggagcatcacaatttgagagcagtgctgcmaagctaaagaggaagtattggtggaaaaactgcaagatgatgatcatgctgggagccatctgtgccatcatcgtggtagttattgtaagtaagtatcgct

SEQ ID NO: 3624 - DNA, 119 bp, Homo sapiens
aaaacctggccactggtaggagctagggaggggctgggaagatggcagctcactcagtactgcctggtcatgtggagctttccttcctggaccaggcctgragagggtcctgggggtgg

SEQ ID NO: 3625 - DNA, 201 bp, Homo sapiens; identical to SEQ ID NO: 3612

SEQ ID NO: 3626 - DNA, 201 bp, Homo sapiens
cctggagtcttctccctgcctgcctgcctgcctggggagtggggctgctctgactgaggtatggagaccgctgctatgggatcgtcacctggttcgggacrggggaagggcagagacaagggatttctttgatggacaagccttccccctgcaacgcattgcagggagatggcgcctcctgttctgaggaagtggggctat

SEQ ID NO: 3627 - DNA, 201 bp, Homo sapiens
cagggagatggcgcctcctgttctgaggaagtggggctatgctgtgtgtcactggcttgggttggagggagaccatggggatggggcacttaacaatggaragacctgaatgtctggtaacttggtgtaattcaccctcttgttttctcctgtctctttctcttttccgtctgggacttcctgattcctgtgtccagtcta

SEQ ID NO: 3628 - DNA, 201 bp, Homo sapiens
gggctatgctgtgtgtcactggcttgggttggagggagaccatggggatggggcacttaacaatggagagacctgaatgtctggtaacttggtgtaattcrccctcttgttttctcctgtctctttctcttttccgtctgggacttcctgattcctgtgtccagtctacttttttacttgagaatgtaccaccccttccct

SEQ ID NO: 3629 - DNA, 201 bp, Homo sapiens
tgaggtatggagaccgctgctatgggatcgtcacctggttcgggacgggggaagggcagagacaagggatttctttgatggacaagccttccccctgcaamgcattgcagggagatggcgcctcctgttctgaggaagtggggctatgctgtgtgtcactggcttgggttggagggagaccatggggatggggcacttaac

SEQ ID NO: 3630 - DNA, 201 bp, Homo sapiens; identical to SEQ ID NO: 3611

SEQ ID NO: 3631 - DNA, 120 bp, Homo sapiens; identical to SEQ ID NO: 3607

SEQ ID NO: 3632 - DNA, 201 bp, Homo sapiens; identical to SEQ ID NO: 3609

SEQ ID NO: 3633 - DNA, 150 bp, Homo sapiens
gacgggggaagggcagagacaagggatttctttgatggacaagccttccccctgcaacgcattgcagggagatggcgcctcctgttctgaggacaatggaragacctgaatgtctggtaacttggtgtaattcaccctcttgttttctcc

SEQ ID NO: 3634 - DNA, 201 bp, Homo sapiens; identical to SEQ ID NO: 3623

SEQ ID NO: 3635 - DNA, 117 bp, Homo sapiens
gatggacaagccttccccctgcaacgcattgcagggagatggcgcctcctgttctgaggacaatggagagacctgaatgtctggtaacttggtgtaattcrccctcttgttttctcc

SEQ ID NO: 3636 - DNA, 193 bp, Homo sapiens
tgaggtatggagaccgctgctatgggatcgtcacctggttcgggacgggggaagggcagagacaagggatttctttgatggacaagccttccccctgcaamgcattgcagggagatggcgcctcctgttctgaggacaatggagagacctgaatgtctggtaacttggtgtaattcaccctcttgttttctcc

SEQ ID NO: 3637 - DNA, 201 bp, Homo sapiens; identical to SEQ ID NO: 3611

SEQ ID NO: 3638 - DNA, 201 bp, Homo sapiens; identical to SEQ ID NO: 3612

SEQ ID NO: 3639 - DNA, 201 bp, Homo sapiens
cctggagtcttctccctgcctgcctgcctgcctggggagtggggctgctctgactgaggtatggagaccgctgctatgggatcgtcacctggttcgggacrggggaagggcagagacaagggatttctttgatggacaagccttccccctgcaacgcattgcagggagatggcgcctcctgttctgaggacaatggagaga

SEQ ID NO: 3640 - DNA, 201 bp, Homo sapiens
catcagcgctactgcaaccttcagaaatataatgggaagtctgaagacactgctgtgcaacatggtttagagggtttgtccataagcaaaaaatcaactgrcaaggaagagatcaaagaccaaccacagaatgtatctgaaaatctgcttccacaaaatgcaccaaattattggtatcttcaaggattaattcataagcag

SEQ ID NO: 3641 - DNA, 201 bp, Homo sapiens
cagtcccagagagctcctctctaactcagagcaactgaactgagacagaggaggaaaacagagcatcagaagcctgcagtggtggttgtgacgggtaggasgataggaagacagggggccccaacctgggattgctgagcagggaagctttgcatgttgctctaaggtacatttttaaagagttgttttttggccgggcgc

SEQ ID NO: 3642 - DNA, 201 bp, Homo sapiens
agtctgaagacactgctgtgcaacatggtttagagggtttgtccataagcaaaaaatcaactgacaaggaagagatcaaagaccaaccacagaatgtatcygaaaatctgcttccacaaaatgcaccaaattattggtatcttcaaggattaattcataagcagaatggagatctgctgcaagcagccaaatgttatgaga

SEQ ID NO: 3643 - DNA, 201 bp, Homo sapiens
gtttagagggtttgtccataagcaaaaaatcaactgacaaggaagagatcaaagaccaaccacagaatgtatctgaaaatctgcttccacaaaatgcaccraattattggtatcttcaaggattaattcataagcagaatggagatctgctgcaagcagccaaatgttatgagaaggaactgggccgcctgctaagggatg

SEQ ID NO: 3644 - DNA, 201 bp, Homo sapiens
agctgaagagttaatccagcaagaacatgctgaccaagcagaaatcagaagtctagtcacttggggaaactacgcctgggtctactatcacttgggcagaytctcagatgctcagatttatgtagataaggtgaaacaaacctgcaagaaattttcaaatccatacagtattgagtattctgaacttgactgtgaggaagg

SEQ ID NO: 3645 - DNA, 201 bp, Homo sapiens
ccctggaatgcttacggcaagctgaagagttaatccagcaagaacatgctgaccaagcagaaatcagaagtctagtcacttggggaaactacgcctgggtytactatcacttgggcagactctcagatgctcagatttatgtagataaggtgaaacaaacctgcaagaaattttcaaatccatacagtattgagtattctg

SEQ ID NO: 3646 - DNA, 201 bp, Homo sapiens
aaacctgcaagaaattttcaaatccatacagtattgagtattctgaacttgactgtgaggaagggtggacacaactgaagtgtggaagaaatgaaagggcraaggtgtgttttgagaaggctctggaagaaaagcccaacaacccagaattctcctctggactggcaattgcgatgtaccatctggataatcacccagaga

SEQ ID NO: 3647 - DNA, 201 bp, Homo sapiens
caaatccatacagtattgagtattctgaacttgactgtgaggaagggtggacacaactgaagtgtggaagaaatgaaagggcgaaggtgtgttttgagaargctctggaagaaaagcccaacaacccagaattctcctctggactggcaattgcgatgtaccatctggataatcacccagagaaacagttctctactgatg

SEQ ID NO: 3648 - DNA, 201 bp, Homo sapiens
aagcactaaagcaatatgctatggactattcgaataaagctcttgagaagggactgaatcctctgaatgcatactccgatctcgctgagttcctggagacrgaatgttatcagacaccattcaataaggaagtccctgatgctgaaaagcaacaatcccatcagcgctactgcaaccttcagaaatataatgggaagtctg

SEQ ID NO: 3649 - DNA, 201 bp, Homo sapiens
tttatgtagataaggtgaaacaaacctgcaagaaattttcaaatccatacagtattgagtattctgaacttgactgtgaggaagggtggacacaactgaartgtggaagaaatgaaagggcgaaggtgtgttttgagaaggctctggaagaaaagcccaacaacccagaattctcctctggactggcaattgcgatgtacc

SEQ ID NO: 3650 - DNA, 111 bp, Homo sapiens
gacctaacagyaccctgggtggaaacctcttcagcatttgcttggaatcagtaagctaaaaacaaaatcaaccgggaccccagcttttcagaactgcagggaaacagccat

SEQ ID NO: 3651 - DNA, 201 bp, Homo sapiens; identical to SEQ ID NO: 3640

SEQ ID NO: 3652 - DNA, 201 bp, Homo sapiens; identical to SEQ ID NO: 3641

SEQ ID NO: 3653 - DNA, 201 bp, Homo sapiens; identical to SEQ ID NO: 3642

SEQ ID NO: 3654 - DNA, 201 bp, Homo sapiens; identical to SEQ ID NO: 3643

SEQ ID NO: 3655 - DNA, 201 bp, Homo sapiens; identical to SEQ ID NO: 3644

SEQ ID NO: 3656 - DNA, 201 bp, Homo sapiens
tgccctactctcccacccctttatatagttccttcagtatttacttgaggcagacaggaagacttctgaagaacaaatcagcctggtcaccagcttttcgsaacagcagagacacagagggcagtcatgagtgaggtcaccaagaattccctggagaaaatccttccacagctgaaatgccatttcacctggaacttattc

SEQ ID NO: 3657 - DNA, 143 bp, Homo sapiens
aaaacatcagctgatgcgtgccctactctcccacccctttatrtagttccttcagtatttacttgaggcagacaggaagacttctgaagaacaaatcagcctggtcaccagcttttcggaacagcagagacacagagggcagt

SEQ ID NO: 3658 - DNA, 201 bp, Homo sapiens; identical to SEQ ID NO: 3645

SEQ ID NO: 3659 - DNA, 201 bp, Homo sapiens; identical to SEQ ID NO: 3646

SEQ ID NO: 3660 - DNA, 201 bp, Homo sapiens; identical to SEQ ID NO: 3647

SEQ ID NO: 3661 - DNA, 201 bp, Homo sapiens; identical to SEQ ID NO: 3648

SEQ ID NO: 3662 - DNA, 201 bp, Homo sapiens; identical to SEQ ID NO: 3649

SEQ ID NO: 3663 - DNA, 201 bp, Homo sapiens
gttttgacgtgtggatgggcaacagcagaggaaatacctggtctcggaaacataagacactctcagtttctcaggatgaattctgggctttcagttatgawgagatggcaaaatatgacctaccagcttccattaacttcattctgaataaaactggccaagaacaagtgtattatgtgggtcattctcaaggcaccacta

SEQ ID NO: 3664 - DNA, 201 bp, Homo sapiens
tatcctcccacatacaatgtgaaggacatgcttgtgccgactgcagtctggagcgggggtcacgactggcttgcagatgtctacgacgtcaatatcttacygactcagatcaccaacttggtgttccatgagagcattccggaatgggagcatcttgacttcatttggggcctggatgccccttggaggctttataataaa

SEQ ID NO: 3665 - DNA, 201 bp, Homo sapiens
aaaacatgttacactggagccaggctgttaaattccaaaagtttcaagcctttgactggggaagcagtgccaagaattattttcattacaaccagagttawcctcccacatacaatgtgaaggacatgcttgtgccgactgcagtctggagcgggggtcacgactggcttgcagatgtctacgacgtcaatatcttactga

SEQ ID NO: 3666 - DNA, 201 bp, Homo sapiens
caagtgtattatgtgggtcattctcaaggcaccactataggttttatagcattttcacagatccctgagctggctaaaaggattaaaatgttttttgcccygggtcctgtggcttccgtcgccttctgtactagccctatggccaaattaggacgattaccagatcatctcattaaggacttatttggagacaaagaattt

SEQ ID NO: 3667 - DNA, 201 bp, Homo sapiens
agcatgcaattcacttcaccagcagtcactaagaatgaaaatgcggttcttggggttggtggtctgtttggttctctggaccctgcattctgaggggtctrgagggaaactgacagctgtggatcctgaaacaaacatgaatgtgagtgaaattatctcttactggggattccctagtgaggaatacctagttgagacaga

SEQ ID NO: 3668 - DNA, 130 bp, Homo sapiens
attgtcagctcctgattctgcagaaaacaygaaactgagctgtacaaagatgctgatgaggggctgcagcatgcaattcacttcaccagcagtcactaagaatgaaaatgcggttcttggggttggtggt

SEQ ID NO: 3669 - DNA, 201 bp, Homo sapiens
ttcctgcaacatggcttgctggcagattctagtaactgggtcacaaaccttgccaacagcagcctgggcttcattcttgctgatgctggttttgacgtgtrgatgggcaacagcagaggaaatacctggtctcggaaacataagacactctcagtttctcaggatgaattctgggctttcagttatgatgagatggcaaaa

SEQ ID NO: 3670 - DNA, 201 bp, Homo sapiens
tgactggggaagcagtgccaagaattattttcattacaaccagagttatcctcccacatacaatgtgaaggacatgcttgtgccgactgcagtctggagcrggggtcacgactggcttgcagatgtctacgacgtcaatatcttactgactcagatcaccaacttggtgttccatgagagcattccggaatgggagcatct

SEQ ID NO: 3671 - DNA, 201 bp, Homo sapiens
tattatgtgggtcattctcaaggcaccactataggttttatagcattttcacagatccctgagctggctaaaaggattaaaatgttttttgccctgggtcytgtggcttccgtcgccttctgtactagccctatggccaaattaggacgattaccagatcatctcattaaggacttatttggagacaaagaatttcttccc

SEQ ID NO: 3672 - DNA, 201 bp, Homo sapiens
gtgccttaaccgaattcctcatgggaggaagaaccattctgacaaaggtcccaaaccagttgtcttcctgcaacatggcttgctggcagattctagtaacwgggtcacaaaccttgccaacagcagcctgggcttcattcttgctgatgctggttttgacgtgtggatgggcaacagcagaggaaatacctggtctcggaa

SEQ ID NO: 3673 - DNA, 201 bp, Homo sapiens
gtcacaaaccttgccaacagcagcctgggcttcattcttgctgatgctggttttgacgtgtggatgggcaacagcagaggaaatacctggtctcggaaacvtaagacactctcagtttctcaggatgaattctgggctttcagttatgatgagatggcaaaatatgacctaccagcttccattaacttcattctgaataaa

SEQ ID NO: 3674 - DNA, 201 bp, Homo sapiens
aagatgctgatgaggggctgcagcatgcaattcacttcaccagcagtcactaagaatgaaaatgcggttcttggggttggtggtctgtttggttctctggmccctgcattctgaggggtctggagggaaactgacagctgtggatcctgaaacaaacatgaatgtgagtgaaattatctcttactggggattccctagtga

SEQ ID NO: 3675 - DNA, 201 bp, Homo sapiens
tctgtttggttctctggaccctgcattctgaggggtctggagggaaactgacagctgtggatcctgaaacaaacatgaatgtgagtgaaattatctcttastggggattccctagtgaggaatacctagttgagacagaagatggatatattctgtgccttaaccgaattcctcatgggaggaagaaccattctgacaaag

SEQ ID NO: 3676 - DNA, 201 bp, Homo sapiens; identical to SEQ ID NO: 3663

SEQ ID NO: 3677 - DNA, 201 bp, Homo sapiens; identical to SEQ ID NO: 3664

SEQ ID NO: 3678 - DNA, 201 bp, Homo sapiens; identical to SEQ ID NO: 3665

SEQ ID NO: 3679 - DNA, 201 bp, Homo sapiens; identical to SEQ ID NO: 3666

SEQ ID NO: 3680 - DNA, 201 bp, Homo sapiens
ggcaggacagctccagactgttttattatacagaatgaaaatgcggttcttggggttggtggtctgtttggttctctggaccctgcattctgaggggtctrgagggaaactgacagctgtggatcctgaaacaaacatgaatgtgagtgaaattatctcttactggggattccctagtgaggaatacctagttgagacaga

SEQ ID NO: 3681 - DNA, 201 bp, Homo sapiens
atatgcatccttatttttaatacacctgcttcacgtccctatgttgggaagtccatatttgtctgcttttcttgcagcatcatttccttacaatactgtcyggtggacaaaatgacaattgatatgtttttctgatataattactttagctgcactaacagtacaatgcttgttaatggttaatataggcagggcgaatac

SEQ ID NO: 3682 - DNA, 201 bp, Homo sapiens
attttttctgagattaatgtactcttggagcccgctactgtcgttattgatcacatctgtgtgaagccaaagccccgtggttgcccatgagaagtgtcctwgttcattttcacccaaatgaagtgtgaacgtgatgttttcggatgcaaactcagctcagggattcattttgtgtcttagttttatatgcatccttatttt

SEQ ID NO: 3683 - DNA, 201 bp, Homo sapiens; identical to SEQ ID NO: 3669

SEQ ID NO: 3684 - DNA, 201 bp, Homo sapiens; identical to SEQ ID NO: 3670

SEQ ID NO: 3685 - DNA, 201 bp, Homo sapiens; identical to SEQ ID NO: 3671

SEQ ID NO: 3686 - DNA, 201 bp, Homo sapiens; identical to SEQ ID NO: 3672

SEQ ID NO: 3687 - DNA, 201 bp, Homo sapiens; identical to SEQ ID NO: 3673

SEQ ID NO: 3688 - DNA, 201 bp, Homo sapiens
tgcgactcgagacagcggcccggcaggacagctccagactgttttattatacagaatgaaaatgcggttcttggggttggtggtctgtttggttctctggmccctgcattctgaggggtctggagggaaactgacagctgtggatcctgaaacaaacatgaatgtgagtgaaattatctcttactggggattccctagtga

SEQ ID NO: 3689 - DNA, 201 bp, Homo sapiens; identical to SEQ ID NO: 3675

SEQ ID NO: 3690 - DNA, 201 bp, Homo sapiens; identical to SEQ ID NO: 3664

SEQ ID NO: 3691 - DNA, 201 bp, Homo sapiens; identical to SEQ ID NO: 3666

SEQ ID NO: 3692 - DNA, 201 bp, Homo sapiens
ctgtggacctgccagcctgcgaggcggaggacgggctccatctcttagaaacgcctacggcgcatgctctatggggtcaactggggggctggcaagcggcmgcgctggtctggggcggagtctccgaggcacttcccggtggctggctgctctgattggctgaacaaatagtccgagggtggtgggcatccgccctcccga

SEQ ID NO: 3693 - DNA, 201 bp, Homo sapiens
actcgagacagcggcccggcaggacagctccagaatgaaaatgcggttcttggggttggtggtctgtttggttctctggaccctgcattctgaggggtctrgagggaaactgacagctgtggatcctgaaacaaacatgaatgtgagtgaaattatctcttactggggattccctagtgaggaatacctagttgagacaga

SEQ ID NO: 3694 - DNA, 201 bp, Homo sapiens; identical to SEQ ID NO: 3681

SEQ ID NO: 3695 - DNA, 201 bp, Homo sapiens; identical to SEQ ID NO: 3671

SEQ ID NO: 3696 - DNA, 201 bp, Homo sapiens; identical to SEQ ID NO: 3673

SEQ ID NO: 3697 - DNA, 201 bp, Homo sapiens
cccctgagagctggcactgcgactcgagacagcggcccggcaggacagctccagaatgaaaatgcggttcttggggttggtggtctgtttggttctctggmccctgcattctgaggggtctggagggaaactgacagctgtggatcctgaaacaaacatgaatgtgagtgaaattatctcttactggggattccctagtga

SEQ ID NO: 3698 - DNA, 201 bp, Homo sapiens; identical to SEQ ID NO: 3675

SEQ ID NO: 3699 - DNA, 201 bp, Homo sapiens; identical to SEQ ID NO: 3663

SEQ ID NO: 3700 - DNA, 201 bp, Homo sapiens; identical to SEQ ID NO: 3665

SEQ ID NO: 3701 - DNA, 201 bp, Homo sapiens
ccagcctgcgaggcggaggacgggctccatctcttagaaacgcctacggcgcatgctctatggggtcaactggggggctggcaagcggcagcgctggtctrgggcggagtctccgaggcacttcccggtggctggctgctctgattggctgaacaaatagtccgagggtggtgggcatccgccctcccgacaaggcagacc

SEQ ID NO: 3702 - DNA, 201 bp, Homo sapiens; identical to SEQ ID NO: 3669

SEQ ID NO: 3703 - DNA, 201 bp, Homo sapiens; identical to SEQ ID NO: 3682

SEQ ID NO: 3704 - DNA, 201 bp, Homo sapiens; identical to SEQ ID NO: 3670

SEQ ID NO: 3705 - DNA, 201 bp, Homo sapiens; identical to SEQ ID NO: 3672

SEQ ID NO: 3706 - DNA, 201 bp, Homo sapiens
atattaaaaacaatgaaggtggaataatgaataaaatcaaaaagctaaaagtcaaagcacctccaagtgttcctcgaagggactacgcttcagagagcccygctgacgaagaggagcagtggtccgatgactttgacagcgactatgaaaatccagatgagcactcggactcagagatgtacgtgatgcccgccgaggaga

SEQ ID NO: 3707 - DNA, 201 bp, Homo sapiens
gaacccttgagaccagaggcttaccatgctgctccctaggagggccaggaactgctgacgtgaccactggacagttattcgtgtctcttacaattaccaarcagaatggacaagcttaataaaataaccgtccccgccagtcagaagttgaggcagcttcaaaagatggtccatgatattaaaaacaatgaaggtggaata

SEQ ID NO: 3708 - DNA, 201 bp, Homo sapiens
taatgaataaaatcaaaaagctaaaagtcaaagcacctccaagtgttcctcgaagggactacgcttcagagagccctgctgacgaagaggagcagtggtcygatgactttgacagcgactatgaaaatccagatgagcactcggactcagagatgtacgtgatgcccgccgaggagaacgctgatgacagctacgagccgc

SEQ ID NO: 3709 - DNA, 201 bp, Homo sapiens
taaaataaccgtccccgccagtcagaagttgaggcagcttcaaaagatggtccatgatattaaaaacaatgaaggtggaataatgaataaaatcaaaaagytaaaagtcaaagcacctccaagtgttcctcgaagggactacgcttcagagagccctgctgacgaagaggagcagtggtccgatgactttgacagcgacta

SEQ ID NO: 3710 - DNA, 201 bp, Homo sapiens
aaatggtgaagagtactttggaagtgttgctgaaatcatcaggaatcatcaacatagtcctttggttcttattgacagtcagaataacacaaaagattccmccagactgaagtatgcagttaaagtttcataaagggggaaaaaaaagatcaataccattgcttcagacactttcccaaagtttctccttttgagaaaaag

SEQ ID NO: 3711 - DNA, 201 bp, Homo sapiens
tgctgacgtgaccactggacagttattcgtgtctcttacaattaccaaacagaatggacaagcttaataaaataaccgtccccgccagtcagaagttgagrcagcttcaaaagatggtccatgatattaaaaacaatgaaggtggaataatgaataaaatcaaaaagctaaaagtcaaagcacctccaagtgttcctcgaa

SEQ ID NO: 3712 - DNA, 201 bp, Homo sapiens; identical to SEQ ID NO: 3706

SEQ ID NO: 3713 - DNA, 201 bp, Homo sapiens; identical to SEQ ID NO: 3707

SEQ ID NO: 3714 - DNA, 201 bp, Homo sapiens; identical to SEQ ID NO: 3708

SEQ ID NO: 3715 - DNA, 201 bp, Homo sapiens; identical to SEQ ID NO: 3709

SEQ ID NO: 3716 - DNA, 201 bp, Homo sapiens; identical to SEQ ID NO: 3710

SEQ ID NO: 3717 - DNA, 201 bp, Homo sapiens; identical to SEQ ID NO: 3711

SEQ ID NO: 3718 - DNA, 201 bp, Homo sapiens
gggaacactgccctcgcacggccccgaagggcccccacatttgtgccgacactgttctcccttcggtggaagagctcaagggacaaggacacgcgcccccytcccagaggcgtcccgcacctgtctgaactgttaagaaatctgtttttgtttatttcattttattttaatttttaacgtgggattcagagaaaggcaagg

SEQ ID NO: 3719 - DNA, 201 bp, Homo sapiens
gcccactcaggggtcactgaggcctgagacccaggactcctccccaccctcctggcctcagactgcacccaggaggggaacactgccctcgcacggccccraagggcccccacatttgtgccgacactgttctcccttcggtggaagagctcaagggacaaggacacgcgcccccctcccagaggcgtcccgcacctgtct

SEQ ID NO: 3720 - DNA, 201 bp, Homo sapiens
tcctggcctcagactgcacccaggaggggaacactgccctcgcacggccccgaagggcccccacatttgtgccgacactgttctcccttcggtggaagagytcaagggacaaggacacgcgcccccctcccagaggcgtcccgcacctgtctgaactgttaagaaatctgtttttgtttatttcattttattttaattttt

SEQ ID NO: 3721 - DNA, 201 bp, Homo sapiens
aggaggagcttctggggtccccagggctgtcatctgaatttgccctgggaaaccccttctctgtgacccacttctcatcacacacatggaaacccataggyccacacacaggtggtgtcactgtccctcctggtgtcaccccagagccacacatgggcatctatgggagagtgtcaaccagacagagggtcacagtgttta

SEQ ID NO: 3722 - DNA, 201 bp, Homo sapiens
ctgtgacccacttctcatcacacacatggaaacccataggcccacacacaggtggtgtcactgtccctcctggtgtcaccccagagccacacatgggcatstatgggagagtgtcaaccagacagagggtcacagtgtttacactttggaccttacgatcaggcacaggtcaggggtgacacagactcatcctgaacagca

SEQ ID NO: 3723 - DNA, 201 bp, Homo sapiens
gggtatgttgaggcatgggcaccctggcagcagaccccaaaccaaccctcttgacttgtgcctgcctttcaggatatgttcccttcctgaatttgtctaaraaggctgagttggggggtggttgctgatttttataacatatagccagttgttcataggcctgtgttttaaagaagggcaagcctgaactcaccgtcctgc

SEQ ID NO: 3724 - DNA, 201 bp, Homo sapiens
ccttccagaagagcctggcacagccgctgcccgctgaccctctgtgcgtgcacaactcgtcgctcttcgccctgcagaatctgcagccgtggtctgacgaytcgaccaaaatcactagcgtcacgtcggtggcgtcggcctgcgagtgagcctgcccattctgccctgtgggaccccaggcccactcaggggtcactgagg

SEQ ID NO: 3725 - DNA, 201 bp, Homo sapiens
ccccctctctccctcccctcccccttctactttagcctttctgcgcacttcgcttccaagtctccgcgcagccaggagccgctgttgcctcccagcccctrctagctgccccccgagccgagcgcagcgagcgccgccgcccgggccccccggtggggccagggccagcatggagcacctgggtccgcaccacctccaccc

SEQ ID NO: 3726 - DNA, 201 bp, Homo sapiens
cgaccaaaatcactagcgtcacgtcggtggcgtcggcctgcgagtgagcctgcccattctgccctgtgggaccccaggcccactcaggggtcactgaggcstgagacccaggactcctccccaccctcctggcctcagactgcacccaggaggggaacactgccctcgcacggccccgaagggcccccacatttgtgccga

SEQ ID NO: 3727 - DNA, 201 bp, Homo sapiens
ggtggcgtcggcctgcgagtgagcctgcccattctgccctgtgggaccccaggcccactcaggggtcactgaggcctgagacccaggactcctccccaccytcctggcctcagactgcacccaggaggggaacactgccctcgcacggccccgaagggcccccacatttgtgccgacactgttctcccttcggtggaagag

SEQ ID NO: 3728 - DNA, 201 bp, Homo sapiens
ccctcctggtgtcaccccagagccacacatgggcatctatgggagagtgtcaaccagacagagggtcacagtgtttacactttggaccttacgatcaggcwcaggtcaggggtgacacagactcatcctgaacagcatggcactccctccagcacaaacacaaggtcatggccacactgtgacacactacaccacacacaa

SEQ ID NO: 3729 - DNA, 201 bp, Homo sapiens
ggattcagagaaaggcaagggaggtaagggaggaggagcttctggggtccccagggctgtcatctgaatttgccctgggaaaccccttctctgtgacccayttctcatcacacacatggaaacccataggcccacacacaggtggtgtcactgtccctcctggtgtcaccccagagccacacatgggcatctatgggagag

SEQ ID NO: 3730 - DNA, 201 bp, Homo sapiens
ctcgcgcctccaggacggagaatacggccttggctgcttggtcggaggcgcctacacttacggcggcgggggctccgcggccgcgacgggggctggaggarcgggggcctatggtactggaggtcccggcggccccggaggcccggcaggcggcggcggcgcctgcagcatgggtcctctgaccggctcctacaacgtgaa

SEQ ID NO: 3731 - DNA, 201 bp, Homo sapiens
acaggtcaggggtgacacagactcatcctgaacagcatggcactccctccagcacaaacacaaggtcatggccacactgtgacacactacaccacacacarcagccaacagctacaacagcctcacttggtctgccaggcccccaccacacatcccagcccaatccaggtacgcacagacaggttttcacataaatgcagc

SEQ ID NO: 3732 - DNA, 201 bp, Homo sapiens
gtgccctctgtgcctgccatgccgggcgtcaacaacctcactggcctcaccttcccctggatggagagtaaccgcagatacacaaaggacaggttcacagrtcacccctatcagaaccggacgccccccaagaagaagaagccgcgcacgtccttcacacgcctgcagatctgcgagctggagaagcgcttccaccgccag

SEQ ID NO: 3733 - DNA, 201 bp, Homo sapiens
gagccgtggcccacccccagcccctggccaccggcttgcccaccgtgccctctgtgcctgccatgccgggcgtcaacaacctcactggcctcaccttcccytggatggagagtaaccgcagatacacaaaggacaggttcacaggtcacccctatcagaaccggacgccccccaagaagaagaagccgcgcacgtccttca

SEQ ID NO: 3734 - DNA, 201 bp, Homo sapiens
ctttcaggatatgttcccttcctgaatttgtctaagaaggctgagttggggggtggttgctgatttttataacatatagccagttgttcataggcctgtgytttaaagaagggcaagcctgaactcaccgtcctgcctcagggcctgggctccatacctggggagtagacagtcttctactttctaaaaagctggacttga

SEQ ID NO: 3735 - DNA, 201 bp, Homo sapiens
ctgaggaccactgtcctacagagtcaggaaatattgtagggagaaaaaaataacaacaacaaaggcctgtgttaatgttaaatagatgagattatggaatrtgtatattaatgttaaaaattgtaccttgatcaatgtactttttataaacttgccatagatatctcagatttgaaacctcaagacagatttattattctt

SEQ ID NO: 3736 - DNA, 201 bp, Homo sapiens
gcaccaccaggcgaagcttggcgagattgtgtcgtcaagcgcgtacgggcgccaattggccgggcgatgtggcgtggactggcgctggcgcgagcgattgsctgcgcggcccgggggcggggccagtgggcggtgcgcgccgcagactgtgctcaaagcgggcgccatccgggaccggcggttgtctgtggccggaggctg

SEQ ID NO: 3737 - DNA, 201 bp, Homo sapiens; identical to SEQ ID NO: 3735

SEQ ID NO: 3738 - DNA, 201 bp, Homo sapiens; identical to SEQ ID NO: 3735

SEQ ID NO: 3739 - DNA, 123 bp, Homo sapiens
cccgcagccccgaggggtctggkcgcgctgaagaccccttcggctgctgggccaacgcccccacccttggtcacctactcctgccgccgagcggttcgcgggaggtggcctcgggggtcgtag

SEQ ID NO: 3740 - DNA, 201 bp, Homo sapiens
ggacggcaccatggaggactccgaggcggtgcagagggccacagcgctcatcgagcagcggctggcacaggaggaggagaatgagaaactccgaggagacrcacgccagaagctgcccatggacttgctggtgctggaggatgagaagcaccacggggctcagagtgcagccctgcagaaggtgaagggccaagagcgcgt

SEQ ID NO: 3741 - DNA, 201 bp, Homo sapiens
cagaacctcatcgagctgcggaagaaacgcaagcagaagaagcgggacgctctggccgcctcgcatgagccgcccccagagcccgaggagatcactggccytgtggatgaggagaccttcctgaaagctgcggtggaggggaaaatgaaggtcattgagaagttcctggctgacggggggtcagccgacacgtgcgaccag

SEQ ID NO: 3742 - DNA, 201 bp, Homo sapiens; identical to SEQ ID NO: 3740

SEQ ID NO: 3743 - DNA, 201 bp, Homo sapiens; identical to SEQ ID NO: 3741

SEQ ID NO: 3744 - DNA, 201 bp, Homo sapiens; identical to SEQ ID NO: 3740

SEQ ID NO: 3745 - DNA, 201 bp, Homo sapiens; identical to SEQ ID NO: 3741

SEQ ID NO: 3746 - DNA, 201 bp, Homo sapiens
gtggtagaagaatctgcccgagcttctgtctcagttttgggagacatattaggctctgccatgcaaaacacacaaaatcttctccagatgccctatggctrtggagagcagaatatggtcctctttgctcctaacatctatgtactggattatctaaatgaaacacagcagcttactccagagatcaagtccaaggccatt

SEQ ID NO: 3747 - DNA, 173 bp, Homo sapiens
tgagtttgcaattgctgagtacaatgctccttgcagcaaagatcttggaaatgcttgaagaccacaaggctgaaaagtgctttgctggagtcctgttctcwgagctccacagaagacacgtgtttttgtatctttaaagacttgatgaataaacactttttctggtcaatgtc

SEQ ID NO: 3748 - DNA, 201 bp, Homo sapiens
cttcagggacattttccagcaaattccaagtggacaacaacaaccgcctgttactgcagcaggtctcattgccagagctgcctggggaatacagcatgaargtgacaggagaaggatgtgtctacctccagacatccttgaaatacaatattctcccagaaaaggaagagttcccctttgctttaggagtgcagactctgc

SEQ ID NO: 3749 - DNA, 201 bp, Homo sapiens
caagaagaaggaacagtggtggaattgactggaaggcagtccagtgaaatcacaagaaccataaccaaactctcatttgtgaaagtggactcacactttcracagggaattcccttctttgggcaggtgcgcctagtagatgggaaaggcgtccctataccaaataaagtcatattcatcagaggaaatgaagcaaactat

SEQ ID NO: 3750 - DNA, 165 bp, Homo sapiens
caattgctgagtacaatgctccttgcagcaaagatcttggaaatgcttgaagaccacaaggctgaaaagtgctttgctggagtcctgttctcagagctccmcagaagacacgtgtttttgtatctttaaagacttgatgaataaacactttttctggtcaatgtc

SEQ ID NO: 3751 - DNA, 201 bp, Homo sapiens
tccactgcctctctccgagccttccagcccttctttgtggagctcacaatgccttactctgtgattcgtggagaggccttcacactcaaggccacggtccwaaactaccttcccaaatgcatccgggtcagtgtgcagctggaagcctctcccgccttcctagctgtcccagtggagaaggaacaagcgcctcactgcatc

SEQ ID NO: 3752 - DNA, 201 bp, Homo sapiens
aatgcttgaaagatctaaccatgtgagccggacagaagtcagcagcaaccatgtcttgatttaccttgataaggtgtcaaatcagacactgagcttgttcytcacggttctgcaagatgtcccagtaagagatctgaaaccagccatagtgaaagtctatgattactacgagacggatgagtttgcaattgctgagtacaa

SEQ ID NO: 3753 - DNA, 201 bp, Homo sapiens
tagtccctgttacggctaccagtgggtgtcagaagaacacgaagaggcacatcacactgcttatcttgtgttctccccaagcaagagctttgtccaccttragcccatgtctcatgaactaccctgtggccatactcagacagtccaggcacattatattctgaatggaggcaccctgctggggctgaagaagctctcctt

SEQ ID NO: 3754 - DNA, 201 bp, Homo sapiens
tccaatgctaccacggatgagcatggccttgtacagttctctatcaacaccaccaatgttatgggtacctctcttactgttagggtcaattacaaggatcrtagtccctgttacggctaccagtgggtgtcagaagaacacgaagaggcacatcacactgcttatcttgtgttctccccaagcaagagctttgtccacctt

SEQ ID NO: 3755 - DNA, 201 bp, Homo sapiens
aaggccacggtcctaaactaccttcccaaatgcatccgggtcagtgtgcagctggaagcctctcccgccttcctagctgtcccagtggagaaggaacaagygcctcactgcatctgtgcaaacgggcggcaaactgtgtcctgggcagtaaccccaaagtcattaggaaatgtgaatttcactgtgagcgcagaggcacta

SEQ ID NO: 3756 - DNA, 176 bp, Homo sapiens
ggatgagtttgcaattgctgagtacaatgctccttgcagcaaagatcttggaaatgcttgaagaccacaaggctgaaaagtgctttgctggagtcctgttytcagagctccacagaagacacgtgtttttgtatctttaaagacttgatgaataaacactttttctggtcaatgtc

SEQ ID NO: 3757 - DNA, 201 bp, Homo sapiens
gctcatgaagcctgatgctgagctctcggcgtcctcggtttacaacctgctaccagaaaaggacctcactggcttccctgggcctttgaatgaccaggacratgaagactgcatcaatcgtcataatgtctatattaatggaatcacatatactccagtatcaagtacaaatgaaaaggatatgtacagcttcctagagga

SEQ ID NO: 3758 - DNA, 201 bp, Homo sapiens
ttgtacagttctctatcaacaccaccaatgttatgggtacctctcttactgttagggtcaattacaaggatcgtagtccctgttacggctaccagtgggtrtcagaagaacacgaagaggcacatcacactgcttatcttgtgttctccccaagcaagagctttgtccaccttgagcccatgtctcatgaactaccctgtg

SEQ ID NO: 3759 - DNA, 201 bp, Homo sapiens
gagtcagcctggaagacagcacaagaaggggaccatggcagccatgtatataccaaagcactgctggcctatgcttttgccctggcaggtaaccaggacargaggaaggaagtactcaagtcacttaatgaggaagctgtgaagaaagacaactctgtccattgggagcgccctcagaaacccaaggcaccagtggggcat

SEQ ID NO: 3760 - DNA, 201 bp, Homo sapiens
cttactctgtgattcgtggagaggccttcacactcaaggccacggtcctaaactaccttcccaaatgcatccgggtcagtgtgcagctggaagcctctccygccttcctagctgtcccagtggagaaggaacaagcgcctcactgcatctgtgcaaacgggcggcaaactgtgtcctgggcagtaaccccaaagtcattag

SEQ ID NO: 3761 - DNA, 201 bp, Homo sapiens
cggatgagcatggccttgtacagttctctatcaacaccaccaatgttatgggtacctctcttactgttagggtcaattacaaggatcgtagtccctgttayggctaccagtgggtgtcagaagaacacgaagaggcacatcacactgcttatcttgtgttctccccaagcaagagctttgtccaccttgagcccatgtctc

SEQ ID NO: 3762 - DNA, 201 bp, Homo sapiens
gtggagatgacatcctatgtgctcctcgcttatctcacggcccagccagccccaacctcggaggacctgacctctgcaaccaacatcgtgaagtggatcaygaagcagcagaatgcccagggcggtttctcctccacccaggacacagtggtggctctccatgctctgtccaaatatggagcagccacatttaccaggact

SEQ ID NO: 3763 - DNA, 201 bp, Homo sapiens
ccagggattctatttagcccgccaggaattaaccttgactataaataggccatcaatgacctttccagagaatgttcagagacctcaactttgtttagagrtcttgtgtgggtggaacttcctgtttgcacacagagcagcataaagcccagttgctttgggaagtgtttgggaccagatggattgtagggagtagggtac

SEQ ID NO: 3764 - DNA, 201 bp, Homo sapiens
tggaacttcctgtttgcacacagagcagcataaagcccagttgctttgggaagtgtttgggaccagatggattgtagggagtagggtacaatacagtctgktctcctccagctccttctttctgcaacatggggaagaacaaactccttcatccaagtctggttcttctcctcttggtcctcctgcccacagacgcctcag

SEQ ID NO: 3765 - DNA, 201 bp, Homo sapiens
gaggacatgggcttaaaggcattcaccaactcaaagattcgtaaacccaaaatgtgtccacagcttcaacagtatgaaatgcatggacctgaaggtctacrtgtaggtttttatgagtcagatgtaatgggaagaggccatgcacgcctggtgcatgttgaagagcctcacacggagaccgtacgaaagtacttccctgag

SEQ ID NO: 3766 - DNA, 201 bp, Homo sapiens
ccagatgccctatggctgtggagagcagaatatggtcctctttgctcctaacatctatgtactggattatctaaatgaaacacagcagcttactccagagrtcaagtccaaggccattggctatctcaacactggttaccagagacagttgaactacaaacactatgatggctcctacagcacctttggggagcgatatgg

SEQ ID NO: 3767 - DNA, 201 bp, Homo sapiens
ttatgttgatgaagtgcacaaaaataatagaagtgatatgatgtccgcattaggattaggacaagaggaagatatagaatcaccttgggattctgagagtrtctctgagaattttccacagaagtatgttgatcctttagctggggctgcagacggaaaagaaaaaaatataggaaatgaacaagcagaagatgtgtttta

SEQ ID NO: 3768 - DNA, 201 bp, Homo sapiens
attatgtcatcacccctgattactttagtgggcattcctacaagtcaggacattctacataactacagtgcaaaccttgcaatcagaaagtcaacattaayacattctagtttgttacttctctgtaatgtcctttatagcaaaaggatcccattctaatccatggcttgtatttagttgttgtatctgttagatctttca

SEQ ID NO: 3769 - DNA, 201 bp, Homo sapiens
gggatcgcttgcttggtaacccggagggagagattggaaaccgcggagtttcctttgggaggctgcggccagccggggctgacttgttatgttgggctccrgaggccgttaagagccgagagagacatgaggtgtctctgaagcccggtcgcctgggccatgaagaagatttttagtaagaagggcgagtcgcccttgggc

SEQ ID NO: 3770 - DNA, 201 bp, Homo sapiens
cattaatacattctagtttgttacttctctgtaatgtcctttatagcaaaaggatcccattctaatccatggcttgtatttagttgttgtatctgttagatctttcagtctggaacagttcctcagtctttccttgaccttcatgaccttgaatattttgaagagtaaagtctggtaatataagaatgtccctcaattggg

SEQ ID NO: 3771 - DNA, 201 bp, Homo sapiens
tatctgttagatctttcagtctggaacagttcctcagtctttccttgaccttcatgaccttgaatattttgaagagtaaagtctggtaatataagaatgtmcctcaattgggtttcatggtgattagatttagattatatgattttttggcaggagtatcacagaagtgacccagtgatcttctcattgcatcttacctgt

SEQ ID NO: 3772 - DNA, 201 bp, Homo sapiens
gaaactgatcatcagcaatttcccaggaaggaaaataaagagtatgctagtggtcctgccttgcaaatgaaggaagtaaagagcactgaaaaagaaaaacrgacctcgaaagaatctgtgaattcaccagtgtttgggaaggccagtttactaactggtggcctgctacaagtggatgatgacagcagtttaagtgaaata

SEQ ID NO: 3773 - DNA, 182 bp, Homo sapiens
atttgccctgttactggtaatgttagcattgatcactaacagtggtatctgctgaatttctcctctgtaatgttattttttcaccttgtggttaattagtrttttacagggaggtaatttgagactatgtacatatctctactccccatcgaaccctcaatttattcatttgcttgtatcaa

SEQ ID NO: 3774 - DNA, 127 bp, Homo sapiens
atttctcctctgtaatgttattttttcaccttgtggttaattagtattttacagggaggtaatttgagactatgtacatatctctactccccatcgaaccytcaatttattcatttgcttgtatcaa

SEQ ID NO: 3775 - DNA, 201 bp, Homo sapiens
taatgtactacaaagggagctatctgaaacaaaagaaataaaatcacagttagagcatcaaaaagttgaatgggaacgagaactgtgctctttgagatttwgcttaaaccaagaagaagagaagagaagaaatgctgatacgttgtatgaaaaaattagggaacagttaagaagaaaagaagagcaatataggaaagaagt

SEQ ID NO: 3776 - DNA, 201 bp, Homo sapiens
acgctcagaggcaactttctcgagaacagaatgccagaatgttacaagatggaattctgaccaatcacctttccaaacaaaaggagattgaaatggctcaraagaaaatgaattctgagaattctcatagtcatgaagaagaaaaagacctatcgcataaaaatagcatgttgcaggaagaaattgctatgctaagactag

SEQ ID NO: 3777 - DNA, 201 bp, Homo sapiens
aaaacaaggatgacctcacaccacttttacttgcagtaagtggaaaaaagcagcaaatggtggaatttttaataaagaaaaaagcaaatgtaaatgcagtrgataagttggaaagcagtcaccaactaatttcagaatataaagaagaaaggatacctaaacattcttctcaaaatagtaattcagtggatgaaagctctg

SEQ ID NO: 3778 - DNA, 201 bp, Homo sapiens
gtacaggttttaaagaaaaattatatgatctgaaagataagattttattactgggctgtttatgtgacattttgtttctcattaaatattaatatatgacatgtaaaaatattaaaggaacgtatttttgtatcatatatgtcagatcaaaatttatatagtattttaaacaatgttacttggcttctttaacttttaagt

SEQ ID NO: 3779 - DNA, 201 bp, Homo sapiens
aacgggtacaaaaggacctaagccaaacacagtgtcaaatgaaggaaatggaacaaaagtatcaaaatgaacaagttaaagtgaataaatacattggaaarcaggagtctgtagaggagagattgtctcaactacaaagtgagaatatgttgcttcgacaacaactggatgatgcccacaacaaggctgacaataaagaga

SEQ ID NO: 3780 - DNA, 201 bp, Homo sapiens
tacaggttttaaagaaaaattatatgatctgaaagataagattttattactgggctgtttatgtgacattttgtttctcattaaatattaatatatgacatgtaaaaatattaaaggaacgtatttttgtatcatatatgtcagatcaaaatttatatagtattttaaacaatgttacttggcttctttaacttttaagtg

SEQ ID NO: 3781 - DNA, 201 bp, Homo sapiens
tcaaaatagtaattcagtggatgaaagctctgaagactccttaagcaggctttctggcaaaccgggtgttgatgattcatggcctacctcagatgacgaaracctcaattttgatactaagaatgtcccaaaaccaagcttagcaaagctaatgactgcttctcagcaatccaggaaaaatttagaagcaacatatggcac

SEQ ID NO: 3782 - DNA, 201 bp, Homo sapiens
agattgaagaaagagcaagacaggaaatagcagaaaaattaaaagaagtcaatctatttttacaggcacaagcagcatctcaagaaaacttagagcagttwagagagaataattttgcttcaatgaaaagtcagatggaactcagaattaaagatctggaatctgaactctccaaaataaaaacttctcaagaagacttta

SEQ ID NO: 3783 - DNA, 201 bp, Homo sapiens
aaagctaatgactgcttctcagcaatccaggaaaaatttagaagcaacatatggcactgtgagaacaggaaatagaactttgtttgaggatagagattcckatagtcaagatgaagttgtggttgaaagccttcctacaacatcaatcaaagtccagtgcttttctcatcctacctatcaatcacctgaccttcttccaaa

SEQ ID NO: 3784 - DNA, 201 bp, Homo sapiens
gactataaaacagaatgaggaaacattaacacaaacaatatcccagtataatggacggcttagtgttctgacagctgagaatgcaatgctaaattctaaaytggagaatgaaaagcaaagcaaggaaagactggaagcagaagttgaatcataccattctagattggctgctgctatacatgatcgtgatcaaagtgagac

SEQ ID NO: 3785 - DNA, 201 bp, Homo sapiens
agaagcacaggatcgacatacagaagctgtcagatgtgctgagaagatgcaagatcacaagcaaaagcttgaaaaagataatgccaagttaaaagttacartcaaaaagcaaatggacaaaattgaggagcttcagaaaaacctgttaaatgcaaatttgtctgaagatgaaaaggaacaattaaagaaacttatggaatt

SEQ ID NO: 3786 - DNA, 127 bp, Homo sapiens
gtctagcgggatcgcttgcttggtaasccggagggagagattggaaaccgcggagtttcctttgggaggctgcggccagccggggctgacttgttatgttgggctccagaggccgttaagagccgag

SEQ ID NO: 3787 - DNA, 201 bp, Homo sapiens
gagagagacatgaggtgtctctgaagcccggtcgcctgggccatgaagaagatttttagtaagaagggcgagtcgcccttgggctccttcgcgcggcggcrgaggagcagcgcgggaggcgggggcgagccgggggagggcgcctactcgcagcccggctaccacgtccgagaccgagatctcggcaagatccacaaagct

SEQ ID NO: 3788 - DNA, 201 bp, Homo sapiens
ctagtttggaaagcatcaagagaatatgtacaggttttaaagaaaaattatatgatctgaaagataagattttattactgggctgtttatgtgacattttrtttctcattaaatattaatatatgacatgtaaaaatattaaaggaacgtatttttgtatcatatatgtcagatcaaaatttatatagtattttaaacaat

SEQ ID NO: 3789 - DNA, 201 bp, Homo sapiens
ataaaacagaatgaggaaacattaacacaaacaatatcccagtataatggacggcttagtgttctgacagctgagaatgcaatgctaaattctaaactggmgaatgaaaagcaaagcaaggaaagactggaagcagaagttgaatcataccattctagattggctgctgctatacatgatcgtgatcaaagtgagacatca

SEQ ID NO: 3790 - DNA, 201 bp, Homo sapiens
acgactctactgggatgtttcactggtgtgcacccaaggagatagagaaagtcatcctgactcgaagtgaagctgccatgaccgtcctgagtggccatgtygtggtctgcatctttggcgacgtcagctcagccctgatcggcctccggaacctggtgatgccgctccgtgccagcaactttcattaccatgagctcaagc

SEQ ID NO: 3791 - DNA, 135 bp, Homo sapiens
agggtgctttgggttttgattttgttgttgttgttgttttcctttctttctttttttatacacacaataagttagcacatgtttatttgaaacaagcaacmaaacagcaatgaaaacatattgattgtttccagt

SEQ ID NO: 3792 - DNA, 201 bp, Homo sapiens
caacaaggcccatctgctaaacatcccgagctggaattggaaagaaggtgatgacgcaatctgcctcgcagagttgaagttgggcttcatagcccagagckgcctggctcaaggcctctccaccatgcttgccaacctcttctccatgaggtcattcataaagattgaggaagacacatggcagaaatactacttggaagg

SEQ ID NO: 3793 - DNA, 201 bp, Homo sapiens
tcttcctgtctaatagcccaatagaatcctgccagaatttctacaaagatttcacattacagatcgacatggctttcaacgtgttcttccttctctacttyggcttgcggtttattgcagccaacgataaattgtggttctggctggaagtgaactctgtagtggatttcttcacggtgccccccgtgtttgtgtctgtgt

SEQ ID NO: 3794 - DNA, 201 bp, Homo sapiens
ttgcctgtgggacagcatttgccgtcagtgtcctggactcactcatgagcgcgacgtacttcaatgacaatatcctcaccctgatacggaccctggtgacyggaggagccacgccggagctggaggctctgattgctgaggaaaacgcccttagaggtggctacagcaccccgcagacactggccaatagggaccgctgcc

SEQ ID NO: 3795 - DNA, 201 bp, Homo sapiens
tttttacacatatttgcatatgtatgatagtgtgcatgtggttgtcatttttatttcaccaccataaaacccttgagcacaacagcaaataagcagacggrccaaaagttatttatgattctgggggaaaaataacccaaaggcatgctccagacataaatagctcactgcaggaacgagttcacagattagaagggagca

SEQ ID NO: 3796 - DNA, 201 bp, Homo sapiens; identical to SEQ ID NO: 3790

SEQ ID NO: 3797 - DNA, 135 bp, Homo sapiens; identical to SEQ ID NO: 3791

SEQ ID NO: 3798 - DNA, 201 bp, Homo sapiens; identical to SEQ ID NO: 3792

SEQ ID NO: 3799 - DNA, 201 bp, Homo sapiens; identical to SEQ ID NO: 3793

SEQ ID NO: 3800 - DNA, 201 bp, Homo sapiens; identical to SEQ ID NO: 3794

SEQ ID NO: 3801 - DNA, 201 bp, Homo sapiens; identical to SEQ ID NO: 3795

SEQ ID NO: 3802 - DNA, 201 bp, Homo sapiens; identical to SEQ ID NO: 3790

SEQ ID NO: 3803 - DNA, 201 bp, Homo sapiens; identical to SEQ ID NO: 3792

SEQ ID NO: 3804 - DNA, 201 bp, Homo sapiens; identical to SEQ ID NO: 3793

SEQ ID NO: 3805 - DNA, 201 bp, Homo sapiens; identical to SEQ ID NO: 3794

SEQ ID NO: 3806 - DNA, 201 bp, Homo sapiens
tcttgctctggcggacgctcaagtacctgtggaccgtgtgctgccactgcgggggcaagacgaaggaggcccagaagattaacaatggctcaagccaggcrgatggcactctcaaaccagtggatgaaaaagaggaggcagtggccgccgaggtcggctggatgacctccgtgaaggactgggcgggggtgatgatatccg

SEQ ID NO: 3807 - DNA, 201 bp, Homo sapiens; identical to SEQ ID NO: 3790

SEQ ID NO: 3808 - DNA, 201 bp, Homo sapiens
ggagccggggcgggcccgggggcggcgcagaccccgggcgcgggcggcccgcggcgccccctggctctcggcgctcggggccagcgcagcccggggcgagyggggcgcgggccggggagggggagctgcccgcgcactccatccccctcccccccgggcgggcggcggcggctcgctgtatatatctcggcgcaccccgcc

SEQ ID NO: 3809 - DNA, 135 bp, Homo sapiens; identical to SEQ ID NO: 3791

SEQ ID NO: 3810 - DNA, 201 bp, Homo sapiens; identical to SEQ ID NO: 3792

SEQ ID NO: 3811 - DNA, 201 bp, Homo sapiens
tcatagattcatcaaacccaatagaatcctgccagaatttctacaaagatttcacattacagatcgacatggctttcaacgtgttcttccttctctacttyggcttgcggtttattgcagccaacgataaattgtggttctggctggaagtgaactctgtagtggatttcttcacggtgccccccgtgtttgtgtctgtgt

SEQ ID NO: 3812 - DNA, 201 bp, Homo sapiens; identical to SEQ ID NO: 3795

SEQ ID NO: 3813 - DNA, 201 bp, Homo sapiens; identical to SEQ ID NO: 3794

SEQ ID NO: 3814 - DNA, 201 bp, Homo sapiens; identical to SEQ ID NO: 3790

SEQ ID NO: 3815 - DNA, 201 bp, Homo sapiens; identical to SEQ ID NO: 3792

SEQ ID NO: 3816 - DNA, 201 bp, Homo sapiens; identical to SEQ ID NO: 3793

SEQ ID NO: 3817 - DNA, 201 bp, Homo sapiens; identical to SEQ ID NO: 3794

SEQ ID NO: 3818 - DNA, 201 bp, Homo sapiens; identical to SEQ ID NO: 3790

SEQ ID NO: 3819 - DNA, 201 bp, Homo sapiens; identical to SEQ ID NO: 3792

SEQ ID NO: 3820 - DNA, 201 bp, Homo sapiens; identical to SEQ ID NO: 3793

SEQ ID NO: 3821 - DNA, 201 bp, Homo sapiens; identical to SEQ ID NO: 3794

SEQ ID NO: 3822 - DNA, 201 bp, Homo sapiens; identical to SEQ ID NO: 3806

SEQ ID NO: 3823 - DNA, 201 bp, Homo sapiens; identical to SEQ ID NO: 3790

SEQ ID NO: 3824 - DNA, 201 bp, Homo sapiens; identical to SEQ ID NO: 3808

SEQ ID NO: 3825 - DNA, 135 bp, Homo sapiens; identical to SEQ ID NO: 3791

SEQ ID NO: 3826 - DNA, 201 bp, Homo sapiens; identical to SEQ ID NO: 3792

SEQ ID NO: 3827 - DNA, 201 bp, Homo sapiens; identical to SEQ ID NO: 3811

SEQ ID NO: 3828 - DNA, 201 bp, Homo sapiens; identical to SEQ ID NO: 3795

SEQ ID NO: 3829 - DNA, 201 bp, Homo sapiens; identical to SEQ ID NO: 3794

SEQ ID NO: 3830 - DNA, 201 bp, Homo sapiens; identical to SEQ ID NO: 3790

SEQ ID NO: 3831 - DNA, 201 bp, Homo sapiens; identical to SEQ ID NO: 3792

SEQ ID NO: 3832 - DNA, 201 bp, Homo sapiens; identical to SEQ ID NO: 3793

SEQ ID NO: 3833 - DNA, 201 bp, Homo sapiens; identical to SEQ ID NO: 3794

SEQ ID NO: 3834 - DNA, 201 bp, Homo sapiens; identical to SEQ ID NO: 3806

SEQ ID NO: 3835 - DNA, 201 bp, Homo sapiens; identical to SEQ ID NO: 3790

SEQ ID NO: 3836 - DNA, 201 bp, Homo sapiens; identical to SEQ ID NO: 3808

SEQ ID NO: 3837 - DNA, 135 bp, Homo sapiens; identical to SEQ ID NO: 3791

SEQ ID NO: 3838 - DNA, 201 bp, Homo sapiens; identical to SEQ ID NO: 3792

SEQ ID NO: 3839 - DNA, 201 bp, Homo sapiens; identical to SEQ ID NO: 3811

SEQ ID NO: 3840 - DNA, 201 bp, Homo sapiens; identical to SEQ ID NO: 3795

SEQ ID NO: 3841 - DNA, 201 bp, Homo sapiens; identical to SEQ ID NO: 3794

SEQ ID NO: 3842 - DNA, 103 bp, Homo sapiens
tayaggagtattgaatagttgggaattggaacccctccagggggaaccaaacattgtcgttcagaagaagacaaagagagattgaaatgaagctgttgatttc

SEQ ID NO: 3843 - DNA, 201 bp, Homo sapiens
gctttttcatattgcttgcacacatttagatgtggatttagtctgcataactgtaacagagaaactaccattttacttcaaaagacctcctattaatgtgrcgattgaccgaggcctggcttttgaacttgtctatagccctgctatcaaagactccacaatgagaaggtatacaatttccagtgccctcaatttgatgca

SEQ ID NO: 3844 - DNA, 201 bp, Homo sapiens
tgcttttggaattatctctacagtgaagaaacctcggccatcagaaggagatgaagattgtcttccagcttccaagaaagccaagtgtgagggctgaaaasaatgccccagtctctgtcagcactcccttcttcccttttatagttcatcagccacaacaaaaataaaacctttgtgtgatttactgttttcatttggagc

SEQ ID NO: 3845 - DNA, 201 bp, Homo sapiens
gagtagagccagaggtataactgaataagaaatttttttaagcaagagaaagacaactgttctgcgggttggagaaaatacaattttttttttttttttttgagacagtctcgctctgtcccccaggctggagtgcagtggctcgatctctgctcactgcaagctccgcctcctgggttcatgccattctcctgcctcagc

SEQ ID NO: 3846 - DNA, 201 bp, Homo sapiens
gggtctcactctgtcacccaggctggagtgcagtggcacaatctcggctcactgcaacctttgcctcttgggctcaagccatcctcccacctcagcctccmaagtaagtgggaccagaagcatgcaccaccacatcccagctaatttttgtatttttttgtagagatggggttttgccatgtccaggctagtctcaaactc

SEQ ID NO: 3847 - DNA, 201 bp, Homo sapiens
ctctccccaaggcatcctaccacttcagtcctgaagagctggatgagaacacaagtccttctttgttaggaagtgccgggttccagaagtctcctcctgaycttaaagaaactcccagcactacgaaagcccttccaaggaaacttggcaagaaaccgggtagcaaactgactcacaagatacaaaaagatggtatcagta

SEQ ID NO: 3848 - DNA, 201 bp, Homo sapiens
tctgaggaagaaagcaattgaaggagagttctcagatgccggcactgctgtggaaggcacacctctccccaaggcatcctaccacttcagtcctgaagagstggatgagaacacaagtccttctttgttaggaagtgccgggttccagaagtctcctcctgatcttaaagaaactcccagcactacgaaagcccttccaag

SEQ ID NO: 3849 - DNA, 201 bp, Homo sapiens
agtgatctaccagatttcagacatttctaatagggatgtccacgctaccaatgaggagaaactgacatccacgtcatgtggtcagaaatcaggtgcgggcraggggctgctggagtcctctgcagagaaggcccctgtgttggtgtcctgtggaggtgagagcccccggatgggatctgcctcagcgactcagataagaca

SEQ ID NO: 3850 - DNA, 201 bp, Homo sapiens
ggtatcagtagatgtatggatgaaggggcagtgatctaccagatttcagacatttctaatagggatgtccacgctaccaatgaggagaaactgacatccaygtcatgtggtcagaaatcaggtgcgggcaaggggctgctggagtcctctgcagagaaggcccctgtgttggtgtcctgtggaggtgagagcccccggatg

SEQ ID NO: 3851 - DNA, 201 bp, Homo sapiens
gggagtcaccctagaggcttccacagaagctgatctaaaagttggaaactcctgtctagagcctgtgcccagcagaagaagcaagctgagaaagcccaagyctgtccctctgaggaagaaagcaattgaaggagagttctcagatgccggcactgctgtggaaggcacacctctccccaaggcatcctaccacttcagtcc

SEQ ID NO: 3852 - DNA, 201 bp, Homo sapiens
ctctgcagcacacgcagctggagagggcttctgtccctgtcagcggcagagggcgttggggctggccggggcaccttgtccctgctatggtccacatgctmacgctgtccacctgccaggtggagtgtatgtggctgtggccctccctcgtggaggtgccgtgctttaaagaggccttagtgcccgggatgggcacagtgt

SEQ ID NO: 3853 - DNA, 201 bp, Homo sapiens
ctcccccttgcacccgaggccctcgcagcagggagctcagcgaggcagagggtggggctgcacagaggggaacatcagctgcagctctgcaccaggccggyccctggggactggggcgctcctccctcaggctttctccctcagtcttggcttctccagggctctggggtgtctggagctaggcttggccctaccattctg

SEQ ID NO: 3854 - DNA, 201 bp, Homo sapiens
atggcctctgcagcacacgcagctggagagggcttctgtccctgtcagcggcagagggcgttggggctggccggggcaccttgtccctgctatggtccacrtgctcacgctgtccacctgccaggtggagtgtatgtggctgtggccctccctcgtggaggtgccgtgctttaaagaggccttagtgcccgggatgggcac

SEQ ID NO: 3855 - DNA, 186 bp, Homo sapiens
taaagatgtgcttcctccgtgtctgtcatacactgagaccaacaggctacagtgtccctgattcttggaaaagcctggagaagctggggagatgcggttcmcaatgcctcggtataggaggctgtgttgagctgacattcaaatggattctttaataataatgaaactggcgagtatttattgtgc

SEQ ID NO: 3856 - DNA, 201 bp, Homo sapiens; identical to SEQ ID NO: 3852

SEQ ID NO: 3857 - DNA, 201 bp, Homo sapiens; identical to SEQ ID NO: 3853

SEQ ID NO: 3858 - DNA, 201 bp, Homo sapiens; identical to SEQ ID NO: 3854

SEQ ID NO: 3859 - DNA, 186 bp, Homo sapiens; identical to SEQ ID NO: 3855

SEQ ID NO: 3860 - DNA, 201 bp, Homo sapiens; identical to SEQ ID NO: 3852

SEQ ID NO: 3861 - DNA, 201 bp, Homo sapiens; identical to SEQ ID NO: 3853

SEQ ID NO: 3862 - DNA, 201 bp, Homo sapiens; identical to SEQ ID NO: 3854

SEQ ID NO: 3863 - DNA, 186 bp, Homo sapiens; identical to SEQ ID NO: 3855

SEQ ID NO: 3864 - DNA, 201 bp, Homo sapiens; identical to SEQ ID NO: 3852

SEQ ID NO: 3865 - DNA, 201 bp, Homo sapiens; identical to SEQ ID NO: 3853

SEQ ID NO: 3866 - DNA, 201 bp, Homo sapiens; identical to SEQ ID NO: 3854

SEQ ID NO: 3867 - DNA, 186 bp, Homo sapiens; identical to SEQ ID NO: 3855

SEQ ID NO: 3868 - DNA, 201 bp, Homo sapiens; identical to SEQ ID NO: 3852

SEQ ID NO: 3869 - DNA, 201 bp, Homo sapiens; identical to SEQ ID NO: 3853

SEQ ID NO: 3870 - DNA, 201 bp, Homo sapiens; identical to SEQ ID NO: 3854

SEQ ID NO: 3871 - DNA, 201 bp, Homo sapiens
aaagtgaagcgggagcgggacgagtacaagcggagatgcttttacagggttaaatgataccacaagaggcagggcagcgggctcgacgagctctgttctgrtgcgggcaggaggcgggagcccggatctgtgcgactgaaggtgggaagaggagtacacggtgcggatccagctgcaagaccgtgtaaatgagctccagga

SEQ ID NO: 3872 - DNA, 186 bp, Homo sapiens; identical to SEQ ID NO: 3855

SEQ ID NO: 3873 - DNA, 201 bp, Homo sapiens; identical to SEQ ID NO: 3852

SEQ ID NO: 3874 - DNA, 201 bp, Homo sapiens; identical to SEQ ID NO: 3853

SEQ ID NO: 3875 - DNA, 201 bp, Homo sapiens; identical to SEQ ID NO: 3854

SEQ ID NO: 3876 - DNA, 186 bp, Homo sapiens; identical to SEQ ID NO: 3855

SEQ ID NO: 3877 - DNA, 201 bp, Homo sapiens
agctgaagggaccaaggtgggcattgagtggactctgtgctcactgggtggagctgtggcagggggcactgagcctccagaccctgctaaccacaaaaggsaacatcccagcaggctgtgcttggatcatgctcgtctgccctcaagctggaaaacaaggggctacctaccgagaggattatgcaagtgactttctttctt

SEQ ID NO: 3878 - DNA, 201 bp, Homo sapiens
gtctggggtttgatggacagaggctgaggaatttcctggcttccccagatagtgtcctgggacatggtatgctttggggctggggtagcatggaatccctytgaggacctggatactggtactacggggtggggaagaggaaccttaaacttggctttccccagccttcagcctgagtctagcatgtttctagctccccag

SEQ ID NO: 3879 - DNA, 201 bp, Homo sapiens
gcggaaggaccatgtgcgccggtttctgctcaccttccagagagaggatcttgagaagaagtactcccggaaggtggatccccgcttcggagcctacgttkcctgtgccctgttggtcttctgcttcatctgcttcatccagcttctcatcttcccacactccaccctgatgcttgggatctatgccagcatcttcctgct

SEQ ID NO: 3880 - DNA, 201 bp, Homo sapiens
catggtttagtggcctcctggtccctaaagtggatgaacggaaaacagcctggggtgaacgcaatgggcagaagcgttcgcggcgccgtggcactcgggcmggtggcttctgcacgccccgctatatgagctgcctccgggatgcagagccacccagccccacccctgcgggcccccctcggtgcccctggcaggatgacg

SEQ ID NO: 3881 - DNA, 201 bp, Homo sapiens
ggggctgcgggcagtggccctgggcttcgaggataccgaggtgacaacgacagcgggcgggacggctgaggtggcgcccgacgcggtgcccaggagtgggmgatcctgctggcgccgtctggtgcaggtgttccagtcgaagcagttccgttcggccaagctggagcgcctgtaccagcggtacttcttccagatgaacca

SEQ ID NO: 3882 - DNA, 201 bp, Homo sapiens
ttgatcagctgcggaaggaccatgtgcgccggtttctgctcaccttccagagagaggatcttgagaagaagtactcccggaaggtggatccccgcttcggrgcctacgttgcctgtgccctgttggtcttctgcttcatctgcttcatccagcttctcatcttcccacactccaccctgatgcttgggatctatgccagca

SEQ ID NO: 3883 - DNA, 201 bp, Homo sapiens
ccatgtgcgccggtttctgctcaccttccagagagaggatcttgagaagaagtactcccggaaggtggatccccgcttcggagcctacgttgcctgtgccmtgttggtcttctgcttcatctgcttcatccagcttctcatcttcccacactccaccctgatgcttgggatctatgccagcatcttcctgctgctgctaat

SEQ ID NO: 3884 - DNA, 201 bp, Homo sapiens
agtacctgaacggggactacgaggtggagccaggccgtggtggcgagcgcaacgcgtacctcaaggagcagcacattgagactttcctcatcctgggcgcmagccagaaacggaaagaggagaaggccatgctggccaagctgcagcggactcgggccaactccatggaagggctgatgccgcgctgggttcctgatcgtg

SEQ ID NO: 3885 - DNA, 201 bp, Homo sapiens
cggaggcccgggccgaccatgcccactgctgtgtggagatgggggtagacatgattgaggccatctcgctggtacgtgaggtgacaggtgtgaatgtgaayatgcgcgtgggcatccacagcgggcgcgtgcactgcggcgtccttggcttgcggaaatggcagttcgatgtgtggtccaatgatgtgaccctggccaacc

SEQ ID NO: 3886 - DNA, 201 bp, Homo sapiens
cctatgtggcactgttggcctgtgccgccgccctgttcgtggggctcatggtggtgtgtaaccggcatagcttccgccaggactccatgtgggtggtgagytacgtggtgctgggcatcctggcggcagtgcaggtcgggggcgctctcgcagcagacccgcgcagcccctctgcgggcctctggtgccctgtgttctttg

SEQ ID NO: 3887 - DNA, 201 bp, Homo sapiens
acttcctcaatgggggccccagcagttaacagggcccagccacaaattcagctgaagggaccaaggtgggcattgagtggactctgtgctcactgggtggrgctgtggcagggggcactgagcctccagaccctgctaaccacaaaagggaacatcccagcaggctgtgcttggatcatgctcgtctgccctcaagctgga

SEQ ID NO: 3888 - DNA, 201 bp, Homo sapiens
agtgcctgcggctgctcaacgagatcatcgctgactttgatgagattatcagcgaggagcggttccggcagctggaaaagatcaagacgattggtagcacytacatggctgcctcagggctgaacgccagcacctacgatcaggtgggccgctcccacatcactgccctggctgactacgccatgcggctcatggagcaga

SEQ ID NO: 3889 - DNA, 191 bp, Homo sapiens
ccggtctataggtgcataccaccacaccaggctaatttttttttttttgagacggagtctcactctgtcacccaggctggagtgcaatggygcgatctttgctcactgcaacctctgccacccgggttcaagcaattctcctgcctcagctcctgagtagctgggattacaggcgcccgccaccacgcccg

SEQ ID NO: 3890 - DNA, 201 bp, Homo sapiens
aagggctgatgccgcgctgggttcctgatcgtgccttctcccggaccaaggactccaaggccttccgccagatgggcattgatgattccagcaaagacaarcggggcacccaagatgccctgaaccctgaggatgaggtggatgagttcctgagccgtgccatcgatgcccgcagcattgatcagctgcggaaggaccatg

SEQ ID NO: 3891 - DNA, 201 bp, Homo sapiens; identical to SEQ ID NO: 3877

SEQ ID NO: 3892 - DNA, 201 bp, Homo sapiens; identical to SEQ ID NO: 3878

SEQ ID NO: 3893 - DNA, 201 bp, Homo sapiens; identical to SEQ ID NO: 3879

SEQ ID NO: 3894 - DNA, 201 bp, Homo sapiens; identical to SEQ ID NO: 3880

SEQ ID NO: 3895 - DNA, 201 bp, Homo sapiens; identical to SEQ ID NO: 3881

SEQ ID NO: 3896 - DNA, 201 bp, Homo sapiens; identical to SEQ ID NO: 3882

SEQ ID NO: 3897 - DNA, 201 bp, Homo sapiens; identical to SEQ ID NO: 3883

SEQ ID NO: 3898 - DNA, 201 bp, Homo sapiens; identical to SEQ ID NO: 3884

SEQ ID NO: 3899 - DNA, 201 bp, Homo sapiens; identical to SEQ ID NO: 3885

SEQ ID NO: 3900 - DNA, 201 bp, Homo sapiens; identical to SEQ ID NO: 3886

SEQ ID NO: 3901 - DNA, 201 bp, Homo sapiens; identical to SEQ ID NO: 3887

SEQ ID NO: 3902 - DNA, 201 bp, Homo sapiens; identical to SEQ ID NO: 3888

SEQ ID NO: 3903 - DNA, 191 bp, Homo sapiens; identical to SEQ ID NO: 3889

SEQ ID NO: 3904 - DNA, 201 bp, Homo sapiens; identical to SEQ ID NO: 3890

SEQ ID NO: 3905 - DNA, 201 bp, Homo sapiens
gactgaagactcccacctgaacgggtatgggagaggcatggcagaggactacatggtccttgacttgagcaccacctccagcctccagtccagcagcagtrtccattcctccagagaatccgacgcaggcagcgatgaggggattcttctcgatgacattgacggggcgagtgacagtggggagtcggcacacaaggccga

SEQ ID NO: 3906 - DNA, 201 bp, Homo sapiens
gagtgaaaaagtcctgatgaatagtgagaggcctgatgagaaccacagtgagccctctcaccaggacgtcatcaaggtgaaggaagaatttacagaccccrcttacgacatgttttacatgagccagtatggactgtacaatggtgggggtgccagcatggccgccttgcatgagagctttacatcgtctctgaattatgg

SEQ ID NO: 3907 - DNA, 201 bp, Homo sapiens
tgtacaatggtgggggtgccagcatggccgccttgcatgagagctttacatcgtctctgaattatggcagccctcaaaagttctccccagaaggtgacctrtgttctagcccagaccccaaaatctgttatgtgtgcaagaagagtttcaaaagctcctacagtgtgaaacttcactacaggaacgttcacttgaaagaga

SEQ ID NO: 3908 - DNA, 201 bp, Homo sapiens
agctgccacccctgtcatagcaagtacaaaatcaaatctggcactcacaagccctggccgacccccaatgggttttaccactccccctctagaccctgtcktgcaaaatcctctccctagccagctagtattttctgggctaaagactgtacaaccagttcctccattttatagaagtttactcactccaggggaaatggt

SEQ ID NO: 3909 - DNA, 201 bp, Homo sapiens
cgtaaactgttgaccaaagaactcgatgacatgggcctggactcgtcgcagccctcccttagcaaggacctccgcgatgaatttttggtgaagatatatgrtgcccagcaccccatggggctcgatgtcagggaagacgcctcctctcccgcagggactgaagactcccacctgaacgggtatgggagaggcatggcagag

SEQ ID NO: 3910 - DNA, 201 bp, Homo sapiens; identical to SEQ ID NO: 3905

SEQ ID NO: 3911 - DNA, 201 bp, Homo sapiens; identical to SEQ ID NO: 3906

SEQ ID NO: 3912 - DNA, 201 bp, Homo sapiens; identical to SEQ ID NO: 3907

SEQ ID NO: 3913 - DNA, 201 bp, Homo sapiens; identical to SEQ ID NO: 3908

SEQ ID NO: 3914 - DNA, 201 bp, Homo sapiens; identical to SEQ ID NO: 3909

SEQ ID NO: 3915 - DNA, 201 bp, Homo sapiens; identical to SEQ ID NO: 3905

SEQ ID NO: 3916 - DNA, 201 bp, Homo sapiens; identical to SEQ ID NO: 3906

SEQ ID NO: 3917 - DNA, 201 bp, Homo sapiens; identical to SEQ ID NO: 3907

SEQ ID NO: 3918 - DNA, 201 bp, Homo sapiens; identical to SEQ ID NO: 3909

SEQ ID NO: 3919 - DNA, 201 bp, Homo sapiens
ggccctgctcgagtcagggctgagcaaagaggcactgatccaggcactgggtgagccggggccctacctcctggctggagaaggccccctggacaaggggragtcctgcggcggcggtcgaggggagctggctgagctgcccaatgggctgggggagactcggggctccgaggacgagacggacgacgatggggaagactt

SEQ ID NO: 3920 - DNA, 201 bp, Homo sapiens
gcggaatgcatccagagaggggtgtccccatcacaggcacaggggctgggctccaacctcgtcacggaggtgcgtgtctacaactggtttgccaaccggcrcaaagaagaagccttccggcacaagctggccatggacacgtacagcgggccccccccagggccaggcccgggacctgcgctgcccgctcacagctcccct

SEQ ID NO: 3921 - DNA, 201 bp, Homo sapiens
catcccacagcgggaggtggtcgataccactggcctcaaccagtcccacctgtcccaacacctcaacaagggcactcccatgaagacgcagaagcgggccrccctgtacacctggtacgtccgcaagcagcgagaggtggcgcagcagttcacccatgcagggcagggagggctgattgaagagcccacaggtgatgagct

SEQ ID NO: 3922 - DNA, 201 bp, Homo sapiens
cgtccgcaagcagcgagaggtggcgcagcagttcacccatgcagggcagggagggctgattgaagagcccacaggtgatgagctaccaaccaagaaggggbggaggaaccgtttcaagtggggcccagcatcccagcagatcctgttccaggcctatgagaggcagaagaaccctagcaaggaggagcgagagacgctagt

SEQ ID NO: 3923 - DNA, 201 bp, Homo sapiens
tagggcggaatgcatccagagaggggtgtccccatcacaggcacaggggctgggctccaacctcgtcacggaggtgcgtgtctacaactggtttgccaacbggcgcaaagaagaagccttccggcacaagctggccatggacacgtacagcgggccccccccagggccaggcccgggacctgcgctgcccgctcacagctc

SEQ ID NO: 3924 - DNA, 201 bp, Homo sapiens
agaggtggcgcagcagttcacccatgcagggcagggagggctgattgaagagcccacaggtgatgagctaccaaccaagaaggggcggaggaaccgtttcmagtggggcccagcatcccagcagatcctgttccaggcctatgagaggcagaagaaccctagcaaggaggagcgagagacgctagtggaggagtgcaatag

SEQ ID NO: 3925 - DNA, 201 bp, Homo sapiens
agccgagccatggtttctaaactgagccagctgcagacggagctcctggcggccctgctcgagtcagggctgagcaaagaggcactgatccaggcactggrtgagccggggccctacctcctggctggagaaggccccctggacaagggggagtcctgcggcggcggtcgaggggagctggctgagctgcccaatgggctg

SEQ ID NO: 3926 - DNA, 201 bp, Homo sapiens
ggaggcggcccaccagaaagccgtggtggagacccttctgcaggaggacccgtggcgtgtggcgaagatggtcaagtcctacctgcagcagcacaacatcmcacagcgggaggtggtcgataccactggcctcaaccagtcccacctgtcccaacacctcaacaagggcactcccatgaagacgcagaagcgggccgccct

SEQ ID NO: 3927 - DNA, 201 bp, Homo sapiens
gcggccctgctcgagtcagggctgagcaaagaggcactgatccaggcactgggtgagccggggccctacctcctggctggagaaggccccctggacaaggrggagtcctgcggcggcggtcgaggggagctggctgagctgcccaatgggctgggggagactcggggctccgaggacgagacggacgacgatggggaagac

SEQ ID NO: 3928 - DNA, 201 bp, Homo sapiens
gcacaacatcccacagcgggaggtggtcgataccactggcctcaaccagtcccacctgtcccaacacctcaacaagggcactcccatgaagacgcagaagygggccgccctgtacacctggtacgtccgcaagcagcgagaggtggcgcagcagttcacccatgcagggcagggagggctgattgaagagcccacaggtga

SEQ ID NO: 3929 - DNA, 201 bp, Homo sapiens
agggcggaatgcatccagagaggggtgtccccatcacaggcacaggggctgggctccaacctcgtcacggaggtgcgtgtctacaactggtttgccaaccrgcgcaaagaagaagccttccggcacaagctggccatggacacgtacagcgggccccccccagggccaggcccgggacctgcgctgcccgctcacagctcc

SEQ ID NO: 3930 - DNA, 201 bp, Homo sapiens
gtccgcaagcagcgagaggtggcgcagcagttcacccatgcagggcagggagggctgattgaagagcccacaggtgatgagctaccaaccaagaaggggcrgaggaaccgtttcaagtggggcccagcatcccagcagatcctgttccaggcctatgagaggcagaagaaccctagcaaggaggagcgagagacgctagtg

SEQ ID NO: 3931 - DNA, 201 bp, Homo sapiens
tccaacctcgtcacggaggtgcgtgtctacaactggtttgccaaccggcgcaaagaagaagccttccggcacaagctggccatggacacgtacagcgggcsccccccagggccaggcccgggacctgcgctgcccgctcacagctcccctggcctgcctccacctgccctctcccccagtaaggtccacggtgtgcgctat

SEQ ID NO: 3932 - DNA, 201 bp, Homo sapiens
gtacagcgggccccccccagggccaggcccgggacctgcgctgcccgctcacagctcccctggcctgcctccacctgccctctcccccagtaaggtccacrgtgtgcgctatggacagcctgcgaccagtgagactgcagaagtaccctcaagcagcggcggtcccttagtgacagtgtctacacccctccaccaagtgtc

SEQ ID NO: 3933 - DNA, 201 bp, Homo sapiens
cagccccagaacctcatcatggcctcacttcctggggtcatgaccatcgggcctggtgagcctgcctccctgggtcctacgttcaccaacacaggtgcctscaccctggtcatcggtaagctggtggggatgggtgggcacctgggtgggaggctcatggggcaaccgcagaatccaggagctggaagagccactgggact

SEQ ID NO: 3934 - DNA, 201 bp, Homo sapiens
ccccagaacctcatcatggcctcacttcctggggtcatgaccatcgggcctggtgagcctgcctccctgggtcctacgttcaccaacacaggtgcctccaycctggtcatcggtaagctggtggggatgggtgggcacctgggtgggaggctcatggggcaaccgcagaatccaggagctggaagagccactgggactcat

SEQ ID NO: 3935 - DNA, 158 bp, Homo sapiens
cgtggccctgtggcagccgagccatggtttctaaactgagccagctgcagacggagcwcctggcggccctgctcgagtcagggctgagcaaagaggcactgatccaggcactgggtgagccggggccctacctcctggctggagaaggccccctggac

SEQ ID NO: 3936 - DNA, 142 bp, Homo sapiens
cgtggccctgtggcagccgagccatggtttctaaactgagcyagctgcagacggagctcctggcggccctgctcgagtcagggctgagcaaagaggcactgatccaggcactgggtgagccggggccctacctcctggctgg

SEQ ID NO: 3937 - DNA, 201 bp, Homo sapiens
ggcccaccagaaagccgtggtggagacccttctgcaggaggacccgtggcgtgtggcgaagatggtcaagtcctacctgcagcagcacaacatcccacagygggaggtggtcgataccactggcctcaaccagtcccacctgtcccaacacctcaacaagggcactcccatgaagacgcagaagcgggccgccctgtacac

SEQ ID NO: 3938 - DNA, 201 bp, Homo sapiens
caggaggacccgtggcgtgtggcgaagatggtcaagtcctacctgcagcagcacaacatcccacagcgggaggtggtcgataccactggcctcaaccagtyccacctgtcccaacacctcaacaagggcactcccatgaagacgcagaagcgggccgccctgtacacctggtacgtccgcaagcagcgagaggtggcgcag

SEQ ID NO: 3939 - DNA, 201 bp, Homo sapiens
gaggaggcggcccaccagaaagccgtggtggagacccttctgcaggaggacccgtggcgtgtggcgaagatggtcaagtcctacctgcagcagcacaacawcccacagcgggaggtggtcgataccactggcctcaaccagtcccacctgtcccaacacctcaacaagggcactcccatgaagacgcagaagcgggccgcc

SEQ ID NO: 3940 - DNA, 201 bp, Homo sapiens
ggaggacccgtggcgtgtggcgaagatggtcaagtcctacctgcagcagcacaacatcccacagcgggaggtggtcgataccactggcctcaaccagtccyacctgtcccaacacctcaacaagggcactcccatgaagacgcagaagcgggccgccctgtacacctggtacgtccgcaagcagcgagaggtggcgcagca

SEQ ID NO: 3941 - DNA, 201 bp, Homo sapiens
cgctatggacagcctgcgaccagtgagactgcagaagtaccctcaagcagcggcggtcccttagtgacagtgtctacacccctccaccaagtgtcccccaygggcctggagcccagccacagcctgctgagtacagaagccaagctggtctcagcagctgggggccccctcccccctgtcagcaccctgacagcactgcac

SEQ ID NO: 3942 - DNA, 181 bp, Homo sapiens
cgtggccctgtggcagccgagccatggtttctaaactgagccagctgcagacggagctcctggcggccctgctcgagtcarggctgagcaaagaggcactgatccaggcactgggtgagccggggccctacctcctggctggagaaggccccctggacaagggggagtcctgcggcggcgg

SEQ ID NO: 3943 - DNA, 201 bp, Homo sapiens
aaggaggagcgagagacgctagtggaggagtgcaatagggcggaatgcatccagagaggggtgtccccatcacaggcacaggggctgggctccaacctcgwcacggaggtgcgtgtctacaactggtttgccaaccggcgcaaagaagaagccttccggcacaagctggccatggacacgtacagcgggccccccccaggg

SEQ ID NO: 3944 - DNA, 201 bp, Homo sapiens
gcccaccagaaagccgtggtggagacccttctgcaggaggacccgtggcgtgtggcgaagatggtcaagtcctacctgcagcagcacaacatcccacagcrggaggtggtcgataccactggcctcaaccagtcccacctgtcccaacacctcaacaagggcactcccatgaagacgcagaagcgggccgccctgtacacc

SEQ ID NO: 3945 - DNA, 201 bp, Homo sapiens
cacaacatcccacagcgggaggtggtcgataccactggcctcaaccagtcccacctgtcccaacacctcaacaagggcactcccatgaagacgcagaagcrggccgccctgtacacctggtacgtccgcaagcagcgagaggtggcgcagcagttcacccatgcagggcagggagggctgattgaagagcccacaggtgat

SEQ ID NO: 3946 - DNA, 201 bp, Homo sapiens
agcacaacatcccacagcgggaggtggtcgataccactggcctcaaccagtcccacctgtcccaacacctcaacaagggcactcccatgaagacgcagaakcgggccgccctgtacacctggtacgtccgcaagcagcgagaggtggcgcagcagttcacccatgcagggcagggagggctgattgaagagcccacaggtg

SEQ ID NO: 3947 - DNA, 201 bp, Homo sapiens
ggcggaatgcatccagagaggggtgtccccatcacaggcacaggggctgggctccaacctcgtcacggaggtgcgtgtctacaactggtttgccaaccggygcaaagaagaagccttccggcacaagctggccatggacacgtacagcgggccccccccagggccaggcccgggacctgcgctgcccgctcacagctcccc

SEQ ID NO: 3948 - DNA, 201 bp, Homo sapiens
caccctgacagcactgcacagcttggagcagacatccccaggcctcaaccagcagccccagaacctcatcatggcctcacttcctggggtcatgaccatcsggcctggtgagcctgcctccctgggtcctacgttcaccaacacaggtgcctccaccctggtcatcggtaagctggtggggatgggtgggcacctgggtgg

SEQ ID NO: 3949 - DNA, 201 bp, Homo sapiens
ccaccagaaagccgtggtggagacccttctgcaggaggacccgtggcgtgtggcgaagatggtcaagtcctacctgcagcagcacaacatcccacagcggraggtggtcgataccactggcctcaaccagtcccacctgtcccaacacctcaacaagggcactcccatgaagacgcagaagcgggccgccctgtacacctg

SEQ ID NO: 3950 - DNA, 201 bp, Homo sapiens
aagcgggccgccctgtacacctggtacgtccgcaagcagcgagaggtggcgcagcagttcacccatgcagggcagggagggctgattgaagagcccacagrtgatgagctaccaaccaagaaggggcggaggaaccgtttcaagtggggcccagcatcccagcagatcctgttccaggcctatgagaggcagaagaaccct

SEQ ID NO: 3951 - DNA, 201 bp, Homo sapiens
cagcgagaggtggcgcagcagttcacccatgcagggcagggagggctgattgaagagcccacaggtgatgagctaccaaccaagaaggggcggaggaaccrtttcaagtggggcccagcatcccagcagatcctgttccaggcctatgagaggcagaagaaccctagcaaggaggagcgagagacgctagtggaggagtgc

SEQ ID NO: 3952 - DNA, 201 bp, Homo sapiens
ctgattgaagagcccacaggtgatgagctaccaaccaagaaggggcggaggaaccgtttcaagtggggcccagcatcccagcagatcctgttccaggcctrtgagaggcagaagaaccctagcaaggaggagcgagagacgctagtggaggagtgcaatagggcggaatgcatccagagaggggtgtccccatcacaggca

SEQ ID NO: 3953 - DNA, 201 bp, Homo sapiens
gaaccctagcaaggaggagcgagagacgctagtggaggagtgcaatagggcggaatgcatccagagaggggtgtccccatcacaggcacaggggctgggcwccaacctcgtcacggaggtgcgtgtctacaactggtttgccaaccggcgcaaagaagaagccttccggcacaagctggccatggacacgtacagcgggcc

SEQ ID NO: 3954 - DNA, 201 bp, Homo sapiens
ccagaaagccgtggtggagacccttctgcaggaggacccgtggcgtgtggcgaagatggtcaagtcctacctgcagcagcacaacatcccacagcgggagrtggtcgataccactggcctcaaccagtcccacctgtcccaacacctcaacaagggcactcccatgaagacgcagaagcgggccgccctgtacacctggta

SEQ ID NO: 3955 - DNA, 201 bp, Homo sapiens
agctgcccaatgggctgggggagactcggggctccgaggacgagacggacgacgatggggaagacttcacgccacccatcctcaaagagctggagaacctyagccctgaggaggcggcccaccagaaagccgtggtggagacccttctgcaggaggacccgtggcgtgtggcgaagatggtcaagtcctacctgcagcagc

SEQ ID NO: 3956 - DNA, 201 bp, Homo sapiens
gcagaagaaccctagcaaggaggagcgagagacgctagtggaggagtgcaatagggcggaatgcatccagagaggggtgtccccatcacaggcacaggggmtgggctccaacctcgtcacggaggtgcgtgtctacaactggtttgccaaccggcgcaaagaagaagccttccggcacaagctggccatggacacgtacag

SEQ ID NO: 3957 - DNA, 201 bp, Homo sapiens
gctccaacctcgtcacggaggtgcgtgtctacaactggtttgccaaccggcgcaaagaagaagccttccggcacaagctggccatggacacgtacagcggsccccccccagggccaggcccgggacctgcgctgcccgctcacagctcccctggcctgcctccacctgccctctcccccagtaaggtccacggtgtgcgct

SEQ ID NO: 3958 - DNA, 201 bp, Homo sapiens
gtggccctgtggcagccgagccatggtttctaaactgagccagctgcagacggagctcctggcggccctgctcgagtcagggctgagcaaagaggcactgmtccaggcactgggtgagccggggccctacctcctggctggagaaggccccctggacaagggggagtcctgcggcggcggtcgaggggagctggctgagct

SEQ ID NO: 3959 - DNA, 174 bp, Homo sapiens
cgtggccctgtggcagccgagccatggtttctaaactgagccagctgcagacggagctcctggcggccctgctsgagtcagggctgagcaaagaggcactgatccaggcactgggtgagccggggccctacctcctggctggagaaggccccctggacaagggggagtcctgcg

SEQ ID NO: 3960 - DNA, 201 bp, Homo sapiens
ctggagaacctcagccctgaggaggcggcccaccagaaagccgtggtggagacccttctgcaggaggacccgtggcgtgtggcgaagatggtcaagtcctrcctgcagcagcacaacatcccacagcgggaggtggtcgataccactggcctcaaccagtcccacctgtcccaacacctcaacaagggcactcccatgaag

SEQ ID NO: 3961 - DNA, 201 bp, Homo sapiens
tggcctcaaccagtcccacctgtcccaacacctcaacaagggcactcccatgaagacgcagaagcgggccgccctgtacacctggtacgtccgcaagcagygagaggtggcgcagcagttcacccatgcagggcagggagggctgattgaagagcccacaggtgatgagctaccaaccaagaaggggcggaggaaccgttt

SEQ ID NO: 3962 - DNA, 201 bp, Homo sapiens
gaggaaccgtttcaagtggggcccagcatcccagcagatcctgttccaggcctatgagaggcagaagaaccctagcaaggaggagcgagagacgctagtgkaggagtgcaatagggcggaatgcatccagagaggggtgtccccatcacaggcacaggggctgggctccaacctcgtcacggaggtgcgtgtctacaactg

SEQ ID NO: 3963 - DNA, 201 bp, Homo sapiens
cccagcatcccagcagatcctgttccaggcctatgagaggcagaagaaccctagcaaggaggagcgagagacgctagtggaggagtgcaatagggcggaabgcatccagagaggggtgtccccatcacaggcacaggggctgggctccaacctcgtcacggaggtgcgtgtctacaactggtttgccaaccggcgcaaaga

SEQ ID NO: 3964 - DNA, 201 bp, Homo sapiens
ggggagactcggggctccgaggacgagacggacgacgatggggaagacttcacgccacccatcctcaaagagctggagaacctcagccctgaggaggcggyccaccagaaagccgtggtggagacccttctgcaggaggacccgtggcgtgtggcgaagatggtcaagtcctacctgcagcagcacaacatcccacagcgg

SEQ ID NO: 3965 - DNA, 201 bp, Homo sapiens
gcagcgagaggtggcgcagcagttcacccatgcagggcagggagggctgattgaagagcccacaggtgatgagctaccaaccaagaaggggcggaggaacygtttcaagtggggcccagcatcccagcagatcctgttccaggcctatgagaggcagaagaaccctagcaaggaggagcgagagacgctagtggaggagtg

SEQ ID NO: 3966 - DNA, 201 bp, Homo sapiens
gaggagcgagagacgctagtggaggagtgcaatagggcggaatgcatccagagaggggtgtccccatcacaggcacaggggctgggctccaacctcgtcayggaggtgcgtgtctacaactggtttgccaaccggcgcaaagaagaagccttccggcacaagctggccatggacacgtacagcgggccccccccagggcca

SEQ ID NO: 3967 - DNA, 201 bp, Homo sapiens
agagacgctagtggaggagtgcaatagggcggaatgcatccagagaggggtgtccccatcacaggcacaggggctgggctccaacctcgtcacggaggtgygtgtctacaactggtttgccaaccggcgcaaagaagaagccttccggcacaagctggccatggacacgtacagcgggccccccccagggccaggcccggg

SEQ ID NO: 3968 - DNA, 201 bp, Homo sapiens; identical to SEQ ID NO: 3919

SEQ ID NO: 3969 - DNA, 201 bp, Homo sapiens; identical to SEQ ID NO: 3920

SEQ ID NO: 3970 - DNA, 201 bp, Homo sapiens
ccctcctaccagcagccgctcatgccacctgtgcagagccatgtgacccagagccccttcatggccaccatggctcagctgcagagcccccacggtgagcrccctgtgccccacacagcaggagatgatgatagaggttggctgtcaatggatgcaggggaaaggggtgcctggcaggcattgcagtctgcatgtgtctct

SEQ ID NO: 3971 - DNA, 201 bp, Homo sapiens
  misc_feature (1)...(201): n = A,T,C or G, or insertion/deletion polymorphism (see Tables 1-2)
agcagcctgaccaccctgcagcccgtccagttctcccagccgctgcacccctcctaccagcagccgctcatgccacctgtgcagagccatgtgacccaganccccttcatggccaccatggctcagctgcagagcccccacggtgagcgccctgtgccccacacagcaggagatgatgatagaggttggctgtcaatggat

SEQ ID NO: 3972 - DNA, 201 bp, Homo sapiens; identical to SEQ ID NO: 3921

SEQ ID NO: 3973 - DNA, 201 bp, Homo sapiens
gttcaccaacacaggtgcctccaccctggtcatcggcctggcctccacgcaggcacagagtgtgccggtcatcaacagcatgggcagcagcctgaccaccytgcagcccgtccagttctcccagccgctgcacccctcctaccagcagccgctcatgccacctgtgcagagccatgtgacccagagccccttcatggccac

SEQ ID NO: 3974 - DNA, 201 bp, Homo sapiens; identical to SEQ ID NO: 3922

SEQ ID NO: 3975 - DNA, 201 bp, Homo sapiens; identical to SEQ ID NO: 3923

SEQ ID NO: 3976 - DNA, 201 bp, Homo sapiens; identical to SEQ ID NO: 3924

SEQ ID NO: 3977 - DNA, 201 bp, Homo sapiens; identical to SEQ ID NO: 3926

SEQ ID NO: 3978 - DNA, 201 bp, Homo sapiens; identical to SEQ ID NO: 3925

SEQ ID NO: 3979 - DNA, 201 bp, Homo sapiens; identical to SEQ ID NO: 3928

SEQ ID NO: 3980 - DNA, 201 bp, Homo sapiens; identical to SEQ ID NO: 3927

SEQ ID NO: 3981 - DNA, 201 bp, Homo sapiens; identical to SEQ ID NO: 3929

SEQ ID NO: 3982 - DNA, 201 bp, Homo sapiens; identical to SEQ ID NO: 3930

SEQ ID NO: 3983 - DNA, 201 bp, Homo sapiens; identical to SEQ ID NO: 3931

SEQ ID NO: 3984 - DNA, 201 bp, Homo sapiens; identical to SEQ ID NO: 3932

SEQ ID NO: 3985 - DNA, 201 bp, Homo sapiens
cagccccagaacctcatcatggcctcacttcctggggtcatgaccatcgggcctggtgagcctgcctccctgggtcctacgttcaccaacacaggtgcctscaccctggtcatcggcctggcctccacgcaggcacagagtgtgccggtcatcaacagcatgggcagcagcctgaccaccctgcagcccgtccagttctcc

SEQ ID NO: 3986 - DNA, 158 bp, Homo sapiens; identical to SEQ ID NO: 3935

SEQ ID NO: 3987 - DNA, 201 bp, Homo sapiens
ccccagaacctcatcatggcctcacttcctggggtcatgaccatcgggcctggtgagcctgcctccctgggtcctacgttcaccaacacaggtgcctccaycctggtcatcggcctggcctccacgcaggcacagagtgtgccggtcatcaacagcatgggcagcagcctgaccaccctgcagcccgtccagttctcccag

SEQ ID NO: 3988 - DNA, 201 bp, Homo sapiens; identical to SEQ ID NO: 3937

SEQ ID NO: 3989 - DNA, 142 bp, Homo sapiens; identical to SEQ ID NO: 3936

SEQ ID NO: 3990 - DNA, 201 bp, Homo sapiens; identical to SEQ ID NO: 3938

SEQ ID NO: 3991 - DNA, 201 bp, Homo sapiens; identical to SEQ ID NO: 3939

SEQ ID NO: 3992 - DNA, 201 bp, Homo sapiens; identical to SEQ ID NO: 3940

SEQ ID NO: 3993 - DNA, 201 bp, Homo sapiens; identical to SEQ ID NO: 3941

SEQ ID NO: 3994 - DNA, 181 bp, Homo sapiens; identical to SEQ ID NO: 3942

SEQ ID NO: 3995 - DNA, 201 bp, Homo sapiens; identical to SEQ ID NO: 3943

SEQ ID NO: 3996 - DNA, 201 bp, Homo sapiens; identical to SEQ ID NO: 3944

SEQ ID NO: 3997 - DNA, 201 bp, Homo sapiens
gggcagcagcctgaccaccctgcagcccgtccagttctcccagccgctgcacccctcctaccagcagccgctcatgccacctgtgcagagccatgtgaccyagagccccttcatggccaccatggctcagctgcagagcccccacggtgagcgccctgtgccccacacagcaggagatgatgatagaggttggctgtcaat

SEQ ID NO: 3998 - DNA, 201 bp, Homo sapiens; identical to SEQ ID NO: 3945

SEQ ID NO: 3999 - DNA, 201 bp, Homo sapiens; identical to SEQ ID NO: 3946

SEQ ID NO: 4000 - DNA, 201 bp, Homo sapiens; identical to SEQ ID NO: 3947

SEQ ID NO: 4001 - DNA, 201 bp, Homo sapiens
caccctgacagcactgcacagcttggagcagacatccccaggcctcaaccagcagccccagaacctcatcatggcctcacttcctggggtcatgaccatcsggcctggtgagcctgcctccctgggtcctacgttcaccaacacaggtgcctccaccctggtcatcggcctggcctccacgcaggcacagagtgtgccggt

SEQ ID NO: 4002 - DNA, 201 bp, Homo sapiens; identical to SEQ ID NO: 3950

SEQ ID NO: 4003 - DNA, 201 bp, Homo sapiens; identical to SEQ ID NO: 3951

SEQ ID NO: 4004 - DNA, 201 bp, Homo sapiens; identical to SEQ ID NO: 3949

SEQ ID NO: 4005 - DNA, 107 bp, Homo sapiens
acacagcaggagatgatgatagaggttggctgtcaatggatgcaggggaaaggggtgcctggcaggcattgcagtctgcatgtgtctctgggacaagtgtktttccg

SEQ ID NO: 4006 - DNA, 201 bp, Homo sapiens; identical to SEQ ID NO: 3952

SEQ ID NO: 4007 - DNA, 201 bp, Homo sapiens; identical to SEQ ID NO: 3953

SEQ ID NO: 4008 - DNA, 201 bp, Homo sapiens; identical to SEQ ID NO: 3954

SEQ ID NO: 4009 - DNA, 201 bp, Homo sapiens
caccctggtcatcggcctggcctccacgcaggcacagagtgtgccggtcatcaacagcatgggcagcagcctgaccaccctgcagcccgtccagttctccyagccgctgcacccctcctaccagcagccgctcatgccacctgtgcagagccatgtgacccagagccccttcatggccaccatggctcagctgcagagccc

SEQ ID NO: 4010 - DNA, 201 bp, Homo sapiens; identical to SEQ ID NO: 3955

SEQ ID NO: 4011 - DNA, 201 bp, Homo sapiens; identical to SEQ ID NO: 3956

SEQ ID NO: 4012 - DNA, 201 bp, Homo sapiens; identical to SEQ ID NO: 3957

SEQ ID NO: 4013 - DNA, 201 bp, Homo sapiens; identical to SEQ ID NO: 3958

SEQ ID NO: 4014 - DNA, 174 bp, Homo sapiens; identical to SEQ ID NO: 3959

SEQ ID NO: 4015 - DNA, 201 bp, Homo sapiens; identical to SEQ ID NO: 3960

SEQ ID NO: 4016 - DNA, 201 bp, Homo sapiens; identical to SEQ ID NO: 3961

SEQ ID NO: 4017 - DNA, 201 bp, Homo sapiens; identical to SEQ ID NO: 3962

SEQ ID NO: 4018 - DNA, 201 bp, Homo sapiens; identical to SEQ ID NO: 3963

SEQ ID NO: 4019 - DNA, 201 bp, Homo sapiens; identical to SEQ ID NO: 3964

SEQ ID NO: 4020 - DNA, 201 bp, Homo sapiens; identical to SEQ ID NO: 3965

SEQ ID NO: 4021 - DNA, 201 bp, Homo sapiens; identical to SEQ ID NO: 3966

SEQ ID NO: 4022 - DNA, 201 bp, Homo sapiens; identical to SEQ ID NO: 3967

SEQ ID NO: 4023 - DNA, 201 bp, Homo sapiens; identical to SEQ ID NO: 3919

SEQ ID NO: 4024 - DNA, 201 bp, Homo sapiens
cagagccatgtgacccagagccccttcatggccaccatggctcagctgcagagcccccacgccctctacagccacaagcccgaggtggcccagtacacccrcacgggcctgctcccgcagactatgctcatcaccgacaccaccaacctgagcgccctggccagcctcacgcccaccaagcaggtcttcacctcagacact

SEQ ID NO: 4025 - DNA, 201 bp, Homo sapiens
cccttcatggccaccatggctcagctgcagagcccccacgccctctacagccacaagcccgaggtggcccagtacacccacacgggcctgctcccgcagaytatgctcatcaccgacaccaccaacctgagcgccctggccagcctcacgcccaccaagcaggtcttcacctcagacactgaggcctccagtgagtccggg

SEQ ID NO: 4026 - DNA, 201 bp, Homo sapiens; identical to SEQ ID NO: 3921

SEQ ID NO: 4027 - DNA, 201 bp, Homo sapiens; identical to SEQ ID NO: 3922

SEQ ID NO: 4028 - DNA, 201 bp, Homo sapiens; identical to SEQ ID NO: 3923

SEQ ID NO: 4029 - DNA, 201 bp, Homo sapiens
cgccagccccacagtgtcctccagcagcctggtgctgtaccagagctcagactccagcaatggccagagccacctgctgccatccaaccacagcgtcatcragaccttcatctccacccagatggcctcttcctcccagtaaccacggcacctgggccctggggcctgtactgcctgcttggggggtgatgagggcagcag

SEQ ID NO: 4030 - DNA, 201 bp, Homo sapiens; identical to SEQ ID NO: 3924

SEQ ID NO: 4031 - DNA, 201 bp, Homo sapiens; identical to SEQ ID NO: 3927

SEQ ID NO: 4032 - DNA, 201 bp, Homo sapiens; identical to SEQ ID NO: 3929

SEQ ID NO: 4033 - DNA, 201 bp, Homo sapiens
ggccagcctcacgcccaccaagcaggtcttcacctcagacactgaggcctccagtgagtccgggcttcacacgccggcatctcaggccaccaccctccacrtccccagccaggaccctgccggcatccagcacctgcagccggcccaccggctcagcgccagccccacagtgtcctccagcagcctggtgctgtaccagag

SEQ ID NO: 4034 - DNA, 201 bp, Homo sapiens
gctcagcgccagccccacagtgtcctccagcagcctggtgctgtaccagagctcagactccagcaatggccagagccacctgctgccatccaaccacagcrtcatcgagaccttcatctccacccagatggcctcttcctcccagtaaccacggcacctgggccctggggcctgtactgcctgcttggggggtgatgaggg

SEQ ID NO: 4035 - DNA, 201 bp, Homo sapiens; identical to SEQ ID NO: 3931

SEQ ID NO: 4036 - DNA, 201 bp, Homo sapiens; identical to SEQ ID NO: 3932

SEQ ID NO: 4037 - DNA, 201 bp, Homo sapiens; identical to SEQ ID NO: 3985

SEQ ID NO: 4038 - DNA, 201 bp, Homo sapiens; identical to SEQ ID NO: 3987

SEQ ID NO: 4039 - DNA, 158 bp, Homo sapiens; identical to SEQ ID NO: 3935

SEQ ID NO: 4040 - DNA, 142 bp, Homo sapiens; identical to SEQ ID NO: 3936

SEQ ID NO: 4041 - DNA, 201 bp, Homo sapiens
agccacaagcccgaggtggcccagtacacccacacgggcctgctcccgcagactatgctcatcaccgacaccaccaacctgagcgccctggccagcctcasgcccaccaagcaggtcttcacctcagacactgaggcctccagtgagtccgggcttcacacgccggcatctcaggccaccaccctccacgtccccagccag

SEQ ID NO: 4042 - DNA, 201 bp, Homo sapiens; identical to SEQ ID NO: 3937

SEQ ID NO: 4043 - DNA, 201 bp, Homo sapiens
tccagtgagtccgggcttcacacgccggcatctcaggccaccaccctccacgtccccagccaggaccctgccggcatccagcacctgcagccggcccaccrgctcagcgccagccccacagtgtcctccagcagcctggtgctgtaccagagctcagactccagcaatggccagagccacctgctgccatccaaccacagc

SEQ ID NO: 4044 - DNA, 201 bp, Homo sapiens
ctccagtgagtccgggcttcacacgccggcatctcaggccaccaccctccacgtccccagccaggaccctgccggcatccagcacctgcagccggcccacsggctcagcgccagccccacagtgtcctccagcagcctggtgctgtaccagagctcagactccagcaatggccagagccacctgctgccatccaaccacag

SEQ ID NO: 4045 - DNA, 201 bp, Homo sapiens; identical to SEQ ID NO: 3938

SEQ ID NO: 4046 - DNA, 201 bp, Homo sapiens; identical to SEQ ID NO: 3939

SEQ ID NO: 4047 - DNA, 201 bp, Homo sapiens
caggccaccaccctccacgtccccagccaggaccctgccggcatccagcacctgcagccggcccaccggctcagcgccagccccacagtgtcctccagcakcctggtgctgtaccagagctcagactccagcaatggccagagccacctgctgccatccaaccacagcgtcatcgagaccttcatctccacccagatggcc

SEQ ID NO: 4048 - DNA, 201 bp, Homo sapiens; identical to SEQ ID NO: 3940

SEQ ID NO: 4049 - DNA, 201 bp, Homo sapiens; identical to SEQ ID NO: 3941

SEQ ID NO: 4050 - DNA, 181 bp, Homo sapiens; identical to SEQ ID NO: 3942

SEQ ID NO: 4051 - DNA, 201 bp, Homo sapiens; identical to SEQ ID NO: 3943

SEQ ID NO: 4052 - DNA, 201 bp, Homo sapiens; identical to SEQ ID NO: 3945

SEQ ID NO: 4053 - DNA, 201 bp, Homo sapiens
gtcaccaatgtacccaccgggccactccttcctgccccaactccttccagctagtgacccacatgccatttgtactgaccccatcacctactcacacaggmatttcctgggtggctactctgtgccagagcctggggctctaacgcctgagcccagggaggccgaagctaacagggaaggcaggcagggctctcctggctt

SEQ ID NO: 4054 - DNA, 201 bp, Homo sapiens
gcgccagccccacagtgtcctccagcagcctggtgctgtaccagagctcagactccagcaatggccagagccacctgctgccatccaaccacagcgtcatsgagaccttcatctccacccagatggcctcttcctcccagtaaccacggcacctgggccctggggcctgtactgcctgcttggggggtgatgagggcagca

SEQ ID NO: 4055 - DNA, 201 bp, Homo sapiens
ggcctatggagagccctgggaccgctacaccactctggcagccacacttctcaggacacaggcctgtgtagctgtgacctgctgagctctgagaggccctrgatcagcgtggccttgttctgtcaccaatgtacccaccgggccactccttcctgccccaactccttccagctagtgacccacatgccatttgtactgacc

SEQ ID NO: 4056 - DNA, 201 bp, Homo sapiens
cgtggcccttcctggacagctgtgcctcgctccccactctgctctgatgcatcagaaagggagggctctgaggcgccccaacccgtggaggctgctcgggktgcacaggagggggtcgtggagagctaggagcaaagcctgttcatggcagatgtaggagggactgtcgctgcttcgtgggatacagtcttcttacttgga

SEQ ID NO: 4057 - DNA, 201 bp, Homo sapiens
gcaggtcttcacctcagacactgaggcctccagtgagtccgggcttcacacgccggcatctcaggccaccaccctccacgtccccagccaggaccctgccrgcatccagcacctgcagccggcccaccggctcagcgccagccccacagtgtcctccagcagcctggtgctgtaccagagctcagactccagcaatggcca

SEQ ID NO: 4058 - DNA, 201 bp, Homo sapiens; identical to SEQ ID NO: 3949

SEQ ID NO: 4059 - DNA, 201 bp, Homo sapiens; identical to SEQ ID NO: 3952

SEQ ID NO: 4060 - DNA, 201 bp, Homo sapiens; identical to SEQ ID NO: 3953

SEQ ID NO: 4061 - DNA, 201 bp, Homo sapiens; identical to SEQ ID NO: 4009

SEQ ID NO: 4062 - DNA, 201 bp, Homo sapiens; identical to SEQ ID NO: 3958

SEQ ID NO: 4063 - DNA, 174 bp, Homo sapiens; identical to SEQ ID NO: 3959

SEQ ID NO: 4064 - DNA, 201 bp, Homo sapiens; identical to SEQ ID NO: 3966

SEQ ID NO: 4065 - DNA, 201 bp, Homo sapiens; identical to SEQ ID NO: 3967

SEQ ID NO: 4066 - DNA, 201 bp, Homo sapiens; identical to SEQ ID NO: 3920

SEQ ID NO: 4067 - DNA, 201 bp, Homo sapiens
  misc_feature (1)...(201): n = A,T,C or G, or insertion/deletion polymorphism (see Tables 1-2)
agcagcctgaccaccctgcagcccgtccagttctcccagccgctgcacccctcctaccagcagccgctcatgccacctgtgcagagccatgtgacccaganccccttcatggccaccatggctcagctgcagagcccccacgccctctacagccacaagcccgaggtggcccagtacacccacacgggcctgctcccgcag

SEQ ID NO: 4068 - DNA, 201 bp, Homo sapiens; identical to SEQ ID NO: 3973

SEQ ID NO: 4069 - DNA, 201 bp, Homo sapiens
cttcatggccaccatggctcagctgcagagcccccacgccctctacagccacaagcccgaggtggcccagtacacccacacgggcctgctcccgcagactrtgctcatcaccgacaccaccaacctgagcgccctggccagcctcacgcccaccaagcaggtcttcacctcagacactgaggcctccagtgagtccgggct

SEQ ID NO: 4070 - DNA, 201 bp, Homo sapiens; identical to SEQ ID NO: 3926

SEQ ID NO: 4071 - DNA, 201 bp, Homo sapiens; identical to SEQ ID NO: 3925

SEQ ID NO: 4072 - DNA, 201 bp, Homo sapiens; identical to SEQ ID NO: 3928

SEQ ID NO: 4073 - DNA, 201 bp, Homo sapiens; identical to SEQ ID NO: 3930

SEQ ID NO: 4074 - DNA, 201 bp, Homo sapiens
agccccacagtgtcctccagcagcctggtgctgtaccagagctcagactccagcaatggccagagccacctgctgccatccaaccacagcgtcatcgagaycttcatctccacccagatggcctcttcctcccagtaaccacggcacctgggccctggggcctgtactgcctgcttggggggtgatgagggcagcagccag

SEQ ID NO: 4075 - DNA, 201 bp, Homo sapiens; identical to SEQ ID NO: 3944

SEQ ID NO: 4076 - DNA, 201 bp, Homo sapiens
gggcagcagcctgaccaccctgcagcccgtccagttctcccagccgctgcacccctcctaccagcagccgctcatgccacctgtgcagagccatgtgaccyagagccccttcatggccaccatggctcagctgcagagcccccacgccctctacagccacaagcccgaggtggcccagtacacccacacgggcctgctccc

SEQ ID NO: 4077 - DNA, 201 bp, Homo sapiens; identical to SEQ ID NO: 3946

SEQ ID NO: 4078 - DNA, 201 bp, Homo sapiens; identical to SEQ ID NO: 3947

SEQ ID NO: 4079 - DNA, 201 bp, Homo sapiens
cagagccccttcatggccaccatggctcagctgcagagcccccacgccctctacagccacaagcccgaggtggcccagtacacccacacgggcctgctccygcagactatgctcatcaccgacaccaccaacctgagcgccctggccagcctcacgcccaccaagcaggtcttcacctcagacactgaggcctccagtgag

SEQ ID NO: 4080 - DNA, 201 bp, Homo sapiens; identical to SEQ ID NO: 4001

SEQ ID NO: 4081 - DNA, 201 bp, Homo sapiens; identical to SEQ ID NO: 3950

SEQ ID NO: 4082 - DNA, 201 bp, Homo sapiens; identical to SEQ ID NO: 3951

SEQ ID NO: 4083 - DNA, 201 bp, Homo sapiens; identical to SEQ ID NO: 3954

SEQ ID NO: 4084 - DNA, 201 bp, Homo sapiens; identical to SEQ ID NO: 3955

SEQ ID NO: 4085 - DNA, 201 bp, Homo sapiens; identical to SEQ ID NO: 3956

SEQ ID NO: 4086 - DNA, 201 bp, Homo sapiens; identical to SEQ ID NO: 3957

SEQ ID NO: 4087 - DNA, 201 bp, Homo sapiens; identical to SEQ ID NO: 3960

SEQ ID NO: 4088 - DNA, 201 bp, Homo sapiens; identical to SEQ ID NO: 3961

SEQ ID NO: 4089 - DNA, 201 bp, Homo sapiens; identical to SEQ ID NO: 3962

SEQ ID NO: 4090 - DNA, 201 bp, Homo sapiens; identical to SEQ ID NO: 3963

SEQ ID NO: 4091 - DNA, 201 bp, Homo sapiens; identical to SEQ ID NO: 3964

SEQ ID NO: 4092 - DNA, 201 bp, Homo sapiens; identical to SEQ ID NO: 3965

SEQ ID NO: 4093 - DNA, 144 bp, Homo sapiens
acaatcctttgcggtggttcaagatggcggcgcccagtggcacwgtgagcgattcggaaagtagtaacagcagtagcgatgcggaggagctggagcggtgccgcgaggcggcaatgccggcttggggcttggagcaacgcccgc

SEQ ID NO: 4094 - DNA, 201 bp, Homo sapiens
ttcggaaagtagtaacagcagtagcgatgcggaggagctggagcggtgccgcgaggcggcaatgccggcttggggcttggagcaacgcccgcacgtggcarggaagccaagagccggtgctgcaaatagccagttgtcaacctcccaaccgagcctcaggcataaggtgaatgagcatgaacaagatggcaacgagcttca

SEQ ID NO: 4095 - DNA, 201 bp, Homo sapiens
ctggtgtgagaaacagtttttagaaaatgagagaagggatccccaagaggccaaggcccagagaaacttttgttcttctctccttagcccacatagacttmacagaatcgtctgagaaaggagagctttttcacccctggctttctagaattttctttgtctgcatttgtgaatataccacacatgatggtgtctctgagc

SEQ ID NO: 4096 - DNA, 201 bp, Homo sapiens
aaagctaaggtacagaaagtcgctttggaggatgatggtttccgccttttcttcacatctgtccctggaggccgtgagaaggaagagtctccccaaccccsccgaaagcgacagccctccagctccagtgaggacagtgacgaggagtggcggcggtgccgggaggcagctgtgtcggcgtccgacatcctacaggagtca

SEQ ID NO: 4097 - DNA, 201 bp, Homo sapiens
aaagaaaaagaaaagaagtagaagctcatggccagggatggtggctcacacctgtaatcccagcactttgggaggccgaggcaggtggatcacttgagccragttccagaccagcctaggcaacatggtgaaacctcgtctctataaaaaaaagaatacaaaaattagttgggcatggtagtgagcgcctgtgaggctgct

SEQ ID NO: 4098 - DNA, 112 bp, Homo sapiens
aagccaggagagccctgcctgccttccctgttagcttcggcctccctgggctcaggcgttagagccccaggctctggcacagagtagccacccaggaaatkcctgtgtgagt

SEQ ID NO: 4099 - DNA, 201 bp, Homo sapiens
agcgacagccctccagctccagtgaggacagtgacgaggagtggcggcggtgccgggaggcagctgtgtcggcgtccgacatcctacaggagtcagccatycacagccctggaacagtggagaaggaggcaaagaagaaaaggaagttgaaaaagaaagccaagaaggtggccagtgtcgactcggctgtcgctgccacca

SEQ ID NO: 4100 - DNA, 201 bp, Homo sapiens
aaaagaaagccaagaaggtggccagtgtcgactcggctgtcgctgccaccacccccaccagcatggccacagtccagaagcagaagtcaggtgagctcaayggggaccaggtgtcgcttgggaccaaaaagaagaaaaaggcaaagaaggccagcgagacctctccattcccaccagcaaagagtgctacagctatacctg

SEQ ID NO: 4101 - DNA, 201 bp, Homo sapiens
gctatacctgcaaactgaacccagccatgggcacagggctcagccagctccaaggacaaggtgtcccccccaccctggggacaaggcatttccaagccccmcctccctctccaagttcaaggactgggctggcaaacccagactgcccatgagaccctgatggtgatgaaggcttgctcgagagttgggccaaaaaagccc

SEQ ID NO: 4102 - DNA, 201 bp, Homo sapiens
ccttagcctggtgtgagaaacagtttttagaaaatgagagaagggatccccaagaggccaaggcccagagaaacttttgttcttctctccttagcccacawagacttcacagaatcgtctgagaaaggagagctttttcacccctggctttctagaattttctttgtctgcatttgtgaatataccacacatgatggtgtc

SEQ ID NO: 4103 - DNA, 201 bp, Homo sapiens
gctccagtgaggacagtgacgaggagtggcggcggtgccgggaggcagctgtgtcggcgtccgacatcctacaggagtcagccatccacagccctggaacwgtggagaaggaggcaaagaagaaaaggaagttgaaaaagaaagccaagaaggtggccagtgtcgactcggctgtcgctgccaccacccccaccagcatgg

SEQ ID NO: 4104 - DNA, 201 bp, Homo sapiens
agaaaatgagagaagggatccccaagaggccaaggcccagagaaacttttgttcttctctccttagcccacatagacttcacagaatcgtctgagaaaggrgagctttttcacccctggctttctagaattttctttgtctgcatttgtgaatataccacacatgatggtgtctctgagccgaccagattatggaaactca

SEQ ID NO: 4105 - DNA, 201 bp, Homo sapiens
tgcacagcttgcagattcccctcaggcgagagacagaggttaagggtagatggcagatgacctaagtggcttgttttaggaggccactcccagggccacasctttcatgtgtttgccaccagggtagaaggtctgctgacaagggcaatgactactaacagccccagctgcatggaacagaaagggcatatgctgtggcca

SEQ ID NO: 4106 - DNA, 201 bp, Homo sapiens
ttaggaggccactcccagggccacagctttcatgtgtttgccaccagggtagaaggtctgctgacaagggcaatgactactaacagccccagctgcatggmacagaaagggcatatgctgtggccaccaggctcaggctctatccctcagcagctttgggatcccatgcagctcacctattttctgtgctctagcatcatc

SEQ ID NO: 4107 - DNA, 201 bp, Homo sapiens
tggcggcactggggagtagagcagagtttatactggtcccagcgggctccacagtatgaacactctggggaggaaggaaaagccatcattataaacacatrcattcacacacacgtggacaggcattgctccctttgctgactagaatctcgtagatcctgtggaacccggggaaggtttccaaatagtaagtcttctgtc

SEQ ID NO: 4108 - DNA, 201 bp, Homo sapiens
ctacctcccaacccccttgttaagtggtcttttcctctttgattgttcccttttccaggggggacaacacacctaaatacaggcgataacccacctacagkgaacatgcgcagtccacacccctctccccgaggcctgtgtctctcctgctgttgctagggcacttgaccatctgattcctaaaactcacaccatcttctt

SEQ ID NO: 4109 - DNA, 201 bp, Homo sapiens
tggtggaaatgaaaattgacaaccagagccagcccctgggcaacaaagtggaaatggagattgtgagcatgttggaaaaaaacgcaacacttctcaaattyggctaccactttacccagcaaggaccccggcttcgggcatccaacgcaatgatgaacaacaatgaccttgtgaggaagaggaggcttgcggacctgactg

SEQ ID NO: 4110 - DNA, 201 bp, Homo sapiens
tgcagctgcattctgcatcgctgaaaactgcaatataatattaaatctgttggtctatgcatggctgcgtatgtgtttcttggaacctgtgtgacagggayatgtgcctggcacactggccagaagactgggcagccaccatggcagtgctggatgacctcagtaagaatgtgtcatgtattccaggtgctgatctaaaaa

SEQ ID NO: 4111 - DNA, 201 bp, Homo sapiens
tgaaagtttctctctctcaccagctattccaaagctggccaactacctcccaacccccttgttaagtggtcttttcctctttgattgttcccttttccagkggggacaacacacctaaatacaggcgataacccacctacagtgaacatgcgcagtccacacccctctccccgaggcctgtgtctctcctgctgttgctag

SEQ ID NO: 4112 - DNA, 201 bp, Homo sapiens
cagaacacaattttcccctcagaacagatagacagactgaagccactgaactctgccaggagtcaacatgagattccttttgctggatatgcagaaatgayaggaaaaaaaccaatggtgaaatttcaagtttcaaaaaccaacctttcattaccaatcccaggcaacaaacatgtccctgagtgttctttaagaacattt

SEQ ID NO: 4113 - DNA, 201 bp, Homo sapiens
cccagtttcaatggccttgctgtgtggtgtttcaagtgcatttaaaatgtgtgacacagaaacggcacactcttccacatgcttttgaagtattataaaamactttattacaaatttgtcttagctattagcaaataaaactgattatcattctttattaaccctccttggaattttgaaaacctcgattaaagttgccaa

SEQ ID NO: 4114 - DNA, 201 bp, Homo sapiens; identical to SEQ ID NO: 4105

SEQ ID NO: 4115 - DNA, 201 bp, Homo sapiens; identical to SEQ ID NO: 4106

SEQ ID NO: 4116 - DNA, 201 bp, Homo sapiens; identical to SEQ ID NO: 4107

SEQ ID NO: 4117 - DNA, 201 bp, Homo sapiens; identical to SEQ ID NO: 4108

SEQ ID NO: 4118 - DNA, 201 bp, Homo sapiens; identical to SEQ ID NO: 4109

SEQ ID NO: 4119 - DNA, 201 bp, Homo sapiens; identical to SEQ ID NO: 4110

SEQ ID NO: 4120 - DNA, 201 bp, Homo sapiens
gagcaccgcggcctccgcccgcgtccatctgcccgccgcccgcgcctgttccgcagcccgcgtccgcgccggccccacagctctgcgtccgggtattactmagcacagaaattcaggagacacagacaagttcttccacgatgtcgtacagacgagaactagagaaataccgtgacctggatgaagatgaaatccttggag

SEQ ID NO: 4121 - DNA, 201 bp, Homo sapiens; identical to SEQ ID NO: 4111

SEQ ID NO: 4122 - DNA, 201 bp, Homo sapiens; identical to SEQ ID NO: 4112

SEQ ID NO: 4123 - DNA, 201 bp, Homo sapiens; identical to SEQ ID NO: 4113

SEQ ID NO: 4124 - DNA, 201 bp, Homo sapiens; identical to SEQ ID NO: 4105

SEQ ID NO: 4125 - DNA, 201 bp, Homo sapiens; identical to SEQ ID NO: 4106

SEQ ID NO: 4126 - DNA, 201 bp, Homo sapiens; identical to SEQ ID NO: 4107

SEQ ID NO: 4127 - DNA, 201 bp, Homo sapiens; identical to SEQ ID NO: 4108

SEQ ID NO: 4128 - DNA, 201 bp, Homo sapiens; identical to SEQ ID NO: 4109

SEQ ID NO: 4129 - DNA, 201 bp, Homo sapiens; identical to SEQ ID NO: 4110

SEQ ID NO: 4130 - DNA, 109 bp, Homo sapiens
gtattactmagcacagaaattcaggagacacagacaagttcttccacgatgtcgtacagacgagaactagagaaataccgtgacctggatgaagatgaaatccttggag

SEQ ID NO: 4131 - DNA, 201 bp, Homo sapiens; identical to SEQ ID NO: 4111

SEQ ID NO: 4132 - DNA, 201 bp, Homo sapiens; identical to SEQ ID NO: 4112

SEQ ID NO: 4133 - DNA, 201 bp, Homo sapiens; identical to SEQ ID NO: 4113

SEQ ID NO: 4134 - DNA, 201 bp, Homo sapiens
aactcgctgttcggaagcgtagagacgtggccttggcaggtcctaagcaaaggggacaaggaagaagttgcctatgaagaaagggcctgtgaaggcggcamatttgccacagtagaagtgacagataagcctgtggatgaggctctacgggaagcaatgcccaaggtcgcaaagtatgcggggggcaccaatgacaaggga

SEQ ID NO: 4135 - DNA, 201 bp, Homo sapiens
catgaagccctacggacggcgcaatgagatctggctgttgaagacatgagtgacccactgaaccaagaacttactggaagtgtgcctctgtgtctccttcytcgggggaaataatacagccaagatatgcagcatccttctcattgatgtagaaaattctgcgatagaccagaaaaatcctggcagcttttctccaggcat

SEQ ID NO: 4136 - DNA, 201 bp, Homo sapiens
gtctgcgtgctgccctggagggcacagccacctaccggggggacatctacttctgcacgggttatgaccctcccatgaagccctacggacggcgcaatgasatctggctgttgaagacatgagtgacccactgaaccaagaacttactggaagtgtgcctctgtgtctccttcctcgggggaaataatacagccaagatat

SEQ ID NO: 4137 - DNA, 201 bp, Homo sapiens; identical to SEQ ID NO: 4134

SEQ ID NO: 4138 - DNA, 201 bp, Homo sapiens
catgaagccctacggacggcgcaatgagatctggctgttgaagacatgagtgacccactgaaccaagaacttactggaagtgtgcctctgtgtctccttcytcgggggtaaggaggggacagtgcttcccaagttccagctgcaagtccaacttaaccaactttccttcaaagtcagttactgccaattttctgaaaaaag

SEQ ID NO: 4139 - DNA, 201 bp, Homo sapiens
gtctgcgtgctgccctggagggcacagccacctaccggggggacatctacttctgcacgggttatgaccctcccatgaagccctacggacggcgcaatgasatctggctgttgaagacatgagtgacccactgaaccaagaacttactggaagtgtgcctctgtgtctccttcctcgggggtaaggaggggacagtgcttc

SEQ ID NO: 4140 - DNA, 201 bp, Homo sapiens
gttccagctgcaagtccaacttaaccaactttccttcaaagtcagttactgccaattttctgaaaaaagcatgttccatatactaagtctcttttctcacrgtaggaaataatacagccaagatatgcagcatccttctcattgatgtagaaaattctgcgatagaccagaaaaatcctggcagcttttctccaggcatct

SEQ ID NO: 4141 - DNA, 201 bp, Homo sapiens
gaaagtcaaaccatcactgccatgtatctgcatatgaaaaatcttttcctattaaacctgttccaagtccatcttggagtggttcatgtcgtcgaagtctyttgagccccaagaaaactcagaggcgacatgttagtacagcagaagagacagttcaagaagaagaaagagagatttacagacagctgctacagatggtca

SEQ ID NO: 4142 - DNA, 201 bp, Homo sapiens
ccattacacgcaaagatattcaaactctaaaccatctgaattggctcaatgatgagatcatcaatttctacatgaatatgctgatggagcgaagtaaagaraagggcttgccaagtgtgcatgcatttaatacctttttcttcactaaattaaaaacggctggttatcaggcagtgaaacgttggacaaagaaagtagatg

SEQ ID NO: 4143 - DNA, 201 bp, Homo sapiens
tagatgtattttctgttgacattcttttggtgcccattcacctgggagtacactggtgtctagctgttgtggactttagaaagaagaatattacctattaygactccatgggtgggataaacaatgaagcctgcagaatactcttgcaatacctaaagcaagaaagcattgacaagaaaaggaaagagtttgacaccaatg

SEQ ID NO: 4144 - DNA, 201 bp, Homo sapiens
tggctctgatacttcatcatctggatctgccagcattttaactaaccaggaacagctgtcccacagtgtatattccctatcttcttataccccagatgttrcatttggatccaaagattctggtactcttcatcatccccatcatcaccactctgttccacatcagccagataacttagcagcttcaaatacacaatctga

SEQ ID NO: 4145 - DNA, 201 bp, Homo sapiens
agcaagaaagcattgacaagaaaaggaaagagtttgacaccaatggctggcagcttttcagcaagaaaagccagattcctcagcagatgaatggaagtgaytgtgggatgtttgcctgcaaatatgctgactgtattaccaaagacagaccaatcaacttcacacagcaacacatgccatacttccggaagcggatggtct

SEQ ID NO: 4146 - DNA, 201 bp, Homo sapiens
aacagctgtcccacagtgtatattccctatcttcttataccccagatgttgcatttggatccaaagattctggtactcttcatcatccccatcatcaccaytctgttccacatcagccagataacttagcagcttcaaatacacaatctgaaggatcagactctgtgattttactgaaagtgaaagattcccagactccaa

SEQ ID NO: 4147 - DNA, 201 bp, Homo sapiens
atctagtttggtctgtggctagtttaaatatgtttctaaccacagagaatttcatatatatatacatatatatatacacatacatatatatatatatatatgtatgtataaaatttcacagggatatgcttttttttttaaagactgaatgtgttcaccatttagcctgtagatttatttccattttccaaattccagcac

SEQ ID NO: 4148 - DNA, 201 bp, Homo sapiens
gatctagtttggtctgtggctagtttaaatatgtttctaaccacagagaatttcatatatatatacatatatatatacacatacatatatatatatatatatgtatgtataaaatttcacagggatatgcttttttttttaaagactgaatgtgttcaccatttagcctgtagatttatttccattttccaaattccagca

SEQ ID NO: 4149 - DNA, 201 bp, Homo sapiens
gtatttagcataaaattccagcgctggatgaatgcagatctagtttggtctgtggctagtttaaatatgtttctaaccacagagaatttcatatatatatmcatatatatatacacatacatatatatatatatatatgtatgtataaaatttcacagggatatgcttttttttttaaagactgaatgtgttcaccattta

SEQ ID NO: 4150 - DNA, 201 bp, Homo sapiens; identical to SEQ ID NO: 4141

SEQ ID NO: 4151 - DNA, 201 bp, Homo sapiens; identical to SEQ ID NO: 4142

SEQ ID NO: 4152 - DNA, 201 bp, Homo sapiens
gagatgtgatatcgctagtgccaccatcagaaagaaacgtctggaccctcctgctcaggttatgaaaatccccttaactgccacaatttgcttacctggcwcatcgcctcctggactttgtatctttgctaaagtcagtgatgtgaaaagacttgaaatggatgatattgctgataggatgaggatggatgctggagaagt

SEQ ID NO: 4153 - DNA, 201 bp, Homo sapiens; identical to SEQ ID NO: 4143

SEQ ID NO: 4154 - DNA, 201 bp, Homo sapiens; identical to SEQ ID NO: 4144

SEQ ID NO: 4155 - DNA, 201 bp, Homo sapiens
agaccgtctccctgccgttacagcaggccccatcccagcgcccagccgtacttggggaaaggccggttgcgattccggggctttcccgccagagctgggtsttctctggggagagctgttttcaccgggaagctcggctttctgtggtaccggcttcatctcccgccttccttgagacccgagtgatatttcttgactact

SEQ ID NO: 4156 - DNA, 201 bp, Homo sapiens; identical to SEQ ID NO: 4145

SEQ ID NO: 4157 - DNA, 201 bp, Homo sapiens; identical to SEQ ID NO: 4146

SEQ ID NO: 4158 - DNA, 201 bp, Homo sapiens
cttggggaaaggccggttgcgattccggggctttcccgccagagctgggtcttctctggggagagctgttttcaccgggaagctcggctttctgtggtacyggcttcatctcccgccttccttgagacccgagtgatatttcttgactacttctgcgtctcacgtaaacatttctccaactctcctactctgtggtatctc

SEQ ID NO: 4159 - DNA, 201 bp, Homo sapiens; identical to SEQ ID NO: 4147

SEQ ID NO: 4160 - DNA, 201 bp, Homo sapiens; identical to SEQ ID NO: 4148

SEQ ID NO: 4161 - DNA, 201 bp, Homo sapiens; identical to SEQ ID NO: 4149

SEQ ID NO: 4162 - DNA, 201 bp, Homo sapiens; identical to SEQ ID NO: 4141

SEQ ID NO: 4163 - DNA, 201 bp, Homo sapiens; identical to SEQ ID NO: 4142

SEQ ID NO: 4164 - DNA, 201 bp, Homo sapiens; identical to SEQ ID NO: 4152

SEQ ID NO: 4165 - DNA, 201 bp, Homo sapiens; identical to SEQ ID NO: 4143

SEQ ID NO: 4166 - DNA, 201 bp, Homo sapiens; identical to SEQ ID NO: 4144

SEQ ID NO: 4167 - DNA, 201 bp, Homo sapiens; identical to SEQ ID NO: 4155

SEQ ID NO: 4168 - DNA, 201 bp, Homo sapiens
aagaaagcattgacaagaaaaggaaagagtttgacaccaatggctggcagcttttcagcaagaaaagccaggagattcctcagcagatgaatggaagtgaytgtgggatgtttgcctgcaaatatgctgactgtattaccaaagacagaccaatcaacttcacacagcaacacatgccatacttccggaagcggatggtct

SEQ ID NO: 4169 - DNA, 201 bp, Homo sapiens; identical to SEQ ID NO: 4146

SEQ ID NO: 4170 - DNA, 201 bp, Homo sapiens; identical to SEQ ID NO: 4158

SEQ ID NO: 4171 - DNA, 201 bp, Homo sapiens; identical to SEQ ID NO: 4142

SEQ ID NO: 4172 - DNA, 201 bp, Homo sapiens; identical to SEQ ID NO: 4143

SEQ ID NO: 4173 - DNA, 201 bp, Homo sapiens; identical to SEQ ID NO: 4145

SEQ ID NO: 4174 - DNA, 201 bp, Homo sapiens; identical to SEQ ID NO: 4144

SEQ ID NO: 4175 - DNA, 201 bp, Homo sapiens; identical to SEQ ID NO: 4146

SEQ ID NO: 4176 - DNA, 201 bp, Homo sapiens; identical to SEQ ID NO: 4141

SEQ ID NO: 4177 - DNA, 201 bp, Homo sapiens
tctttgtccatgagggttatcaaggcctggtggatggtggagatcacatcaaggaagccacctgggagagcgtttcgatgatgcttcagctgggaggcacrgtgattggaagtgcccggtgcaaggactttcgggaacgagaaggacgactccgagctgcctacaacctggtgaagcgtgggatcaccaatctctgtgtca

SEQ ID NO: 4178 - DNA, 201 bp, Homo sapiens
gaagccacctgggagagcgtttcgatgatgcttcagctgggaggcacggtgattggaagtgcccggtgcaaggactttcgggaacgagaaggacgactccragctgcctacaacctggtgaagcgtgggatcaccaatctctgtgtcattgggggtgatggcagcctcactggggctgacaccttccgttctgagtggagt

SEQ ID NO: 4179 - DNA, 201 bp, Homo sapiens
tggagatcacatcaaggaagccacctgggagagcgtttcgatgatgcttcagctgggaggcacggtgattggaagtgcccggtgcaaggactttcgggaaygagaaggacgactccgagctgcctacaacctggtgaagcgtgggatcaccaatctctgtgtcattgggggtgatggcagcctcactggggctgacacctt

SEQ ID NO: 4180 - DNA, 201 bp, Homo sapiens
tgaggcccatcctcaaaatcctagccaagtacgagattgacttggacacttcagaccatgcccacctggagcacatcacccggaagcggtccggggaagckgccgtctaaacctctctggagtgaggggaatagattacctgatcatggtcagctcacaccctaataagtccacatcttctcagtgttttagctgtttttt

SEQ ID NO: 4181 - DNA, 201 bp, Homo sapiens
tgttttagctgtttttttcattaggtttccttttattctgtaccttgcagccatgaccagttctggccaggagctggaggagcaggcagtgggtgggagcyccttttaggtagaatttaacatgacttctgccccagctttatctgtcacacaaggctgggcacctctagtgctactgctagatatcacttactcagttag

SEQ ID NO: 4182 - DNA, 201 bp, Homo sapiens
ggagcaggcagtgggtgggagctccttttaggtagaatttaacatgacttctgccccagctttatctgtcacacaaggctgggcacctctagtgctactgmtagatatcacttactcagttagaattttcctaaaaataagctttatttatttctttgtgataacaaagagtcttggttcctctactacttttactacagt

SEQ ID NO: 4183 - DNA, 201 bp, Homo sapiens
aggtagaatttaacatgacttctgccccagctttatctgtcacacaaggctgggcacctctagtgctactgctagatatcacttactcagttagaattttyctaaaaataagctttatttatttctttgtgataacaaagagtcttggttcctctactacttttactacagtgacaaattgtaactacactaataaatgcc

SEQ ID NO: 4184 - DNA, 176 bp, Homo sapiens
tcacacaaggctgggcacctctagtgctactgctagatatcacttactcagttagaattttcctaaaaataagctttatttatttctttgtgataacaaaragtcttggttcctctactacttttactacagtgacaaattgtaactacactaataaatgccaactggtcactgtg

SEQ ID NO: 4185 - DNA, 201 bp, Homo sapiens
tccagaaagcaggtaagatcacagatgaggaggctacgaagtccagctacctgaacattgtgggcctggttgggtcaattgacaatgacttctgtggcacygatatgaccattggcactgactctgccctgcatcggatcatggaaattgtagatgccatcactaccactgcccagagccaccagaggacatttgtgttag

SEQ ID NO: 4186 - DNA, 201 bp, Homo sapiens
ggtgggagcccaaccccatttgataggaattttgccactaagatgggcgccaaggctatgaactggatgtctgggaaaatcaaagagagttaccgtaatgrgcggatctttgccaatactccagattcgggctgtgttctggggatgcgtaagagggctctggtcttccaaccagtggctgagctgaaggaccagacagat

SEQ ID NO: 4187 - DNA, 201 bp, Homo sapiens
gctgtgcgcctgcccctcatggaatgtgtccaggtgaccaaagatgtgaccaaggccatggatgagaagaaatttgacgaagccctgaagctgagaggccrgagcttcatgaacaactgggaggtgtacaagcttctagctcatgtcagacccccggtatctaagagtggttcgcacacagtggctgtgatgaacgtgggg

SEQ ID NO: 4188 - DNA, 201 bp, Homo sapiens
cagcagggtgggagcccaaccccatttgataggaattttgccactaagatgggcgccaaggctatgaactggatgtctgggaaaatcaaagagagttaccrtaatgggcggatctttgccaatactccagattcgggctgtgttctggggatgcgtaagagggctctggtcttccaaccagtggctgagctgaaggaccag

SEQ ID NO: 4189 - DNA, 182 bp, Homo sapiens
gagaaacgaggcatagatccagagatcacgttagggtacaccaagaaagagacggttcaagggaattaccaggaggcgatgwgccagagtggatcatgacccatgaagagcaccatgcagccaaaaccctggggattggcaaagccattgctgtcttaacctctggtggagatgcccaaggt

SEQ ID NO: 4190 - DNA, 201 bp, Homo sapiens; identical to SEQ ID NO: 4177

SEQ ID NO: 4191 - DNA, 201 bp, Homo sapiens; identical to SEQ ID NO: 4178

SEQ ID NO: 4192 - DNA, 201 bp, Homo sapiens; identical to SEQ ID NO: 4179

SEQ ID NO: 4193 - DNA, 201 bp, Homo sapiens; identical to SEQ ID NO: 4180

SEQ ID NO: 4194 - DNA, 201 bp, Homo sapiens; identical to SEQ ID NO: 4181

SEQ ID NO: 4195 - DNA, 201 bp, Homo sapiens; identical to SEQ ID NO: 4182

SEQ ID NO: 4196 - DNA, 201 bp, Homo sapiens; identical to SEQ ID NO: 4183

SEQ ID NO: 4197 - DNA, 176 bp, Homo sapiens; identical to SEQ ID NO: 4184

SEQ ID NO: 4198 - DNA, 116 bp, Homo sapiens
gagaaacgaggcatakatccagagatcacgttagggtacaccaagaaagagacggttcaagggaattaccaggaggcgatgagccagagtggatcatgacccatgaagagcaccat

SEQ ID NO: 4199 - DNA, 201 bp, Homo sapiens; identical to SEQ ID NO: 4185

SEQ ID NO: 4200 - DNA, 201 bp, Homo sapiens; identical to SEQ ID NO: 4186

SEQ ID NO: 4201 - DNA, 201 bp, Homo sapiens; identical to SEQ ID NO: 4187

SEQ ID NO: 4202 - DNA, 201 bp, Homo sapiens; identical to SEQ ID NO: 4188

SEQ ID NO: 4203 - DNA, 182 bp, Homo sapiens; identical to SEQ ID NO: 4189

SEQ ID NO: 4204 - DNA, 201 bp, Homo sapiens; identical to SEQ ID NO: 4177

SEQ ID NO: 4205 - DNA, 201 bp, Homo sapiens; identical to SEQ ID NO: 4178

SEQ ID NO: 4206 - DNA, 201 bp, Homo sapiens; identical to SEQ ID NO: 4179

SEQ ID NO: 4207 - DNA, 201 bp, Homo sapiens; identical to SEQ ID NO: 4180

SEQ ID NO: 4208 - DNA, 201 bp, Homo sapiens; identical to SEQ ID NO: 4181

SEQ ID NO: 4209 - DNA, 201 bp, Homo sapiens; identical to SEQ ID NO: 4182

SEQ ID NO: 4210 - DNA, 201 bp, Homo sapiens; identical to SEQ ID NO: 4183

SEQ ID NO: 4211 - DNA, 176 bp, Homo sapiens; identical to SEQ ID NO: 4184

SEQ ID NO: 4212 - DNA, 116 bp, Homo sapiens; identical to SEQ ID NO: 4198

SEQ ID NO: 4213 - DNA, 201 bp, Homo sapiens; identical to SEQ ID NO: 4185

SEQ ID NO: 4214 - DNA, 201 bp, Homo sapiens; identical to SEQ ID NO: 4186

SEQ ID NO: 4215 - DNA, 201 bp, Homo sapiens; identical to SEQ ID NO: 4187

SEQ ID NO: 4216 - DNA, 201 bp, Homo sapiens; identical to SEQ ID NO: 4188

SEQ ID NO: 4217 - DNA, 201 bp, Homo sapiens; identical to SEQ ID NO: 4177

SEQ ID NO: 4218 - DNA, 201 bp, Homo sapiens; identical to SEQ ID NO: 4178

SEQ ID NO: 4219 - DNA, 201 bp, Homo sapiens; identical to SEQ ID NO: 4179

SEQ ID NO: 4220 - DNA, 130 bp, Homo sapiens
gggaagcctctcctccttccccctccctckttgcctccacctggctcctccccatgttcgtccatcacccctcccccctttcccaaggacaatctgcaagaaagcagcggcggaggagagctaagactaa

SEQ ID NO: 4221 - DNA, 201 bp, Homo sapiens; identical to SEQ ID NO: 4180

SEQ ID NO: 4222 - DNA, 201 bp, Homo sapiens; identical to SEQ ID NO: 4181

SEQ ID NO: 4223 - DNA, 201 bp, Homo sapiens; identical to SEQ ID NO: 4182

SEQ ID NO: 4224 - DNA, 201 bp, Homo sapiens; identical to SEQ ID NO: 4183

SEQ ID NO: 4225 - DNA, 176 bp, Homo sapiens; identical to SEQ ID NO: 4184

SEQ ID NO: 4226 - DNA, 201 bp, Homo sapiens; identical to SEQ ID NO: 4185

SEQ ID NO: 4227 - DNA, 201 bp, Homo sapiens; identical to SEQ ID NO: 4186

SEQ ID NO: 4228 - DNA, 201 bp, Homo sapiens; identical to SEQ ID NO: 4187

SEQ ID NO: 4229 - DNA, 201 bp, Homo sapiens; identical to SEQ ID NO: 4188

SEQ ID NO: 4230 - DNA, 201 bp, Homo sapiens; identical to SEQ ID NO: 4177

SEQ ID NO: 4231 - DNA, 201 bp, Homo sapiens; identical to SEQ ID NO: 4178

SEQ ID NO: 4232 - DNA, 201 bp, Homo sapiens; identical to SEQ ID NO: 4179

SEQ ID NO: 4233 - DNA, 201 bp, Homo sapiens; identical to SEQ ID NO: 4180

SEQ ID NO: 4234 - DNA, 201 bp, Homo sapiens; identical to SEQ ID NO: 4181

SEQ ID NO: 4235 - DNA, 201 bp, Homo sapiens; identical to SEQ ID NO: 4182

SEQ ID NO: 4236 - DNA, 201 bp, Homo sapiens; identical to SEQ ID NO: 4183

SEQ ID NO: 4237 - DNA, 176 bp, Homo sapiens; identical to SEQ ID NO: 4184

SEQ ID NO: 4238 - DNA, 201 bp, Homo sapiens; identical to SEQ ID NO: 4185

SEQ ID NO: 4239 - DNA, 201 bp, Homo sapiens; identical to SEQ ID NO: 4186

SEQ ID NO: 4240 - DNA, 201 bp, Homo sapiens; identical to SEQ ID NO: 4187

SEQ ID NO: 4241 - DNA, 201 bp, Homo sapiens; identical to SEQ ID NO: 4188

SEQ ID NO: 4242 - DNA, 189 bp, Homo sapiens
aggaagctgtgcagcatgctcctcgtccatgtgtgtcggcagtgctggtgtctgtcgtctccgcgagctgttactggaatgagcccttgtgttcatgggtrtcgtcatgcggggttcttgtgttttgtggggcttgggttttggtaacttatttttataagcaataaaccttttgtatcctggataagg

SEQ ID NO: 4243 - DNA, 189 bp, Homo sapiens; identical to SEQ ID NO: 4242

SEQ ID NO: 4244 - DNA, 189 bp, Homo sapiens; identical to SEQ ID NO: 4242

SEQ ID NO: 4245 - DNA, 187 bp, Homo sapiens
aggaagctgtgcagcatgctcctcgtccatgtgtgtcggcagtgctggtgtctgtcgtctccgcgagctgttactggaatgagcccttgtgttcatgggtrtcgtcatgcggggttcttgtgttttgtggggcttgggttttggtaacttatttttataagcaataaaccttttgtatcctggataa

SEQ ID NO: 4246 - DNA, 201 bp, Homo sapiens
cttctcttcagaactatctcgtgactttaccagattgtttgtttgggaaattttgcactctacaattcgtaagatgaacaaacatgtcctgaagatccagmaagagctggaagaagctaaagagaaacttgctaggcaacacaaacggcgaagtgatgatgacgacagaagcagtgacaggaaagacggggttcttgagga

SEQ ID NO: 4247 - DNA, 201 bp, Homo sapiens
cgtagcccactgagcttcctcacgccggctgtcgcagcgcctagccccacccggcggcctctcctgcgcttccggggccgtggcgagctagtgcgcctgcstgccggcccatccgcgcgccttgcagctgtccttgcgtcggccagcggccagacagttcctgcagcgcttaccgcctggcctctcggttccgcggcgcac

SEQ ID NO: 4248 - DNA, 201 bp, Homo sapiens
tgagcacatacccgccagtcctgatcctttctaaggtctctcttccctgcactgtctccgcctagcaattgtcactgctcaccgccctcgagcctattccmccgccgcgtatttgggtagaaaagctcgctcgtgacgtcaccaagctccggaagtctcctggcgtcggcgcaagggccgccgggaaaaccattgagaggc

SEQ ID NO: 4249 - DNA, 201 bp, Homo sapiens
aaaattgaactaggaattgagttttgaagaaataaaggtgtaagagcaaacattcaacagttgctgtccccagtaatgaagttcatacagacaaaagatgkcatgtcactgtacatcataccttgcaataaatattctgttaaattgtgctggtgcaatttaacatgcttttgtcaaagtaaacatactgttttcctaatt

SEQ ID NO: 4250 - DNA, 201 bp, Homo sapiens
tagatattgttcctcctaccttctcagctctgtgtcctgcaaacccaacctgcatttacaagtatggagatgaaagtagcaattctcttcctggacattcygttgccctctgtttagctgttgcctttaaaagtaaggcaaccaatgatgaaatcttcagcattctgaaagatgtaccaaatcctaaccaggatgatgacg

SEQ ID NO: 4251 - DNA, 201 bp, Homo sapiens
gggaaaccattgagaagccccggaggaccggcctgagcggaggcggagactagagcggccgccggcacgacccgccttcaggcgtacgacgaccgcggccsgggggctctgagtggccaaagcggcggcactttctgcgtggccccggaaggacatagagcggaaggcgggagaaagaagtagccggcaggcggaggcagc

SEQ ID NO: 4252 - DNA, 201 bp, Homo sapiens
ctcacgccggctgtcgcagcgcctagccccacccggcggcctctcctgcgcttccggggccgtggcgagctagtgcgcctgcgtgccggcccatccgcgcrccttgcagctgtccttgcgtcggccagcggccagacagttcctgcagcgcttaccgcctggcctctcggttccgcggcgcaccggagggcagcatgtcgc

SEQ ID NO: 4253 - DNA, 201 bp, Homo sapiens
tagttggactactgaatgccaggaattacaattttggtggagaatttgtagaagccatgattcgtcaacttaaagaatcattgaaagcaaacaattataaygaagccgtgtatttggtccgttttttatctgatcttgtgaattgtcatgtgattgccgccccatcaatggttgctatgtttgaaaattttgtaagcgtaa

SEQ ID NO: 4254 - DNA, 201 bp, Homo sapiens
gtcccaaaccgaagtttgtaagagaagttctagaaaaatgtatgaggttgtcttaccatcagcgtatattagatattgttcctcctaccttctcagctctrtgtcctgcaaacccaacctgcatttacaagtatggagatgaaagtagcaattctcttcctggacattctgttgccctctgtttagctgttgcctttaaaa

SEQ ID NO: 4255 - DNA, 201 bp, Homo sapiens
tctgagtggccaaagcggcggcactttctgcgtggccccggaaggacatagagcggaaggcgggagaaagaagtagccggcaggcggaggcagcccgaggrggcggttgcatgtgtgccagacgttcgtagcccactgagcttcctcacgccggctgtcgcagcgcctagccccacccggcggcctctcctgcgcttccgg

SEQ ID NO: 4256 - DNA, 201 bp, Homo sapiens
catagtggccttggtaatacatgctcattaactagtggttattatgtgccaggtgctataggttcaccctattaactacttcaaacagtcctttgagatawaactttacaataaaaacaggttttggagtaatttacccacggtccacagctagtaagtggaatttgaacctagatccagttggcccaagagctccttccc

SEQ ID NO: 4257 - DNA, 201 bp, Homo sapiens
tagtggccttggtaatacatgctcattaactagtggttattatgtgccaggtgctataggttcaccctattaactacttcaaacagtcctttgagataaawctttacaataaaaacaggttttggagtaatttacccacggtccacagctagtaagtggaatttgaacctagatccagttggcccaagagctccttccccg

SEQ ID NO: 4258 - DNA, 201 bp, Homo sapiens
gaagtctcctggcgtcggcgcaagggccgccgggaaaaccattgagaggccaccgggaaaccattgagaagccccggaggaccggcctgagcggaggcggrgactagagcggccgccggcacgacccgccttcaggcgtacgacgaccgcggcccgggggctctgagtggccaaagcggcggcactttctgcgtggccccg

SEQ ID NO: 4259 - DNA, 201 bp, Homo sapiens
agtggccttggtaatacatgctcattaactagtggttattatgtgccaggtgctataggttcaccctattaactacttcaaacagtcctttgagataaaabtttacaataaaaacaggttttggagtaatttacccacggtccacagctagtaagtggaatttgaacctagatccagttggcccaagagctccttccccgc

SEQ ID NO: 4260 - DNA, 201 bp, Homo sapiens; identical to SEQ ID NO: 4253

SEQ ID NO: 4261 - DNA, 201 bp, Homo sapiens; identical to SEQ ID NO: 4254

SEQ ID NO: 4262 - DNA, 201 bp, Homo sapiens; identical to SEQ ID NO: 4255

SEQ ID NO: 4263 - DNA, 201 bp, Homo sapiens; identical to SEQ ID NO: 4246

SEQ ID NO: 4264 - DNA, 201 bp, Homo sapiens; identical to SEQ ID NO: 4247

SEQ ID NO: 4265 - DNA, 201 bp, Homo sapiens; identical to SEQ ID NO: 4248

SEQ ID NO: 4266 - DNA, 201 bp, Homo sapiens; identical to SEQ ID NO: 4258

SEQ ID NO: 4267 - DNA, 201 bp, Homo sapiens; identical to SEQ ID NO: 4250

SEQ ID NO: 4268 - DNA, 201 bp, Homo sapiens; identical to SEQ ID NO: 4251

SEQ ID NO: 4269 - DNA, 201 bp, Homo sapiens; identical to SEQ ID NO: 4252

SEQ ID NO: 4270 - DNA, 201 bp, Homo sapiens; identical to SEQ ID NO: 4253

SEQ ID NO: 4271 - DNA, 201 bp, Homo sapiens; identical to SEQ ID NO: 4254

SEQ ID NO: 4272 - DNA, 201 bp, Homo sapiens; identical to SEQ ID NO: 4255

SEQ ID NO: 4273 - DNA, 201 bp, Homo sapiens; identical to SEQ ID NO: 4246

SEQ ID NO: 4274 - DNA, 201 bp, Homo sapiens; identical to SEQ ID NO: 4247

SEQ ID NO: 4275 - DNA, 201 bp, Homo sapiens; identical to SEQ ID NO: 4248

SEQ ID NO: 4276 - DNA, 201 bp, Homo sapiens; identical to SEQ ID NO: 4258

SEQ ID NO: 4277 - DNA, 201 bp, Homo sapiens; identical to SEQ ID NO: 4250

SEQ ID NO: 4278 - DNA, 201 bp, Homo sapiens; identical to SEQ ID NO: 4251

SEQ ID NO: 4279 - DNA, 201 bp, Homo sapiens; identical to SEQ ID NO: 4252

SEQ ID NO: 4280 - DNA, 201 bp, Homo sapiens
gctgcttagccccagacatcaggaaattcagttacttccctagctacgttgacaaaaatctagaacttttcagagagaagagagtgctgatgtactgtacygggggcatccgctgtgagcggggttcagcctacctcaaagccaagggagtgtgcaaggaggtgttccagctcaagggtggcatccacaagtacctggaag

SEQ ID NO: 4281 - DNA, 101 bp, Homo sapiens
rtggatctgtgcctggcagacagctctgtgtcagcacctgcacctcacaggcaaggaatccatttatccccaggtgaatttcataaagaagtagaaaagtt

SEQ ID NO: 4282 - DNA, 201 bp, Homo sapiens
aaggctgcttagccccagacatcaggaaattcagttacttccctagctacgttgacaaaaatctagaacttttcagagagaagagagtgctgatgtactgyaccgggggcatccgctgtgagcggggttcagcctacctcaaagccaagggagtgtgcaaggaggtgttccagctcaagggtggcatccacaagtacctgg

SEQ ID NO: 4283 - DNA, 201 bp, Homo sapiens
gtgcgccgcggaaccgagaggccaggcggtaagcgctgcaggaactgtctggccgctggccgacgcaaggacagctgcaaggcgcgcggatgggccggcasgcaggcgcactagctcgccacggccccggaagcgcaggagaggccgccgggtggggctaggcgctgcgacagccggcgtgaggaagctcagtgggctacg

SEQ ID NO: 4284 - DNA, 201 bp, Homo sapiens
gcctctcaatggttttcccggcggcccttgcgccgacgccaggagacttccggagcttggtgacgtcacgagcgagcttttctacccaaatacgcggcggkggaataggctcgagggcggcctttgccctttttgtcaaaaccaaagaagttccaacaaaaaggagttttgaatgtaaagaaaaattgtggaaatgctgtc

SEQ ID NO: 4285 - DNA, 201 bp, Homo sapiens
ggaataggctcgagggcggcctttgccctttttgtcaaaaccaaagaagttccaacaaaaaggagttttgaatgtaaagaaaaattgtggaaatgctgtcrgcagctattcacagaccaaaccagcatccatagacatgtggcaacacaacatgctgatgaaatttatcaccagacagcttctattttaaagcaactggct

SEQ ID NO: 4286 - DNA, 138 bp, Homo sapiens
taaaactcagaaatctggtgagagagtctaagaaaatatgaattaaaggcatccaggcacataatatactttgtgactcccatgagcctgcctttgacatstatcaaggatcttgcaaagttgcctttgggcagcctc

SEQ ID NO: 4287 - DNA, 201 bp, Homo sapiens
gctgcctccgcctgccggctacttctttctcccgccttccgctctatgtccttccggggccacgcagaaagtgccgccgctttggccactcagagcccccsggccgcggtcgtcgtacgcctgaaggcgggtcgtgccggcggccgctctagtctccgcctccgctcaggccggtcctccggggcttctcaatggtttccc

SEQ ID NO: 4288 - DNA, 201 bp, Homo sapiens
gcgacatgctgccctccggtgcgccgcggaaccgagaggccaggcggtaagcgctgcaggaactgtctggccgctggccgacgcaaggacagctgcaaggygcgcggatgggccggcacgcaggcgcactagctcgccacggccccggaagcgcaggagaggccgccgggtggggctaggcgctgcgacagccggcgtgag

SEQ ID NO: 4289 - DNA, 201 bp, Homo sapiens
atataagctgctttaaccctgatgagctgataagtggccagggcagtgaagaaggggaggtgctcctttattactgctaccatgacctggaggatccccartggatctgtgcctggcagacagctctgtgtcagcacctgcacctcacaggcaagattcgaattgctgcagaaggaatcaatgggacagttggtggaagca

SEQ ID NO: 4290 - DNA, 201 bp, Homo sapiens
ccggaagcgcaggagaggccgccgggtggggctaggcgctgcgacagccggcgtgaggaagctcagtgggctacgaacgtctggcacacatgcaaccgccycctcgggctgcctccgcctgccggctacttctttctcccgccttccgctctatgtccttccggggccacgcagaaagtgccgccgctttggccactcaga

SEQ ID NO: 4291 - DNA, 201 bp, Homo sapiens
cggggccacgcagaaagtgccgccgctttggccactcagagcccccgggccgcggtcgtcgtacgcctgaaggcgggtcgtgccggcggccgctctagtcyccgcctccgctcaggccggtcctccggggcttctcaatggtttcccggtggcctctcaatggttttcccggcggcccttgcgccgacgccaggagacttc

SEQ ID NO: 4292 - DNA, 201 bp, Homo sapiens; identical to SEQ ID NO: 4280

SEQ ID NO: 4293 - DNA, 201 bp, Homo sapiens
gatgatgctagagcacagaaaataggtgagctgcatgggatcccaaagctgctgagggatagagcctgagcctggtggccacagcatatgccctttctgtkccatgcagctggggctgttagtagtcattgcccttgtcagcagaccttctaccctggtggcaaacacatgaaagctgtggccctgggagtggcctcctaa

SEQ ID NO: 4294 - DNA, 201 bp, Homo sapiens
gcctctcaatggttttcccggcggcccttgcgccgacgccaggagacttccggagcttggtgacgtcacgagcgagcttttctacccaaatacgcggcggkggaataggctcgagggcggtgagcagtgacaattgctaggcggagacagtgcagggaagagagaccttagaaaggatcaggactggcgggaggtatttaa

SEQ ID NO: 4295 - DNA, 140 bp, Homo sapiens
acgcagaaagtgccgccgctttggccactcagagcccccsggccgcggtcgtcgtacgcctgaaggcgggtcgtgccggcggccgctctagtctccgcctccgctcaggccggtcctccggggcttctcaatggtttccc

SEQ ID NO: 4296 - DNA, 201 bp, Homo sapiens; identical to SEQ ID NO: 4289

SEQ ID NO: 4297 - DNA, 201 bp, Homo sapiens
tggccacagcatatgccctttctgttccatgcagctggggctgttagtagtcattgcccttgtcagcagaccttctaccctggtggcaaacacatgaaagstgtggccctgggagtggcctcctaaaacaagccacttaggtcatctgccatctacccttaacctctgtctctcgcctgaggggaatctgcaagctgtgca

SEQ ID NO: 4298 - DNA, 194 bp, Homo sapiens
acgcagaaagtgccgccgctttggccactcagagcccccgggccgcggtcgtcgtacgcctgaaggcgggtcgtgccggcggccgctctagtcyccgcctccgctcaggccggtcctccggggcttctcaatggtttcccggtggcctctcaatggttttcccggcggcccttgcgccgacgccaggagacttc

SEQ ID NO: 4299 - DNA, 201 bp, Homo sapiens; identical to SEQ ID NO: 4282

SEQ ID NO: 4300 - DNA, 201 bp, Homo sapiens; identical to SEQ ID NO: 4297

SEQ ID NO: 4301 - DNA, 201 bp, Homo sapiens; identical to SEQ ID NO: 4293

SEQ ID NO: 4302 - DNA, 201 bp, Homo sapiens
tcgtttgcaaagaaaaaggcctttgccctttttgtcaaaaccaaagaagttccaacaaaaaggagttttgaatgtaaagaaaaattgtggaaatgctgtcrgcagctattcacagaccaaaccagcatccatagacatgtggcaacacaacatgctgatgaaatttatcaccagacagcttctattttaaagcaactggct

SEQ ID NO: 4303 - DNA, 201 bp, Homo sapiens; identical to SEQ ID NO: 4282

SEQ ID NO: 4304 - DNA, 201 bp, Homo sapiens; identical to SEQ ID NO: 4280

SEQ ID NO: 4305 - DNA, 201 bp, Homo sapiens
gtttcccaggcaggctctcagcagagcagccatctttctgtagatgattcagaaaaccccaaccagagggagttggaagtgttagcctgattttgaaaaayagtaatttagaaattacacagtacttttaaaagcagacaactgagaattatttgttggacaaaaaagaattccctaaaatgacaaaaaacaaaaaacaaa

SEQ ID NO: 4306 - DNA, 201 bp, Homo sapiens
gaaaccatgtcttctctccgaatataccgagaactaccctttctatcactcctacctgcccagagagtccttcaagccaaggcgggagtaccagaaagggyctataccaatggaaggcctgactacatcaaggagagattttgggcctcacaaagtggcaccagtgaaggtccaccagtatgaccagttcgtcccgagtga

SEQ ID NO: 4307 - DNA, 201 bp, Homo sapiens
acatcaaggagagattttgggcctcacaaagtggcaccagtgaaggtccaccagtatgaccagttcgtcccgagtgaagagaatatggatttgctcacgaygtataagaaagattacaatccctaccctgtctgtcgagtggaccccatcaaacctcgggacagtaaatatccatgtagcgacaagatggagtgtttgcct

SEQ ID NO: 4308 - DNA, 201 bp, Homo sapiens
agaatatggatttgctcacgacgtataagaaagattacaatccctaccctgtctgtcgagtggaccccatcaaacctcgggacagtaaatatccatgtagygacaagatggagtgtttgcctacttataaagctgattatttgccttggaaccaaccaaggcgagagccacttcgtctggaacacaaataccagccggcat

SEQ ID NO: 4309 - DNA, 201 bp, Homo sapiens
tcagggcctcaggatcgcccctatgaagacgaagtgcatctgtgaactgtgctcctgcgggcggcatcactgtccacatctccctaccaagatttatgatraaacagagaaaccatgtcttctctccgaatataccgagaactaccctttctatcactcctacctgcccagagagtccttcaagccaaggcgggagtacca

SEQ ID NO: 4310 - DNA, 201 bp, Homo sapiens
aaggtccaccagtatgaccagttcgtcccgagtgaagagaatatggatttgctcacgacgtataagaaagattacaatccctaccctgtctgtcgagtggrccccatcaaacctcgggacagtaaatatccatgtagcgacaagatggagtgtttgcctacttataaagctgattatttgccttggaaccaaccaaggcga

SEQ ID NO: 4311 - DNA, 201 bp, Homo sapiens
ctacatcaaggagagattttgggcctcacaaagtggcaccagtgaaggtccaccagtatgaccagttcgtcccgagtgaagagaatatggatttgctcacracgtataagaaagattacaatccctaccctgtctgtcgagtggaccccatcaaacctcgggacagtaaatatccatgtagcgacaagatggagtgtttgc

SEQ ID NO: 4312 - DNA, 201 bp, Homo sapiens
acatgccctaagggtgccccagctcagtcctgccgacctgcacttcagattaagaagtgcggtcgctttgaaggctcttccaccaccaaggatgactacargcagtggtccagcatgcgcacagagccagtcaagcccgttccccagctggacttgcccaccgagcccctggactgcctgaccaccactcgggcccactat

SEQ ID NO: 4313 - DNA, 201 bp, Homo sapiens
ggctggcgcgcgtgcaagccccctgctgctacctcgcgctaggccagctccaggagggcaacagacgacaggacattgcaaaagggccacttaaattttcyttcgagtaaacagaacacctgccaagaccctcgagcctgggcgtgccccaagacaggtggttggggtctaggagtcggctgcagctggcgatgctctgag

SEQ ID NO: 4314 - DNA, 201 bp, Homo sapiens
cttggccaatgccccggatgttctccaaagctcccatcacctacgtccctcccgaagacaggatggatcttctgacaacagtgcaggcccattacacatgscctaagggtgccccagctcagtcctgccgacctgcacttcagattaagaagtgcggtcgctttgaaggctcttccaccaccaaggatgactacaagcagt

SEQ ID NO: 4315 - DNA, 201 bp, Homo sapiens
gcgctaggccagctccaggagggcaacagacgacaggacattgcaaaagggccacttaaattttccttcgagtaaacagaacacctgccaagaccctcgarcctgggcgtgccccaagacaggtggttggggtctaggagtcggctgcagctggcgatgctctgaggggacgtcagggcctcaggatcgcccctatgaaga

SEQ ID NO: 4316 - DNA, 201 bp, Homo sapiens
ccctcgagcctgggcgtgccccaagacaggtggttggggtctaggagtcggctgcagctggcgatgctctgaggggacgtcagggcctcaggatcgccccyatgaagacgaagtgcatctgtgaactgtgctcctgcgggcggcatcactgtccacatctccctaccaagatttatgatgaaacagagaaaccatgtcttc

SEQ ID NO: 4317 - DNA, 201 bp, Homo sapiens
agacgaagtgcatctgtgaactgtgctcctgcgggcggcatcactgtccacatctccctaccaagatttatgatgaaacagagaaaccatgtcttctctcygaatataccgagaactaccctttctatcactcctacctgcccagagagtccttcaagccaaggcgggagtaccagaaagggtctataccaatggaaggcc

SEQ ID NO: 4318 - DNA, 201 bp, Homo sapiens
tacctcgcgctaggccagctccaggagggcaacagacgacaggacattgcaaaagggccacttaaattttccttcgagtaaacagaacacctgccaagacmctcgagcctgggcgtgccccaagacaggtggttggggtctaggagtcggctgcagctggcgatgctctgaggggacgtcagggcctcaggatcgccccta

SEQ ID NO: 4319 - DNA, 201 bp, Homo sapiens
cagggtgaggtctcccgggctggcgcgcgtgcaagccccctgctgctacctcgcgctaggccagctccaggagggcaacagacgacaggacattgcaaaakggccacttaaattttccttcgagtaaacagaacacctgccaagaccctcgagcctgggcgtgccccaagacaggtggttggggtctaggagtcggctgca

SEQ ID NO: 4320 - DNA, 201 bp, Homo sapiens
ggcgtgcagggtgaggtctcccgggctggcgcgcgtgcaagccccctgctgctacctcgcgctaggccagctccaggagggcaacagacgacaggacattkcaaaagggccacttaaattttccttcgagtaaacagaacacctgccaagaccctcgagcctgggcgtgccccaagacaggtggttggggtctaggagtcg

SEQ ID NO: 4321 - DNA, 201 bp, Homo sapiens
acagagccagtcaagcccgttccccagctggacttgcccaccgagcccctggactgcctgaccaccactcgggcccactatgtgccccacctgcctatcartaccaaaagctgtaagcctcattggtctggccctcgaggaaatgtccctgtggaaagccagaccacctacaccatcagctttactcccaaggaaatgggc

SEQ ID NO: 4322 - DNA, 201 bp, Homo sapiens
tgtaagcctcattggtctggccctcgaggaaatgtccctgtggaaagccagaccacctacaccatcagctttactcccaaggaaatgggcaggtgcctagyttcatatcctgagcctcctggctacacctttgaggaagtggatgctttgggtcacaggatatacaaaccagtttcccaggcaggctctcagcagagcagc

SEQ ID NO: 4323 - DNA, 157 bp, Homo sapiens
ggactgcggaggccggggcggtggcgtgcagggtgaggtctcccgggctggcgcgcrtgcaagccccctgctgctacctcgcgctaggccagctccaggagggcaacagacgacaggacattgcaaaagggccacttaaattttccttcgagtaaac

SEQ ID NO: 4324 - DNA, 201 bp, Homo sapiens
tccccttggaggatgtgactaactacaagatgagctatgtggcccaccccgtggagaagcgctttgtgcatgaagcagagaagttcaggccctgtgaaatmccctttgaaagccttaccactcaaaaacaatcctaccggggcctgatgggggagcctgccaagagcttgaaacctctagccaggcctcctgggctagaca

SEQ ID NO: 4325 - DNA, 201 bp, Homo sapiens
ccgaatataccgagaactaccctttctatcactcctacctgcccagagagtccttcaagccaaggcgggagtaccagaaagggtctataccaatggaaggsctgactacatcaaggagagattttgggcctcacaaagtggcaccagtgaaggtccaccagtatgaccagttcgtcccgagtgaagagaatatggatttgc

SEQ ID NO: 4326 - DNA, 201 bp, Homo sapiens
gtataagaaagattacaatccctaccctgtctgtcgagtggaccccatcaaacctcgggacagtaaatatccatgtagcgacaagatggagtgtttgcctmcttataaagctgattatttgccttggaaccaaccaaggcgagagccacttcgtctggaacacaaataccagccggcatcagtcaggtttgataacagaac

SEQ ID NO: 4327 - DNA, 201 bp, Homo sapiens
cctttgaggaagtggatgctttgggtcacaggatatacaaaccagtttcccaggcaggctctcagcagagcagccatctttctgtagatgattcagaaaamcccaaccagagggagttggaagtgttagcctgattttgaaaaatagtaatttagaaattacacagtacttttaaaagcagacaactgagaattatttgtt

SEQ ID NO: 4328 - DNA, 201 bp, Homo sapiens
cggacatgacgggcctcagccggagagtcatccaggtgtggtttcaaaactgccgggcgcgtcataaaaagcacacgccgcaacacccagtgccgccctcsggggcgcccccgtcccgccttccctccgccctgtccgacgacatccactacaccccgttcagcagccccgagcgggcgcgcatggtcaccctgcacggct

SEQ ID NO: 4329 - DNA, 201 bp, Homo sapiens
ttggaaatcaaggagagggcggtgacatattggaccagaagaggcactagccattttaaggagaggaaagagaaaactctggggtcagggagagaccctayccccacctaattatccagcatatatgtaagaaacatagcagcgatggtattcgatctgtgccatgactcttctgaatgtttggacaggttagagttgggg

SEQ ID NO: 4330 - DNA, 201 bp, Homo sapiens
atgtccccaaaggaaagctatgttctaattttatcatttccatctgtctggttatgtcaagttaattcagaaagagaagagacagtgaccaaccctgagargcctaatagggcagagatggaggcctgcccagactaggaggcagcggggatagacagggaatggggagaagaaagacccccattggtttggaaatcaagg

SEQ ID NO: 4331 - DNA, 201 bp, Homo sapiens
tggatgggccgctctccaaccggggtgagaaggtcatcctttttcagtactaacgctgccggcacttccgcatctgcccgtgggcgccccacagctgcccytcagccgctgagatccagtgtccaagctgcggccaggagtccacccacctccgcatccacccccgtccgccatcctgcccaccaccaggtcggttcccga

SEQ ID NO: 4332 - DNA, 201 bp, Homo sapiens; identical to SEQ ID NO: 4328

SEQ ID NO: 4333 - DNA, 201 bp, Homo sapiens; identical to SEQ ID NO: 4329

SEQ ID NO: 4334 - DNA, 201 bp, Homo sapiens
gcgcatggtcaccctgcacggctacattgagagtcatcctttttcagtactaacgctgccggcacttccgcatctgcccgtgggcgccccacagctgcccytcagccgctgagatccagtgtccaagctgcggccaggagtccacccacctccgcatccacccccgtccgccatcctgcccaccaccaggtcggttcccga

SEQ ID NO: 4335 - DNA, 201 bp, Homo sapiens; identical to SEQ ID NO: 4330

SEQ ID NO: 4336 - DNA, 201 bp, Homo sapiens; identical to SEQ ID NO: 4328

SEQ ID NO: 4337 - DNA, 201 bp, Homo sapiens; identical to SEQ ID NO: 4329

SEQ ID NO: 4338 - DNA, 201 bp, Homo sapiens; identical to SEQ ID NO: 4330

SEQ ID NO: 4339 - DNA, 201 bp, Homo sapiens; identical to SEQ ID NO: 4331

SEQ ID NO: 4340 - DNA, 201 bp, Homo sapiens; identical to SEQ ID NO: 4328

SEQ ID NO: 4341 - DNA, 201 bp, Homo sapiens; identical to SEQ ID NO: 4329

SEQ ID NO: 4342 - DNA, 201 bp, Homo sapiens; identical to SEQ ID NO: 4330

SEQ ID NO: 4343 - DNA, 201 bp, Homo sapiens; identical to SEQ ID NO: 4331

SEQ ID NO: 4344 - DNA, 201 bp, Homo sapiens
gaagggggaacaaatatcttcacttcagttttatttgtgaattacatgtttcatgaatccatttggcacagagacacaaggaagaaaacactagtaaccawctttccactagttcatatactgagaaacagtaaatacctttcctttccacttttaccctgtgttctttgaacatcatttgtgcagattctgccctcaatg

SEQ ID NO: 4345 - DNA, 201 bp, Homo sapiens
ttcacttcagttttatttgtgaattacatgtttcatgaatccatttggcacagagacacaaggaagaaaacactagtaaccatctttccactagttcatakactgagaaacagtaaatacctttcctttccacttttaccctgtgttctttgaacatcatttgtgcagattctgccctcaatgaggaccaaataaagatga

SEQ ID NO: 4346 - DNA, 201 bp, Homo sapiens
ctaggctccgcgccctcgcgcccatagccccggcggcggcacgaccagaggcggccaggggagcgcgccgccccgctcggccctccagtcccgctccgcckcctccctcccgcacagcagccgccagcgcggcctcctgcaccatgtcggtggccggcctcaagaagcagttccataaagccactcagtcttccaaaaaac

SEQ ID NO: 4347 - DNA, 201 bp, Homo sapiens
cagtggtccacgtcatccagccccaccaagtgactttggttgacttgtgggctcccacaggagtcatggtgatggatgatatcctcttagcctggtgggcrtggcatgtgctttttaaaacatcatctgagaccagccagtagtcacagaactgctgtttacacagttctcaggaggctgtggtttcttagaatatgacca

SEQ ID NO: 4348 - DNA, 201 bp, Homo sapiens
gaagcagttccataaagccactcagtcttccaaaaaacagtattcttgtgactgttactgagtataaactggatacttctggatacggctctggttgtacrtaagttgagtgagaaggttggaggagctgaaggaaccaagctagatgatgacttcaaagagatggaaaggaaagtggatgtcaccagcagggctgtgatg

SEQ ID NO: 4349 - DNA, 201 bp, Homo sapiens
gtgtcccgctaggctccgcgccctcgcgcccatagccccggcggcggcacgaccagaggcggccaggggagcgcgccgccccgctcggccctccagtcccsctccgccgcctccctcccgcacagcagccgccagcgcggcctcctgcaccatgtcggtggccggcctcaagaagcagttccataaagccactcagtcttc

SEQ ID NO: 4350 - DNA, 201 bp, Homo sapiens
gggttcaaagcattctctgcaaataggcatctcagctcctcacacttatggctatttctgacgtatagccagttttcttccctccttgctattaaagccasagcggtaattccaaattatttttcagtaagacagttaatcagcattattgtgagagggactgaaaagaaattctccattatgaggaattgggaagaaatc

SEQ ID NO: 4351 - DNA, 201 bp, Homo sapiens; identical to SEQ ID NO: 4344

SEQ ID NO: 4352 - DNA, 201 bp, Homo sapiens; identical to SEQ ID NO: 4345

SEQ ID NO: 4353 - DNA, 201 bp, Homo sapiens; identical to SEQ ID NO: 4346

SEQ ID NO: 4354 - DNA, 201 bp, Homo sapiens; identical to SEQ ID NO: 4347

SEQ ID NO: 4355 - DNA, 201 bp, Homo sapiens; identical to SEQ ID NO: 4348

SEQ ID NO: 4356 - DNA, 201 bp, Homo sapiens; identical to SEQ ID NO: 4349

SEQ ID NO: 4357 - DNA, 201 bp, Homo sapiens
gggttcaaagcattctctgcaaataggcatctcagctcctcacacttatggctatttctgacgtatagccagttttcttccctccttgctattaaagccasagcggtaattccaaattatttttcagtaagacagttaatcagcattattgtgagagggattaaatttcttgctatacagaaactatgtatgtatttaggc

SEQ ID NO: 4358 - DNA, 201 bp, Homo sapiens; identical to SEQ ID NO: 4344

SEQ ID NO: 4359 - DNA, 201 bp, Homo sapiens; identical to SEQ ID NO: 4345

SEQ ID NO: 4360 - DNA, 201 bp, Homo sapiens; identical to SEQ ID NO: 4347

SEQ ID NO: 4361 - DNA, 201 bp, Homo sapiens; identical to SEQ ID NO: 4350

SEQ ID NO: 4362 - DNA, 201 bp, Homo sapiens; identical to SEQ ID NO: 4344

SEQ ID NO: 4363 - DNA, 201 bp, Homo sapiens; identical to SEQ ID NO: 4345

SEQ ID NO: 4364 - DNA, 201 bp, Homo sapiens
ctaggctccgcgccctcgcgcccatagccccggcggcggcacgaccagaggcggccaggggagcgcgccgccccgctcggccctccagtcccgctccgcckcctccctcccgcacagcagccgccagcgcggcctcctgcaccatgtcggtggccggcctcaagaagcagttccataaagccactcagaaagtgagtgaga

SEQ ID NO: 4365 - DNA, 201 bp, Homo sapiens; identical to SEQ ID NO: 4347

SEQ ID NO: 4366 - DNA, 201 bp, Homo sapiens
gtgtcccgctaggctccgcgccctcgcgcccatagccccggcggcggcacgaccagaggcggccaggggagcgcgccgccccgctcggccctccagtcccsctccgccgcctccctcccgcacagcagccgccagcgcggcctcctgcaccatgtcggtggccggcctcaagaagcagttccataaagccactcagaaagt

SEQ ID NO: 4367 - DNA, 201 bp, Homo sapiens; identical to SEQ ID NO: 4350

SEQ ID NO: 4368 - DNA, 201 bp, Homo sapiens
gagcggatccccagccgtccctgggcgttctcccgggttctagcaaagccccccggggtgcccatcagtttccttgggtgactacagcgtgtgttttttcyttcctctttcccctgcctgtgtgcccttctccaggatggcagaggcggaattgcacaaggaaaggctgcaagccatagcagaaaaaagaaagaggcagac

SEQ ID NO: 4369 - DNA, 201 bp, Homo sapiens
cagaaaagcctcagagcatgtttgagccacctcaggtgtcttctcctgttcaagagaaaagggatgtattaccaaagattctgcctgctgaagacagggcrctcagggaaagggggcccccccagccactgccagctgtgcagcccagtggcccgattaacatggaggagaccaggcccgaaggaagctatttcagcaagt

SEQ ID NO: 4370 - DNA, 201 bp, Homo sapiens
tcagaaaagcctcagagcatgtttgagccacctcaggtgtcttctcctgttcaagagaaaagggatgtattaccaaagattctgcctgctgaagacagggygctcagggaaagggggcccccccagccactgccagctgtgcagcccagtggcccgattaacatggaggagaccaggcccgaaggaagctatttcagcaag

SEQ ID NO: 4371 - DNA, 201 bp, Homo sapiens
agaatgccattcaacaagccatagccgagcaggtggataaagctgtgtccaaaaccagcagggatggagcagagcaacagggacctgaagcgactgtagargaagctgaagctgcggctttcggctcagaaaagcctcagagcatgtttgagccacctcaggtgtcttctcctgttcaagagaaaagggatgtattaccaa

SEQ ID NO: 4372 - DNA, 201 bp, Homo sapiens
aaccatcgaggagcagctggacgaggaacatctggagtcgcacaaaaagtacaaggagcgcaaagagagaagggcacagcaggaacagttgctgctgcagmagcagttacagcagcagcagcagcagcccccatcgcagctctgcacagcccctgcctcttctcatgaacgcgcaagcatgattgacaaagcaaaggagga

SEQ ID NO: 4373 - DNA, 201 bp, Homo sapiens
agaacagaggaggcagcagcattgcacagccccaggcacagtggcagttaggatggctggagagtaggatagttctatgggttgcccaaaaaatgtgatgygcttcatgttttctctgactcatggatctggtagagaccatagacatgatatagactaacttccccatttttcacaagaggaaaccatccttatgactta

SEQ ID NO: 4374 - DNA, 201 bp, Homo sapiens
gagctgatgcagtatttgtaatattaagttgacctaacaaggtatttgcatgagtcacaattacaaagttttgagcggttttgtaatttgacatttaggaragtctcctatttattctcatactttacattcatgcttagtatactatagaggatgccagctttaatctttctgtcatttaaagcaatatgataagggtat

SEQ ID NO: 4375 - DNA, 201 bp, Homo sapiens
aggaggcagcagcattgcacagccccaggcacagtggcagttaggatggctggagagtaggatagttctatgggttgcccaaaaaatgtgatgcgcttcaygttttctctgactcatggatctggtagagaccatagacatgatatagactaacttccccatttttcacaagaggaaaccatccttatgacttaccttaaa

SEQ ID NO: 4376 - DNA, 201 bp, Homo sapiens
tttcacagttatgtttcttcataggaaaactatatttagtgggcaacaactatttttatgatgggatgggggagtatatacacgtatagaatctgtacgcrttgaacaacttggttcaagatggtgggggcatttttagagcggcaataattgaaaaaaaaggcgaactctgccttggagaggtagatgataagaaataaa

SEQ ID NO: 4377 - DNA, 201 bp, Homo sapiens
aggaagagatccgagcagctcaggaaagggaagaggagctgaagaggcagagacaagtcttgcagagtacgcagagccccaggacaaagaatgccccatcrctgccctccagaacatgctacaaaactgctccagggaaaatagagaaagtcaaacctcctccatcccccaccactgaaggccccagcttgcagcctgact

SEQ ID NO: 4378 - DNA, 201 bp, Homo sapiens
ggtggataaagctgtgtccaaaaccagcagggatggagcagagcaacagggacctgaagcgactgtagaggaagctgaagctgcggctttcggctcagaaragcctcagagcatgtttgagccacctcaggtgtcttctcctgttcaagagaaaagggatgtattaccaaagattctgcctgctgaagacagggcgctcag

SEQ ID NO: 4379 - DNA, 201 bp, Homo sapiens
acatcctccccagagcctggtgcagtggttctggtgggcggcctaagcccccctgtccacgaggcgacccagccagaacccactgaaagaacagctagccrgcaggcacctcctcacatcgagctcagtaatagcagccctgaccccatggcagaggcagaaagaacaaatggccattcccccagccagcctagagatgcg

SEQ ID NO: 4380 - DNA, 201 bp, Homo sapiens
tcacccccgcataatggcctccttactgatcaccacgaatccctggataatgatgttgccagagagatccgctatctagatgaggtgctagaggccaactrctgtgattctgctgtggatggaacgtacaatggaacatcctccccagagcctggtgcagtggttctggtgggcggcctaagcccccctgtccacgaggcg

SEQ ID NO: 4381 - DNA, 201 bp, Homo sapiens
gatgaaaccatcaaggctgaattggtcctcattgatgaagatgatgagaagtcattgagggagaagacagtgacggacgtgtccactattgacgggaacgyggctgagcttgtgtccgggaggccggtctcagacaccacagagccctcatccccagaagggaaggaagagagcctagctacagagccagccccaggagtc

SEQ ID NO: 4382 - DNA, 201 bp, Homo sapiens
gaagacaacgaataaacttccttcaacccaggaagcgtctttggtgcttgggagaccaagaaaccaagaaattaacaactgaaagcattttaatggactayttattaaagtgcaaacaaactcagcaatccttatgtagaccagaagctgcaatatacaatgatgaaaatgaaacgaaaaggaagtccccccatcagactc

SEQ ID NO: 4383 - DNA, 201 bp, Homo sapiens
caagcatgattgacaaagcaaaggaggacattgtcacagagcagatagatttctctgctgctcgcaaacaatttcagctgatggagaattccaggcaagcrgtggccaagggccagagtacacccaggctgttctccatcaagcctttctacaggcctctggggtcagtcaactcagacaagccactgactaatccgagac

SEQ ID NO: 4384 - DNA, 201 bp, Homo sapiens
caaactgacaacccctcagagggccgaggagaaggcgtctccaagtcatttagtgatcatggtttctattccccttcctccacgctgggggactctccgtyggttgatgaccccttggagtatcaggctggcctcctggtgcagaatgccattcaacaagccatagccgagcaggtggataaagctgtgtccaaaaccagc

SEQ ID NO: 4385 - DNA, 201 bp, Homo sapiens; identical to SEQ ID NO: 4369

SEQ ID NO: 4386 - DNA, 201 bp, Homo sapiens; identical to SEQ ID NO: 4378

SEQ ID NO: 4387 - DNA, 201 bp, Homo sapiens; identical to SEQ ID NO: 4379

SEQ ID NO: 4388 - DNA, 201 bp, Homo sapiens; identical to SEQ ID NO: 4370

SEQ ID NO: 4389 - DNA, 201 bp, Homo sapiens; identical to SEQ ID NO: 4371

SEQ ID NO: 4390 - DNA, 201 bp, Homo sapiens; identical to SEQ ID NO: 4380

SEQ ID NO: 4391 - DNA, 201 bp, Homo sapiens; identical to SEQ ID NO: 4381

SEQ ID NO: 4392 - DNA, 201 bp, Homo sapiens; identical to SEQ ID NO: 4372

SEQ ID NO: 4393 - DNA, 201 bp, Homo sapiens; identical to SEQ ID NO: 4373

SEQ ID NO: 4394 - DNA, 201 bp, Homo sapiens; identical to SEQ ID NO: 4374

SEQ ID NO: 4395 - DNA, 201 bp, Homo sapiens; identical to SEQ ID NO: 4375

SEQ ID NO: 4396 - DNA, 201 bp, Homo sapiens; identical to SEQ ID NO: 4376

SEQ ID NO: 4397 - DNA, 201 bp, Homo sapiens; identical to SEQ ID NO: 4382

SEQ ID NO: 4398 - DNA, 201 bp, Homo sapiens; identical to SEQ ID NO: 4383

SEQ ID NO: 4399 - DNA, 201 bp, Homo sapiens; identical to SEQ ID NO: 4384

SEQ ID NO: 4400 - DNA, 201 bp, Homo sapiens; identical to SEQ ID NO: 4377

SEQ ID NO: 4401 - DNA, 201 bp, Homo sapiens; identical to SEQ ID NO: 4369

SEQ ID NO: 4402 - DNA, 201 bp, Homo sapiens; identical to SEQ ID NO: 4378

SEQ ID NO: 4403 - DNA, 201 bp, Homo sapiens; identical to SEQ ID NO: 4379

SEQ ID NO: 4404 - DNA, 201 bp, Homo sapiens; identical to SEQ ID NO: 4370

SEQ ID NO: 4405 - DNA, 201 bp, Homo sapiens; identical to SEQ ID NO: 4371

SEQ ID NO: 4406 - DNA, 201 bp, Homo sapiens; identical to SEQ ID NO: 4380

SEQ ID NO: 4407 - DNA, 201 bp, Homo sapiens; identical to SEQ ID NO: 4372

SEQ ID NO: 4408 - DNA, 201 bp, Homo sapiens; identical to SEQ ID NO: 4373

SEQ ID NO: 4409 - DNA, 201 bp, Homo sapiens; identical to SEQ ID NO: 4374

SEQ ID NO: 4410 - DNA, 201 bp, Homo sapiens; identical to SEQ ID NO: 4375

SEQ ID NO: 4411 - DNA, 201 bp, Homo sapiens; identical to SEQ ID NO: 4376

SEQ ID NO: 4412 - DNA, 201 bp, Homo sapiens; identical to SEQ ID NO: 4382

SEQ ID NO: 4413 - DNA, 201 bp, Homo sapiens; identical to SEQ ID NO: 4383

SEQ ID NO: 4414 - DNA, 201 bp, Homo sapiens; identical to SEQ ID NO: 4384

SEQ ID NO: 4415 - DNA, 201 bp, Homo sapiens; identical to SEQ ID NO: 4377

SEQ ID NO: 4416 - DNA, 201 bp, Homo sapiens; identical to SEQ ID NO: 4368

SEQ ID NO: 4417 - DNA, 201 bp, Homo sapiens; identical to SEQ ID NO: 4369

SEQ ID NO: 4418 - DNA, 201 bp, Homo sapiens; identical to SEQ ID NO: 4378

SEQ ID NO: 4419 - DNA, 201 bp, Homo sapiens; identical to SEQ ID NO: 4379

SEQ ID NO: 4420 - DNA, 201 bp, Homo sapiens; identical to SEQ ID NO: 4370

SEQ ID NO: 4421 - DNA, 201 bp, Homo sapiens; identical to SEQ ID NO: 4371

SEQ ID NO: 4422 - DNA, 201 bp, Homo sapiens; identical to SEQ ID NO: 4380

SEQ ID NO: 4423 - DNA, 201 bp, Homo sapiens; identical to SEQ ID NO: 4372

SEQ ID NO: 4424 - DNA, 201 bp, Homo sapiens; identical to SEQ ID NO: 4373

SEQ ID NO: 4425 - DNA, 201 bp, Homo sapiens; identical to SEQ ID NO: 4374

SEQ ID NO: 4426 - DNA, 201 bp, Homo sapiens; identical to SEQ ID NO: 4375

SEQ ID NO: 4427 - DNA, 201 bp, Homo sapiens; identical to SEQ ID NO: 4376

SEQ ID NO: 4428 - DNA, 201 bp, Homo sapiens; identical to SEQ ID NO: 4382

SEQ ID NO: 4429 - DNA, 201 bp, Homo sapiens; identical to SEQ ID NO: 4383

SEQ ID NO: 4430 - DNA, 201 bp, Homo sapiens; identical to SEQ ID NO: 4384

SEQ ID NO: 4431 - DNA, 201 bp, Homo sapiens; identical to SEQ ID NO: 4377

SEQ ID NO: 4432 - DNA, 201 bp, Homo sapiens; identical to SEQ ID NO: 4368

SEQ ID NO: 4433 - DNA, 172 bp, Homo sapiens
tccgggaggccggtctcagacaccacagagccctcatccccagaagggaaggaagagagcctagctacagagccagccccaggtacccaaaagaaaaagcrctgtcaatgctgtgttgtcatgtgaccacttctttcttctcctttcttctgggcagcctgtactctccacc

SEQ ID NO: 4434 - DNA, 201 bp, Homo sapiens
gatgaaaccatcaaggctgaattggtcctcattgatgaagatgatgagaagtcattgagggagaagacagtgacggacgtgtccactattgacgggaacgyggctgagcttgtgtccgggaggccggtctcagacaccacagagccctcatccccagaagggaaggaagagagcctagctacagagccagccccaggtacc

SEQ ID NO: 4435 - DNA, 201 bp, Homo sapiens; identical to SEQ ID NO: 4369

SEQ ID NO: 4436 - DNA, 201 bp, Homo sapiens; identical to SEQ ID NO: 4378

SEQ ID NO: 4437 - DNA, 201 bp, Homo sapiens; identical to SEQ ID NO: 4379

SEQ ID NO: 4438 - DNA, 201 bp, Homo sapiens; identical to SEQ ID NO: 4370

SEQ ID NO: 4439 - DNA, 201 bp, Homo sapiens; identical to SEQ ID NO: 4371

SEQ ID NO: 4440 - DNA, 201 bp, Homo sapiens; identical to SEQ ID NO: 4380

SEQ ID NO: 4441 - DNA, 201 bp, Homo sapiens; identical to SEQ ID NO: 4381

SEQ ID NO: 4442 - DNA, 201 bp, Homo sapiens; identical to SEQ ID NO: 4372

SEQ ID NO: 4443 - DNA, 201 bp, Homo sapiens; identical to SEQ ID NO: 4373

SEQ ID NO: 4444 - DNA, 201 bp, Homo sapiens; identical to SEQ ID NO: 4374

SEQ ID NO: 4445 - DNA, 201 bp, Homo sapiens; identical to SEQ ID NO: 4375

SEQ ID NO: 4446 - DNA, 201 bp, Homo sapiens; identical to SEQ ID NO: 4376

SEQ ID NO: 4447 - DNA, 201 bp, Homo sapiens; identical to SEQ ID NO: 4382

SEQ ID NO: 4448 - DNA, 201 bp, Homo sapiens; identical to SEQ ID NO: 4383

SEQ ID NO: 4449 - DNA, 201 bp, Homo sapiens; identical to SEQ ID NO: 4384

SEQ ID NO: 4450 - DNA, 201 bp, Homo sapiens; identical to SEQ ID NO: 4377

SEQ ID NO: 4451 - DNA, 201 bp, Homo sapiens; identical to SEQ ID NO: 4369

SEQ ID NO: 4452 - DNA, 201 bp, Homo sapiens; identical to SEQ ID NO: 4378

SEQ ID NO: 4453 - DNA, 201 bp, Homo sapiens; identical to SEQ ID NO: 4379

SEQ ID NO: 4454 - DNA, 201 bp, Homo sapiens; identical to SEQ ID NO: 4370

SEQ ID NO: 4455 - DNA, 201 bp, Homo sapiens; identical to SEQ ID NO: 4371

SEQ ID NO: 4456 - DNA, 201 bp, Homo sapiens; identical to SEQ ID NO: 4380

SEQ ID NO: 4457 - DNA, 201 bp, Homo sapiens; identical to SEQ ID NO: 4372

SEQ ID NO: 4458 - DNA, 201 bp, Homo sapiens
tgggcacctgttactacaagaaaatgaacatttaagggattattagaaaatatctattcaaaagaatttgtcactgtggtttccattttccttcctcttarttatgagtcagtttgtcagcattcacatccataagagatgcagtatttaaccctgacttttgtttactctttattccagaagcctccccagctttctgag

SEQ ID NO: 4459 - DNA, 201 bp, Homo sapiens; identical to SEQ ID NO: 4373

SEQ ID NO: 4460 - DNA, 201 bp, Homo sapiens; identical to SEQ ID NO: 4374

SEQ ID NO: 4461 - DNA, 201 bp, Homo sapiens; identical to SEQ ID NO: 4375

SEQ ID NO: 4462 - DNA, 201 bp, Homo sapiens; identical to SEQ ID NO: 4376

SEQ ID NO: 4463 - DNA, 201 bp, Homo sapiens; identical to SEQ ID NO: 4382

SEQ ID NO: 4464 - DNA, 201 bp, Homo sapiens; identical to SEQ ID NO: 4383

SEQ ID NO: 4465 - DNA, 201 bp, Homo sapiens; identical to SEQ ID NO: 4384

SEQ ID NO: 4466 - DNA, 201 bp, Homo sapiens; identical to SEQ ID NO: 4377

SEQ ID NO: 4467 - DNA, 201 bp, Homo sapiens; identical to SEQ ID NO: 4369

SEQ ID NO: 4468 - DNA, 201 bp, Homo sapiens; identical to SEQ ID NO: 4378

SEQ ID NO: 4469 - DNA, 201 bp, Homo sapiens; identical to SEQ ID NO: 4379

SEQ ID NO: 4470 - DNA, 201 bp, Homo sapiens; identical to SEQ ID NO: 4370

SEQ ID NO: 4471 - DNA, 201 bp, Homo sapiens; identical to SEQ ID NO: 4371

SEQ ID NO: 4472 - DNA, 201 bp, Homo sapiens; identical to SEQ ID NO: 4380

SEQ ID NO: 4473 - DNA, 201 bp, Homo sapiens; identical to SEQ ID NO: 4372

SEQ ID NO: 4474 - DNA, 201 bp, Homo sapiens; identical to SEQ ID NO: 4458

SEQ ID NO: 4475 - DNA, 201 bp, Homo sapiens; identical to SEQ ID NO: 4373

SEQ ID NO: 4476 - DNA, 201 bp, Homo sapiens; identical to SEQ ID NO: 4374

SEQ ID NO: 4477 - DNA, 201 bp, Homo sapiens; identical to SEQ ID NO: 4375

SEQ ID NO: 4478 - DNA, 201 bp, Homo sapiens; identical to SEQ ID NO: 4376

SEQ ID NO: 4479 - DNA, 201 bp, Homo sapiens; identical to SEQ ID NO: 4382

SEQ ID NO: 4480 - DNA, 201 bp, Homo sapiens; identical to SEQ ID NO: 4383

SEQ ID NO: 4481 - DNA, 201 bp, Homo sapiens; identical to SEQ ID NO: 4384

SEQ ID NO: 4482 - DNA, 201 bp, Homo sapiens; identical to SEQ ID NO: 4377

SEQ ID NO: 4483 - DNA, 172 bp, Homo sapiens; identical to SEQ ID NO: 4433

SEQ ID NO: 4484 - DNA, 201 bp, Homo sapiens; identical to SEQ ID NO: 4434

SEQ ID NO: 4485 - DNA, 201 bp, Homo sapiens
ttgcttatggggagcacctgatgcaggagcacatgtatgagccagcggggctcatgtttgcccgttgcggtgcccacgagaaagctctctcagcctttctsacatgtggcaactggaagcaagccctctgtgtggcagcccagcttaactttaccaaagaccagctggtgggcctcggcagaactctggcaggaaagctgg

SEQ ID NO: 4486 - DNA, 201 bp, Homo sapiens
ttatgagttggagtcctgaccaagagctggtgcttcttgccacaggtcaacagaccctgattatgatgacaaaagattttgagccaatcctggagcagcaratccatcaggatgattttggtgaaagcaagtttatcactgttggatggggtaggaaggagacacagttccatggatcagaaggcagacaagcagcttttc

SEQ ID NO: 4487 - DNA, 201 bp, Homo sapiens
agtaaaacaatgtttctaaattgtcttattttgttggcggagaagattacaatggctattagtgctacatttggtcaaatgtaatcacttaaatagcttcwtgtcaccttaaactaaagcagaataaaaagtatcctttgaaattataagccctcctttgctgacagctattattttgtaacatcttaccaggtcatgtgc

SEQ ID NO: 4488 - DNA, 201 bp, Homo sapiens
tggcaaatactcccatagtaactccaggatatcagcgagatcatccaagaatcgccgaaaagcggagcggaagaagcacagcctcaaagaaggcagtccgmtggaggacctggccctcctggaggcactgagtgaagtggtgcagaacactgaaaacctgaaagatgaagtataccatattttaaaggtactctttctctt

SEQ ID NO: 4489 - DNA, 201 bp, Homo sapiens
cgcgtgcgcaattcggagccgactctgggtgcggactgtgggagctgactctgggtagccggctgcgcgtggctggggaggcgaggccggacgcacctctstttgggggtcctcagagattaatgattcatcaagggatagttgtacttgtctcgtgggaatcacttcatcatgcgaaatctgaaattatttcggaccctg

SEQ ID NO: 4490 - DNA, 201 bp, Homo sapiens
tccatccttggaggcctagtgccgtcggagagagagcgggagccgcggacagagacgcgtgcgcaattcggagccgactctgggtgcggactgtgggagckgactctgggtagccggctgcgcgtggctggggaggcgaggccggacgcacctctgtttgggggtcctcagagattaatgattcatcaagggatagttgta

SEQ ID NO: 4491 - DNA, 201 bp, Homo sapiens
aataatgaagatcaagatgtaaacccgctgaaactaggccttctcacttggattgaagaagacgtcttcctggctgtaagccacagtgagttcagcccccrgtctgtcattcaccatttgactgcagcttcttctgagatggatgaagagcatggacagctcaatgtcagttcatctgcagcggtggatggggtcataatc

SEQ ID NO: 4492 - DNA, 201 bp, Homo sapiens
accaagctcacaacagtaccaggatatcagcattgcttatggggagcacctgatgcaggagcacatgtatgagccagcggggctcatgtttgcccgttgcrgtgcccacgagaaagctctctcagcctttctgacatgtggcaactggaagcaagccctctgtgtggcagcccagcttaactttaccaaagaccagctggt

SEQ ID NO: 4493 - DNA, 201 bp, Homo sapiens
ggagctgactctgggtagccggctgcgcgtggctggggaggcgaggccggacgcacctctgtttgggggtcctcagagattaatgattcatcaagggatasttgtacttgtctcgtgggaatcacttcatcatgcgaaatctgaaattatttcggaccctggagttcagggatattcaaggtccagggaatcctcagtgct

SEQ ID NO: 4494 - DNA, 201 bp, Homo sapiens
aatagaccttgtctgcgatgctatgagagcagtcatggagagcataaatcctcataaatactgcctatccatacttacatctcatgtaaagaagacaaccscagaactggaaattgtactgcaaaaagtacacgagcttcaaggaaatgctccctctgatcctgatgctgtgagtgctgaagaggccttgaaatatttgct

SEQ ID NO: 4495 - DNA, 201 bp, Homo sapiens
aagcctttgccagtatagcaagatgttaactatagaatcaatctaggagtattcactgtaaaattcaacttttctgtatgtttgaacattttcacaatctmataggagtttttaaaaagaagagaaagaagatatactttgctttggagaaatctactttttgacttacatgggtttgctgtaattaagtgcccaatattg

SEQ ID NO: 4496 - DNA, 201 bp, Homo sapiens
tggttggacaaacttatgtttaaagaggcatttgaatgcatgagaaagctgagaatcaatctcaatctgatttatgatcataaccctaaggtgtttcttgraaatgtggaaaccttcattaaacagatagattctgtgaatcatattaacttgttttttacagaattgaaagaagaagatgtcacgaagaccatgtaccct

SEQ ID NO: 4497 - DNA, 201 bp, Homo sapiens
ctctgatgtgggaccctgtgaccccataccggctgcatgttctctgtcagggctggcattacctcgcctatgattggcactggacgactgaccggagcgtrggagataattcaagtgacttgtccaatgtggctgtcattgatggaaacagggtgttggtgacagtcttccggcagactgtggttccgcctcccatgtgca

SEQ ID NO: 4498 - DNA, 201 bp, Homo sapiens
ttcagaacatggcctgatagaagtagaccctgtctcaagagaagtgaaaaatgaagtttctttggtggcagaaggctttctcccagaggatggaagtggcygcattgttggtgttcaggacttgctggatcaggagtctgtgtgtgtggccacagcctctggagacgtcatactctgcagtctcagcacacaacagctgga

SEQ ID NO: 4499 - DNA, 201 bp, Homo sapiens
ttttgcctgagggatgcttcatttaaaacattacaggccggcctgagcagcaatcatgtgtcccatggggaagttctgcggaaagtggagaggggttcacsgattgtcactgttgtgccccaggacacaaagcttgtattacagatgccaaggggaaacttagaagttgttcatcatcgagccctggttttagctcagatt

SEQ ID NO: 4500 - DNA, 201 bp, Homo sapiens
ggcctacaaagaaggccggccgccgtaagtgaccagaagcgggcccggcctcgccccctccgcctggtgacgtcactcccgcgccgcactcccagtgctgsggctgcctagttgacgcacccattgagtcgctggcttctttgcagcgcttcagcgttttcccctggagggcgcctccatccttggaggcctagtgccgtc

SEQ ID NO: 4501 - DNA, 201 bp, Homo sapiens
agaccgaattggccatgattggagaagaggaatgtgtccttggtctgactgacaggtgtcgctttttcatcaatgacattgaggttgcgtcaaatatcacrtcatttgcagtatatgatgagtttttattgttgacaacccattcccatacctgccagtgtttttgcctgagggatgcttcatttaaaacattacaggccg

SEQ ID NO: 4502 - DNA, 201 bp, Homo sapiens
tggatggggtcataatcagtctatgttgcaattccaagaccaagtcagtagtattacagctggctgatggccagatatttaagtacctttgggagtcaccktctctggctattaaaccatggaagaactctggtggatttcctgttcggtttccttatccatgcacccagaccgaattggccatgattggagaagaggaat

SEQ ID NO: 4503 - DNA, 201 bp, Homo sapiens
tctcccagaggatggaagtggccgcattgttggtgttcaggacttgctggatcaggagtctgtgtgtgtggccacagcctctggagacgtcatactctgcrgtctcagcacacaacagctggagtgtgttgggagtgtagccagtggtatctctgttatgagttggagtcctgaccaagagctggtgcttcttgccacagg

SEQ ID NO: 4504 - DNA, 201 bp, Homo sapiens
aggggacggtgctcattggttcagaacatggcctgatagaagtagaccctgtctcaagagaagtgaaaaatgaagtttctttggtggcagaaggctttctyccagaggatggaagtggccgcattgttggtgttcaggacttgctggatcaggagtctgtgtgtgtggccacagcctctggagacgtcatactctgcagtc

SEQ ID NO: 4505 - DNA, 201 bp, Homo sapiens
taactttaccaaagaccagctggtgggcctcggcagaactctggcaggaaagctggttgagcagaggaagcacattgatgcggccatggttttggaagagwgtgcccaggattatgaagaagctgtgctcttgctgttagaaggagctgcctgggaagaagctttgaggctggtatacaaatataacagactggatattat

SEQ ID NO: 4506 - DNA, 201 bp, Homo sapiens
tgggaccagccctggcttggaaaccctcaggcagtttgattgcatctacacaagataaacccaaccagcaggatattgtgttttttgagaaaaatggactycttcatggacactttacacttcccttccttaaagatgaggttaaggtaaatgacttgctctggaatgcagattcctctgtgcttgcagtctggctggaag

SEQ ID NO: 4507 - DNA, 201 bp, Homo sapiens
ttggtctgactgacaggtgtcgctttttcatcaatgacattgaggttgcgtcaaatatcacgtcatttgcagtatatgatgagtttttattgttgacaacycattcccatacctgccagtgtttttgcctgagggatgcttcatttaaaacattacaggccggcctgagcagcaatcatgtgtcccatggggaagttctgc

SEQ ID NO: 4508 - DNA, 201 bp, Homo sapiens
gttttttacagaattgaaagaagaagatgtcacgaagaccatgtaccctgcaccagttaccagcagtgtctacctgtccagggatcctgacgggaataaamtagaccttgtctgcgatgctatgagagcagtcatggagagcataaatcctcataaatactgcctatccatacttacatctcatgtaaagaagacaacccc

SEQ ID NO: 4509 - DNA, 201 bp, Homo sapiens
accctgcaccagttaccagcagtgtctacctgtccagggatcctgacgggaataaaatagaccttgtctgcgatgctatgagagcagtcatggagagcatraatcctcataaatactgcctatccatacttacatctcatgtaaagaagacaaccccagaactggaaattgtactgcaaaaagtacacgagcttcaaggaa

SEQ ID NO: 4510 - DNA, 201 bp, Homo sapiens
gactctcagacagccacattcagtcgccacaagaaacgtttattggtagttcgagagctcaaggagcaagcccagcaggcaggtctggatgatgaggtacyccacgggcaagagtcagacctcttctctgaaactagcagtgtcgtgagtggcagtgagatgagtggcaaatactcccatagtaactccaggatatcagcg

SEQ ID NO: 4511 - DNA, 201 bp, Homo sapiens
gagcatggacagctcaatgtcagttcatctgcagcggtggatggggtcataatcagtctatgttgcaattccaagaccaagtcagtagtattacagctggytgatggccagatatttaagtacctttgggagtcaccttctctggctattaaaccatggaagaactctggtggatttcctgttcggtttccttatccatgc

SEQ ID NO: 4512 - DNA, 201 bp, Homo sapiens
gagcaagattgtgtctctgatgtgggaccctgtgaccccataccggctgcatgttctctgtcagggctggcattacctcgcctatgattggcactggacgrctgaccggagcgtgggagataattcaagtgacttgtccaatgtggctgtcattgatggaaacagggtgttggtgacagtcttccggcagactgtggttcc

SEQ ID NO: 4513 - DNA, 201 bp, Homo sapiens
tacacttcccttccttaaagatgaggttaaggtaaatgacttgctctggaatgcagattcctctgtgcttgcagtctggctggaagaccttcagagagaaraaagctccattccgaaaacctgtgttcagctctggactgttggaaactatcactggtatctcaagcaaagtttatccttcagcacctgtgggaagagcaa

SEQ ID NO: 4514 - DNA, 201 bp, Homo sapiens
ggctcggaaggtcagagtgtggaaccgagagtttgctttgcagtcaaccagtgagcctgtggcaggactgggaccagccctggcttggaaaccctcaggcrgtttgattgcatctacacaagataaacccaaccagcaggatattgtgttttttgagaaaaatggactccttcatggacactttacacttcccttccttaa

SEQ ID NO: 4515 - DNA, 201 bp, Homo sapiens; identical to SEQ ID NO: 4486

SEQ ID NO: 4516 - DNA, 201 bp, Homo sapiens; identical to SEQ ID NO: 4485

SEQ ID NO: 4517 - DNA, 201 bp, Homo sapiens
cgcgtgcgcaattcggagccgactctgggtgcggactgtgggagctgactctgggtagccggctgcgcgtggctggggaggcgaggccggacgcacctctstttgggggtcctcagttgtacttgtctcgtgggaatcacttcatcatgcgaaatctgaaattatttcggaccctggagttcagggatattcaaggtccag

SEQ ID NO: 4518 - DNA, 201 bp, Homo sapiens
tccatccttggaggcctagtgccgtcggagagagagcgggagccgcggacagagacgcgtgcgcaattcggagccgactctgggtgcggactgtgggagckgactctgggtagccggctgcgcgtggctggggaggcgaggccggacgcacctctgtttgggggtcctcagttgtacttgtctcgtgggaatcacttcatc

SEQ ID NO: 4519 - DNA, 201 bp, Homo sapiens; identical to SEQ ID NO: 4488

SEQ ID NO: 4520 - DNA, 201 bp, Homo sapiens; identical to SEQ ID NO: 4491

SEQ ID NO: 4521 - DNA, 201 bp, Homo sapiens; identical to SEQ ID NO: 4492

SEQ ID NO: 4522 - DNA, 201 bp, Homo sapiens
agccgactctgggtgcggactgtgggagctgactctgggtagccggctgcgcgtggctggggaggcgaggccggacgcacctctgtttgggggtcctcagstgtacttgtctcgtgggaatcacttcatcatgcgaaatctgaaattatttcggaccctggagttcagggatattcaaggtccagggaatcctcagtgctt

SEQ ID NO: 4523 - DNA, 201 bp, Homo sapiens; identical to SEQ ID NO: 4494

SEQ ID NO: 4524 - DNA, 201 bp, Homo sapiens
tggttggacaaacttatgtttaaagaggcatttgaatgcatgagaaagctgagaatcaatctcaatctgatttatgatcataaccctaaggtgtttcttgraaatgtggaaaccttcattaaacagatagattctgtgaatcatattaacttgttttttacagaattgaagtaaaagatgtcacgaagaccatgtaccctg

SEQ ID NO: 4525 - DNA, 201 bp, Homo sapiens; identical to SEQ ID NO: 4497

SEQ ID NO: 4526 - DNA, 201 bp, Homo sapiens; identical to SEQ ID NO: 4498

SEQ ID NO: 4527 - DNA, 201 bp, Homo sapiens; identical to SEQ ID NO: 4499

SEQ ID NO: 4528 - DNA, 201 bp, Homo sapiens; identical to SEQ ID NO: 4501

SEQ ID NO: 4529 - DNA, 201 bp, Homo sapiens; identical to SEQ ID NO: 4502

SEQ ID NO: 4530 - DNA, 201 bp, Homo sapiens; identical to SEQ ID NO: 4504

SEQ ID NO: 4531 - DNA, 201 bp, Homo sapiens; identical to SEQ ID NO: 4503

SEQ ID NO: 4532 - DNA, 201 bp, Homo sapiens; identical to SEQ ID NO: 4505

SEQ ID NO: 4533 - DNA, 201 bp, Homo sapiens; identical to SEQ ID NO: 4506

SEQ ID NO: 4534 - DNA, 201 bp, Homo sapiens; identical to SEQ ID NO: 4507

SEQ ID NO: 4535 - DNA, 201 bp, Homo sapiens
tgttttttacagaattgaagtaaaagatgtcacgaagaccatgtaccctgcaccagttaccagcagtgtctacctgtccagggatcctgacgggaataaamtagaccttgtctgcgatgctatgagagcagtcatggagagcataaatcctcataaatactgcctatccatacttacatctcatgtaaagaagacaacccc

SEQ ID NO: 4536 - DNA, 201 bp, Homo sapiens; identical to SEQ ID NO: 4509

SEQ ID NO: 4537 - DNA, 201 bp, Homo sapiens; identical to SEQ ID NO: 4510

SEQ ID NO: 4538 - DNA, 201 bp, Homo sapiens; identical to SEQ ID NO: 4512

SEQ ID NO: 4539 - DNA, 201 bp, Homo sapiens; identical to SEQ ID NO: 4511

SEQ ID NO: 4540 - DNA, 201 bp, Homo sapiens; identical to SEQ ID NO: 4514

SEQ ID NO: 4541 - DNA, 201 bp, Homo sapiens; identical to SEQ ID NO: 4513

SEQ ID NO: 4542 - DNA, 201 bp, Homo sapiens; identical to SEQ ID NO: 4485

SEQ ID NO: 4543 - DNA, 201 bp, Homo sapiens; identical to SEQ ID NO: 4486

SEQ ID NO: 4544 - DNA, 201 bp, Homo sapiens; identical to SEQ ID NO: 4487

SEQ ID NO: 4545 - DNA, 201 bp, Homo sapiens; identical to SEQ ID NO: 4517

SEQ ID NO: 4546 - DNA, 201 bp, Homo sapiens; identical to SEQ ID NO: 4488

SEQ ID NO: 4547 - DNA, 201 bp, Homo sapiens; identical to SEQ ID NO: 4518

SEQ ID NO: 4548 - DNA, 201 bp, Homo sapiens; identical to SEQ ID NO: 4491

SEQ ID NO: 4549 - DNA, 201 bp, Homo sapiens; identical to SEQ ID NO: 4492

SEQ ID NO: 4550 - DNA, 201 bp, Homo sapiens; identical to SEQ ID NO: 4522

SEQ ID NO: 4551 - DNA, 201 bp, Homo sapiens; identical to SEQ ID NO: 4494

SEQ ID NO: 4552 - DNA, 201 bp, Homo sapiens; identical to SEQ ID NO: 4495

SEQ ID NO: 4553 - DNA, 201 bp, Homo sapiens; identical to SEQ ID NO: 4496

SEQ ID NO: 4554 - DNA, 201 bp, Homo sapiens; identical to SEQ ID NO: 4497

SEQ ID NO: 4555 - DNA, 201 bp, Homo sapiens; identical to SEQ ID NO: 4498

SEQ ID NO: 4556 - DNA, 201 bp, Homo sapiens; identical to SEQ ID NO: 4499

SEQ ID NO: 4557 - DNA, 201 bp, Homo sapiens; identical to SEQ ID NO: 4501

SEQ ID NO: 4558 - DNA, 201 bp, Homo sapiens; identical to SEQ ID NO: 4502

SEQ ID NO: 4559 - DNA, 201 bp, Homo sapiens; identical to SEQ ID NO: 4503

SEQ ID NO: 4560 - DNA, 201 bp, Homo sapiens; identical to SEQ ID NO: 4504

SEQ ID NO: 4561 - DNA, 201 bp, Homo sapiens; identical to SEQ ID NO: 4505

SEQ ID NO: 4562 - DNA, 201 bp, Homo sapiens; identical to SEQ ID NO: 4506

SEQ ID NO: 4563 - DNA, 201 bp, Homo sapiens; identical to SEQ ID NO: 4507

SEQ ID NO: 4564 - DNA, 201 bp, Homo sapiens; identical to SEQ ID NO: 4508

SEQ ID NO: 4565 - DNA, 201 bp, Homo sapiens; identical to SEQ ID NO: 4509

SEQ ID NO: 4566 - DNA, 201 bp, Homo sapiens; identical to SEQ ID NO: 4510

SEQ ID NO: 4567 - DNA, 201 bp, Homo sapiens; identical to SEQ ID NO: 4511

SEQ ID NO: 4568 - DNA, 201 bp, Homo sapiens; identical to SEQ ID NO: 4512

SEQ ID NO: 4569 - DNA, 201 bp, Homo sapiens; identical to SEQ ID NO: 4513

SEQ ID NO: 4570 - DNA, 201 bp, Homo sapiens; identical to SEQ ID NO: 4514

SEQ ID NO: 4571 - DNA, 201 bp, Homo sapiens
ttgcttatggggagcacctgatgcaggagcacatgtatgagccagcggggctcatgtttgcccgttgcggtgcccacgagaaagctctctcagcctttctsacatgtggcaactggaagcaagccctctgtgtggcagcccagcttaactttaccaaagaccagctggtgggcctcggcagaactctggcagaagctgtgc

SEQ ID NO: 4572 - DNA, 201 bp, Homo sapiens; identical to SEQ ID NO: 4486

SEQ ID NO: 4573 - DNA, 201 bp, Homo sapiens; identical to SEQ ID NO: 4487

SEQ ID NO: 4574 - DNA, 201 bp, Homo sapiens; identical to SEQ ID NO: 4488

SEQ ID NO: 4575 - DNA, 201 bp, Homo sapiens; identical to SEQ ID NO: 4489

SEQ ID NO: 4576 - DNA, 201 bp, Homo sapiens; identical to SEQ ID NO: 4490

SEQ ID NO: 4577 - DNA, 201 bp, Homo sapiens; identical to SEQ ID NO: 4491

SEQ ID NO: 4578 - DNA, 201 bp, Homo sapiens; identical to SEQ ID NO: 4492

SEQ ID NO: 4579 - DNA, 201 bp, Homo sapiens; identical to SEQ ID NO: 4493

SEQ ID NO: 4580 - DNA, 201 bp, Homo sapiens; identical to SEQ ID NO: 4494

SEQ ID NO: 4581 - DNA, 201 bp, Homo sapiens; identical to SEQ ID NO: 4495

SEQ ID NO: 4582 - DNA, 201 bp, Homo sapiens; identical to SEQ ID NO: 4496

SEQ ID NO: 4583 - DNA, 201 bp, Homo sapiens; identical to SEQ ID NO: 4497

SEQ ID NO: 4584 - DNA, 201 bp, Homo sapiens; identical to SEQ ID NO: 4498

SEQ ID NO: 4585 - DNA, 201 bp, Homo sapiens; identical to SEQ ID NO: 4499

SEQ ID NO: 4586 - DNA, 201 bp, Homo sapiens; identical to SEQ ID NO: 4500

SEQ ID NO: 4587 - DNA, 201 bp, Homo sapiens; identical to SEQ ID NO: 4501

SEQ ID NO: 4588 - DNA, 201 bp, Homo sapiens; identical to SEQ ID NO: 4502

SEQ ID NO: 4589 - DNA, 201 bp, Homo sapiens; identical to SEQ ID NO: 4503

SEQ ID NO: 4590 - DNA, 201 bp, Homo sapiens; identical to SEQ ID NO: 4504

SEQ ID NO: 4591 - DNA, 201 bp, Homo sapiens; identical to SEQ ID NO: 4506

SEQ ID NO: 4592 - DNA, 201 bp, Homo sapiens; identical to SEQ ID NO: 4507

SEQ ID NO: 4593 - DNA, 201 bp, Homo sapiens; identical to SEQ ID NO: 4508

SEQ ID NO: 4594 - DNA, 201 bp, Homo sapiens; identical to SEQ ID NO: 4509

SEQ ID NO: 4595 - DNA, 201 bp, Homo sapiens; identical to SEQ ID NO: 4510

SEQ ID NO: 4596 - DNA, 201 bp, Homo sapiens; identical to SEQ ID NO: 4511

SEQ ID NO: 4597 - DNA, 201 bp, Homo sapiens; identical to SEQ ID NO: 4512

SEQ ID NO: 4598 - DNA, 201 bp, Homo sapiens; identical to SEQ ID NO: 4513

SEQ ID NO: 4599 - DNA, 201 bp, Homo sapiens; identical to SEQ ID NO: 4514

SEQ ID NO: 4600 - DNA, 201 bp, Homo sapiens; identical to SEQ ID NO: 4485

SEQ ID NO: 4601 - DNA, 201 bp, Homo sapiens; identical to SEQ ID NO: 4486

SEQ ID NO: 4602 - DNA, 201 bp, Homo sapiens; identical to SEQ ID NO: 4487

SEQ ID NO: 4603 - DNA, 201 bp, Homo sapiens; identical to SEQ ID NO: 4517

SEQ ID NO: 4604 - DNA, 201 bp, Homo sapiens; identical to SEQ ID NO: 4488

SEQ ID NO: 4605 - DNA, 201 bp, Homo sapiens; identical to SEQ ID NO: 4518

SEQ ID NO: 4606 - DNA, 201 bp, Homo sapiens; identical to SEQ ID NO: 4491

SEQ ID NO: 4607 - DNA, 201 bp, Homo sapiens; identical to SEQ ID NO: 4492

SEQ ID NO: 4608 - DNA, 201 bp, Homo sapiens; identical to SEQ ID NO: 4522

SEQ ID NO: 4609 - DNA, 201 bp, Homo sapiens; identical to SEQ ID NO: 4494

SEQ ID NO: 4610 - DNA, 201 bp, Homo sapiens; identical to SEQ ID NO: 4495

SEQ ID NO: 4611 - DNA, 201 bp, Homo sapiens; identical to SEQ ID NO: 4497

SEQ ID NO: 4612 - DNA, 201 bp, Homo sapiens; identical to SEQ ID NO: 4498

SEQ ID NO: 4613 - DNA, 201 bp, Homo sapiens; identical to SEQ ID NO: 4499

SEQ ID NO: 4614 - DNA, 201 bp, Homo sapiens; identical to SEQ ID NO: 4501

SEQ ID NO: 4615 - DNA, 201 bp, Homo sapiens; identical to SEQ ID NO: 4502

SEQ ID NO: 4616 - DNA, 201 bp, Homo sapiens; identical to SEQ ID NO: 4503

SEQ ID NO: 4617 - DNA, 201 bp, Homo sapiens; identical to SEQ ID NO: 4504

SEQ ID NO: 4618 - DNA, 201 bp, Homo sapiens; identical to SEQ ID NO: 4505

SEQ ID NO: 4619 - DNA, 201 bp, Homo sapiens; identical to SEQ ID NO: 4506

SEQ ID NO: 4620 - DNA, 201 bp, Homo sapiens; identical to SEQ ID NO: 4507

SEQ ID NO: 4621 - DNA, 201 bp, Homo sapiens
tcggaagtggttggacaaagaagaagatgtcacgaagaccatgtaccctgcaccagttaccagcagtgtctacctgtccagggatcctgacgggaataaamtagaccttgtctgcgatgctatgagagcagtcatggagagcataaatcctcataaatactgcctatccatacttacatctcatgtaaagaagacaacccc

SEQ ID NO: 4622 - DNA, 201 bp, Homo sapiens; identical to SEQ ID NO: 4509

SEQ ID NO: 4623 - DNA, 201 bp, Homo sapiens; identical to SEQ ID NO: 4510

SEQ ID NO: 4624 - DNA, 201 bp, Homo sapiens; identical to SEQ ID NO: 4511

SEQ ID NO: 4625 - DNA, 201 bp, Homo sapiens; identical to SEQ ID NO: 4512

SEQ ID NO: 4626 - DNA, 201 bp, Homo sapiens; identical to SEQ ID NO: 4513

SEQ ID NO: 4627 - DNA, 201 bp, Homo sapiens; identical to SEQ ID NO: 4514

SEQ ID NO: 4628 - DNA, 201 bp, Homo sapiens
gaaataagtgggtctcgcctgggcagaaaaggaaaagaatccaggcgagagcgcgtcgctcctctgtcactgctgcccccgaggaactccggctgcttctyatcccggccgcctcgcggggccggacgcagtgcccgaggcgccctgcagatggggcgggcagggaacgggcgctccagctgcgggtgacaggcgccggcc

SEQ ID NO: 4629 - DNA, 201 bp, Homo sapiens
tgctcgccttcccccagagccagggcgaaatgatggagctcgacttggtcagcttagtcctgcacattccagtgatcagcatcgtgcgccacgagtttccrcgggagagtcagaatccccttcacctacaactgagtttagaaaattcattaagttctgatgctgatgtcactgtctcaatcctgaccatgaacaactggt

SEQ ID NO: 4630 - DNA, 201 bp, Homo sapiens
acaaagtttcccagagatgcatgaatatatgagaaggtacaatgttccagccacccctgatggagtggagtatctgaagaatgatccagagaaactagacrccttcatcatggacaaagcccttctggattatgaagtgtcaatagatgctgactgcaaacttctcactgtggggaagccatttgccatagaaggatacgg

SEQ ID NO: 4631 - DNA, 201 bp, Homo sapiens
ccatgtttttgagaaggttctggatctctgactccatcctgactgtttagtaagagcatgcttacaccctactgtgaaaaggggaggggatgtggtaagcrgaaacagaagacaggcagcagaggcattaaaaatgcataccatgctttcagaacaaaagctctgggccagaaaggcaatttggctaaaaaatgaataaga

SEQ ID NO: 4632 - DNA, 201 bp, Homo sapiens
tgaagagaaaacctgtttgagaagttttgttttgttttgttttgctttttaataattttagcacacatctgctgactctccttcaacatcctcacccccayccctgggcaccatttaggacaagacttccttatttatcaattacttgatttatcttctcaggactcattgttccacccccaaccaatttgaatgcctaca

SEQ ID NO: 4633 - DNA, 201 bp, Homo sapiens
cccagaagtgaattcttttgtaaagtaaagcacccttttgtaatgcaattaattatcccttaatgtatctgttttgtaagtctgcatttttgtatatcggrtttaccttaagcttctctagtgaggcattctgagcagtggtgatcacatgccagatcgccctgcctatccacaaagtagatgaccaatgcacgctcctca

SEQ ID NO: 4634 - DNA, 201 bp, Homo sapiens
agccttcagatagagggtggtattctggtaaagaagaaagagataagggacgctaccttgcttttctggcacaggaagcacatgataaagcatgctcagakgagctggaacagatatagctacctggttcgtgtaaataagaataatcaaggccccagagtgtgtatgcttccaggtggaggagaaaggggaatctcccaa

SEQ ID NO: 4635 - DNA, 201 bp, Homo sapiens
ttccaccatcgtcagctcagaaaacaactttttcatctggaatcttcaacatgaccccatgggaaagccaatgtggacccgcttgggcagctggcaggggrgaaagattgtcatggactatggaatatggccagagcaggcccagagacacaaaacccacttccaacatccaagtaagctacacttgagagtggttaccct

SEQ ID NO: 4636 - DNA, 201 bp, Homo sapiens
ggttccatcagagtaaaaggttccaccatcgtcagctcagaaaacaactttttcatctggaatcttcaacatgaccccatgggaaagccaatgtggacccrcttgggcagctggcaggggagaaagattgtcatggactatggaatatggccagagcaggcccagagacacaaaacccacttccaacatccaagtaagcta

SEQ ID NO: 4637 - DNA, 201 bp, Homo sapiens
caacagtggaggaaggtggatttggcttcttttccgcaccccgggcgtgaaagccctctccaacgcgaccccaggaaataagtgggtctcgcctgggcagraaaggaaaagaatccaggcgagagcgcgtcgctcctctgtcactgctgcccccgaggaactccggctgcttctcatcccggccgcctcgcggggccggac

SEQ ID NO: 4638 - DNA, 201 bp, Homo sapiens
ttggcttcttttccgcaccccgggcgtgaaagccctctccaacgcgaccccaggaaataagtgggtctcgcctgggcagaaaaggaaaagaatccaggcgrgagcgcgtcgctcctctgtcactgctgcccccgaggaactccggctgcttctcatcccggccgcctcgcggggccggacgcagtgcccgaggcgccctgc

SEQ ID NO: 4639 - DNA, 201 bp, Homo sapiens
atttggcttcttttccgcaccccgggcgtgaaagccctctccaacgcgaccccaggaaataagtgggtctcgcctgggcagaaaaggaaaagaatccaggsgagagcgcgtcgctcctctgtcactgctgcccccgaggaactccggctgcttctcatcccggccgcctcgcggggccggacgcagtgcccgaggcgccct

SEQ ID NO: 4640 - DNA, 201 bp, Homo sapiens
cgatgaactgcatggaggtggaaactacaaatctcacttcaggacaatatttatcaaggtttctagccaataccactttcagaggcctcagtggttccatyagagtaaaaggttccaccatcgtcagctcagaaaacaactttttcatctggaatcttcaacatgaccccatgggaaagccaatgtggacccgcttgggca

SEQ ID NO: 4641 - DNA, 201 bp, Homo sapiens
gattgagcatccttttgtcttcacaagggaggtagatgatgaaggcttgtgccctgctggccaactctgtctagaccccatgactaatgactcttccacaytggacagcctttttagcagcctccatagcagtaatgatacagtgcccattaaattcaagaagtgctgctatggatattgcattgatctgctggaaaagat

SEQ ID NO: 4642 - DNA, 201 bp, Homo sapiens
ccccgtcagcttaccgtatggaatacttccaatctgagtcatgacaaccgacggaaatacatctttagtgatgaggaaggacaaaaccagctgggcatccrgatccaccaggacatccccctccctccaaggagaagagagctccctgccttgcggaccaccaatgggaaagcagactccctaaatgtatctcggaactca

SEQ ID NO: 4643 - DNA, 201 bp, Homo sapiens
agtgctgctatggatattgcattgatctgctggaaaagatagcagaagacatgaactttgacttcgacctctatattgtaggggatggaaagtatggagcmtggaaaaatgggcactggactgggctagtgggtgatctcctgagagggactgcccacatggcagtcacttcctttagcatcaatactgcacggagccagg

SEQ ID NO: 4644 - DNA, 201 bp, Homo sapiens
agaggatgccaggcggagggacctgggagcgggatctgagactgccggaggcgcgctacgctccaacttgcatggcctagagaccgctccagctcctgggwccgcttcaccgagtggagtgaagctgcgcgcgggacctggaggcggagacctcaggcagcggctgcagaggggcgagccgggcgcaggagggggcgcgct

SEQ ID NO: 4645 - DNA, 201 bp, Homo sapiens
atgtgggaccccgtcagcttaccgtatggaatacttccaatctgagtcatgacaaccgacggaaatacatctttagtgatgaggaaggacaaaaccagctrggcatccggatccaccaggacatccccctccctccaaggagaagagagctccctgccttgcggaccaccaatgggaaagcagactccctaaatgtatctc

SEQ ID NO: 4646 - DNA, 201 bp, Homo sapiens
aaattacaacccagtttggggtcatgccccctgaacttcgttgggtgctgggagattcccagaatatggaggaactgaggacagagggtctgcccttaggrctcattgctcatggaaaaacaacacagtctgtctttgagcactacgtacaagatgctatggagctggtcgcaagagctgtagccacagccaccatgatcc

SEQ ID NO: 4647 - DNA, 201 bp, Homo sapiens
gtgctgaagattatgtgagacaaagtttcccagagatgcatgaatatatgagaaggtacaatgttccagccacccctgatggagtggagtatctgaagaaygatccagagaaactagacgccttcatcatggacaaagcccttctggattatgaagtgtcaatagatgctgactgcaaacttctcactgtggggaagccat

SEQ ID NO: 4648 - DNA, 201 bp, Homo sapiens
tggctgcgacatggaaagtatccggcggattttcgaaattacaacccagtttggggtcatgccccctgaacttcgttgggtgctgggagattcccagaatrtggaggaactgaggacagagggtctgcccttaggactcattgctcatggaaaaacaacacagtctgtctttgagcactacgtacaagatgctatggagct

SEQ ID NO: 4649 - DNA, 201 bp, Homo sapiens
tgctgaagattatgtgagacaaagtttcccagagatgcatgaatatatgagaaggtacaatgttccagccacccctgatggagtggagtatctgaagaatratccagagaaactagacgccttcatcatggacaaagcccttctggattatgaagtgtcaatagatgctgactgcaaacttctcactgtggggaagccatt

SEQ ID NO: 4650 - DNA, 201 bp, Homo sapiens
acaattttagcttgttgctgtgccaggaagactggaacatcaccgacttcctcctccttacccagaataattccaagttccaccttggttctatcatcaayatcaccgctaacctcccctccacccaggacctcttgagcttcctacagatccagcttgagagtattaagaacagcacacccacagtggtgatgtttggct

SEQ ID NO: 4651 - DNA, 201 bp, Homo sapiens
atccggatccaccaggacatccccctccctccaaggagaagagagctccctgccttgcggaccaccaatgggaaagcagactccctaaatgtatctcggawctcagtgatgcaggaactctcagagctcgagaagcagattcaggtgatccgtcaggagctgcagctggctgtgagcaggaaaacggagctggaggagtat

SEQ ID NO: 4652 - DNA, 201 bp, Homo sapiens
ccccaggaaataagtgggtctcgcctgggcagaaaaggaaaagaatccaggcgagagcgcgtcgctcctctgtcactgctgcccccgaggaactccggctrcttctcatcccggccgcctcgcggggccggacgcagtgcccgaggcgccctgcagatggggcgggcagggaacgggcgctccagctgcgggtgacaggcg

SEQ ID NO: 4653 - DNA, 201 bp, Homo sapiens
acctccctgactgggggtatcggcaactggagatcgtcggggagaagctgtcccggggctaccacgggagcacggtgtggaacgtggaggagcaccgatayggcgcgagccaggagcagagggagcgggaacgggagctgcactcacctgcgcaggtggacgtcagcaggaacctcagcttcatggcgagattctcggagc

SEQ ID NO: 4654 - DNA, 201 bp, Homo sapiens
tgacctgttaccccttcaaagacgtcaataactggtggattgtaaaggatcccaggaggcaccagctggtggtgagcagccctccgagacctgtgaggcayggggacatggtgcagctggtccacggcatgaccacccgctccctgaacacgcatgatgttgcagcccccctgagcccccattcacaggaggtctcctgct

SEQ ID NO: 4655 - DNA, 201 bp, Homo sapiens
cgcatgatgttgcagcccccctgagcccccattcacaggaggtctcctgctacattgactataacatctccatgcccgcccagaacctctggagactggarattgtgaacagaggatctgacacagacgtctggaagaccatcctctcagaggtccgctttgtgcacgtgaacacttccgctgtcttaaagctgagcgggg

SEQ ID NO: 4656 - DNA, 201 bp, Homo sapiens
agttgtcagaacccagccacagggctcagcccccttcccccacgtcacgtctgcatcactactgtgggtgagcctggacggacgggggctggggctgcccrtggcagcggcaagggatgctttccagagacagccaccacgcaggagggaggatcaccccaggcaacccagacacgggtgttcacatgtgaggctgtgagc

SEQ ID NO: 4657 - DNA, 201 bp, Homo sapiens
gcatgtcattgtctatgacagcgtcaagactggcccttggcaccgtgctgtgtggaaaccctcccctctgagactccactgagacgtggctgagtgaaatyttcctcgtcagtggtcaaggtgtgtcatccatacagctccatgcctttgtcttttttaaatgtaattaaaaaaggaaccaactggcgtttgtagttggtg

SEQ ID NO: 4658 - DNA, 201 bp, Homo sapiens
gcagctgtccatgcctggcacctgcttggagaccagactttgtccaatgtaggtgctgatgtccagtgctgcatgaggccggcctgtatggggcagatgcrgatgtcacagggggtctgtgtgttctgtcacttgctcgcccgagcagtggctttgctggtcatcccggtcgtcctgtacttactgttcttctacgtccac

SEQ ID NO: 4659 - DNA, 201 bp, Homo sapiens
gcagggtggagtttgatctggcagacccgatcctccttcatgaacacccagcaacctgagcaagtcccggccctgccctcagcgagcccggcaggcgtccygggacagctcagtgttggagggccacctgaaccacgagccagggctggggcttgcatgtcattgtctatgacagcgtcaagactggcccttggcaccgtg

SEQ ID NO: 4660 - DNA, 201 bp, Homo sapiens
tctacgtccacttgattctagtcttccgctctgggccccacgaccaaatcatgtccagtgccttccaggccagcttagagggaggactagctcggatcacycagggtcagccactggaggtggcctttgggtcccaggtcactctgaggaacgtctttgggaaacctgtgccctgctggcttcattcccaccaggacacct

SEQ ID NO: 4661 - DNA, 201 bp, Homo sapiens
ccacgaccaaatcatgtccagtgccttccaggccagcttagagggaggactagctcggatcacccagggtcagccactggaggtggcctttgggtcccagrtcactctgaggaacgtctttgggaaacctgtgccctgctggcttcattcccaccaggacacctaccccatgatatatgagaacggccgaggcagctccca

SEQ ID NO: 4662 - DNA, 201 bp, Homo sapiens
agcagaccagggcctggtccttgctaattgctgcagggtggagtttgatctggcagacccgatcctccttcatgaacacccagcaacctgagcaagtcccrgccctgccctcagcgagcccggcaggcgtcccgggacagctcagtgttggagggccacctgaaccacgagccagggctggggcttgcatgtcattgtcta

SEQ ID NO: 4663 - DNA, 201 bp, Homo sapiens
aaagttaattttttctcgacaataaagatattccgtgtcttcacccctgaactaagacacagggagtatttcagaggccagcgtaggagtcatcgacaacraaaagccgagaacccagggccagcagtggagcctcagcagaccagggcctggtccttgctaattgctgcagggtggagtttgatctggcagacccgatcc

SEQ ID NO: 4664 - DNA, 201 bp, Homo sapiens
gggtgtgttcacgtacgtgctcgtgctgggtgttgcagctgtccatgcctggcacctgcttggagaccagactttgtccaatgtaggtgctgatgtccagkgctgcatgaggccggcctgtatggggcagatgcggatgtcacagggggtctgtgtgttctgtcacttgctcgcccgagcagtggctttgctggtcatccc

SEQ ID NO: 4665 - DNA, 201 bp, Homo sapiens
cctgctggcttcattcccaccaggacacctaccccatgatatatgagaacggccgaggcagctcccaccagcaacaggtgacctgttaccccttcaaagaygtcaataactggtggattgtaaaggatcccaggaggcaccagctggtggtgagcagccctccgagacctgtgaggcacggggacatggtgcagctggtcc

SEQ ID NO: 4666 - DNA, 201 bp, Homo sapiens
cgtgctgggtgttgcagctgtccatgcctggcacctgcttggagaccagactttgtccaatgtaggtgctgatgtccagtgctgcatgaggccggcctgtrtggggcagatgcggatgtcacagggggtctgtgtgttctgtcacttgctcgcccgagcagtggctttgctggtcatcccggtcgtcctgtacttactgtt

SEQ ID NO: 4667 - DNA, 201 bp, Homo sapiens
tgcagctgtccatgcctggcacctgcttggagaccagactttgtccaatgtaggtgctgatgtccagtgctgcatgaggccggcctgtatggggcagatgyggatgtcacagggggtctgtgtgttctgtcacttgctcgcccgagcagtggctttgctggtcatcccggtcgtcctgtacttactgttcttctacgtcca

SEQ ID NO: 4668 - DNA, 201 bp, Homo sapiens
tgacgaagtatattatgggcagtacatctctttttacatgaaacaaatcttcttcttggatgacagtgggccgccatttggccacatggtgctggccttgrgaggttatttaggaggattcgatggcaattttttgtggaacagaattggagcagaatacagtagcaacgtgcctgtgtggtccctgcgcctgctgccagc

SEQ ID NO: 4669 - DNA, 201 bp, Homo sapiens
gctggtcatcccggtcgtcctgtacttactgttcttctacgtccacttgattctagtcttccgctctgggccccacgaccaaatcatgtccagtgccttcyaggccagcttagagggaggactagctcggatcacccagggtcagccactggaggtggcctttgggtcccaggtcactctgaggaacgtctttgggaaacc

SEQ ID NO: 4670 - DNA, 201 bp, Homo sapiens
atatgagaacggccgaggcagctcccaccagcaacaggtgacctgttaccccttcaaagacgtcaataactggtggattgtaaaggatcccaggaggcacyagctggtggtgagcagccctccgagacctgtgaggcacggggacatggtgcagctggtccacggcatgaccacccgctccctgaacacgcatgatgttgc

SEQ ID NO: 4671 - DNA, 201 bp, Homo sapiens
ccgtcggcccagtcggacggttccgaggcgttgccgggagccgggcgcggctctgtgtggactcggagaaacgcggggcgtctgcctgagcccgcttttckacaagatgtggggatttttgaagcgccctgtagtggtgacggctgacatcaacttgagccttgtggccctgactgggatggggttactgagccggctgtg

SEQ ID NO: 4672 - DNA, 201 bp, Homo sapiens
ctagtggaacacatgggggtctcattgaaaagctctctgatgagcacctccttttgtgcaaagttaattttttctcgacaataaagatattccgtgtcttyacccctgaactaagacacagggagtatttcagaggccagcgtaggagtcatcgacaacgaaaagccgagaacccagggccagcagtggagcctcagcaga

SEQ ID NO: 4673 - DNA, 201 bp, Homo sapiens
tcttcctcgtcagtggtcaaggtgtgtcatccatacagctccatgcctttgtcttttttaaatgtaattaaaaaaggaaccaactggcgtttgtagttggkgtttgttatttattgattctccctccaaaggggcctaagctcgacaaaaccgttacagttgtcagaacccagccacagggctcagcccccttcccccacg

SEQ ID NO: 4674 - DNA, 201 bp, Homo sapiens
catgaactcaaggcccttcgctggaaagacagctgggacatcttgatccgaaaacactagaacaagagtgtggcaaagaacacccgtgctggggtcgggaygaggttgaagggtcttggtcaatgtacgtaatgagcagggtgggccccacgctgggaggacacgggctgggctgagcagggcctctagtggaacacatgg

SEQ ID NO: 4675 - DNA, 201 bp, Homo sapiens
gccatctacgccctgctgtccttgtggtacctgctccgacggcgaagaaatgtccatgacctccctcaggatgcctggctgcgctgggtgctggctggggygctgtgtgccggtggctgggcagtgaactacctcccgttcttcctgatggagaagacactcttcctctaccactacctgcccgcactcaccttccaaatc

SEQ ID NO: 4676 - DNA, 169 bp, Homo sapiens
cacgtcacgtctgcatcactactgtgggtgagcctggacggacgggggctggggctgcccgtggcagcggcaagggatgctttccagagacagccaccackcaggagggaggatcaccccaggcaacccagacacgggtgttcacatgtgaggctgtgagctccacata

SEQ ID NO: 4677 - DNA, 201 bp, Homo sapiens
tggtgcagctggtccacggcatgaccacccgctccctgaacacgcatgatgttgcagcccccctgagcccccattcacaggaggtctcctgctacattgamtataacatctccatgcccgcccagaacctctggagactggaaattgtgaacagaggatctgacacagacgtctggaagaccatcctctcagaggtccgct

SEQ ID NO: 4678 - DNA, 201 bp, Homo sapiens
tgctggcgctgagaagtgatgactcggaacacaagtacagctccagcccactggagtgggtcaccctggacaccaatattgcctactggctgcaccccagraccagcgctcagatccacctacttggaaacatagtgatctgggtttcgggcagcctcgctctggccatctacgccctgctgtccttgtggtacctgctcc

SEQ ID NO: 4679 - DNA, 201 bp, Homo sapiens; identical to SEQ ID NO: 4653

SEQ ID NO: 4680 - DNA, 201 bp, Homo sapiens; identical to SEQ ID NO: 4654

SEQ ID NO: 4681 - DNA, 201 bp, Homo sapiens; identical to SEQ ID NO: 4655

SEQ ID NO: 4682 - DNA, 201 bp, Homo sapiens; identical to SEQ ID NO: 4656

SEQ ID NO: 4683 - DNA, 201 bp, Homo sapiens; identical to SEQ ID NO: 4657

SEQ ID NO: 4684 - DNA, 201 bp, Homo sapiens; identical to SEQ ID NO: 4658

SEQ ID NO: 4685 - DNA, 201 bp, Homo sapiens; identical to SEQ ID NO: 4659

SEQ ID NO: 4686 - DNA, 201 bp, Homo sapiens; identical to SEQ ID NO: 4660

SEQ ID NO: 4687 - DNA, 201 bp, Homo sapiens; identical to SEQ ID NO: 4661

SEQ ID NO: 4688 - DNA, 201 bp, Homo sapiens; identical to SEQ ID NO: 4662

SEQ ID NO: 4689 - DNA, 201 bp, Homo sapiens; identical to SEQ ID NO: 4663

SEQ ID NO: 4690 - DNA, 201 bp, Homo sapiens; identical to SEQ ID NO: 4664

SEQ ID NO: 4691 - DNA, 201 bp, Homo sapiens; identical to SEQ ID NO: 4665

SEQ ID NO: 4692 - DNA, 201 bp, Homo sapiens; identical to SEQ ID NO: 4666

SEQ ID NO: 4693 - DNA, 201 bp, Homo sapiens; identical to SEQ ID NO: 4667

SEQ ID NO: 4694 - DNA, 201 bp, Homo sapiens; identical to SEQ ID NO: 4668

SEQ ID NO: 4695 - DNA, 201 bp, Homo sapiens; identical to SEQ ID NO: 4669

SEQ ID NO: 4696 - DNA, 201 bp, Homo sapiens; identical to SEQ ID NO: 4670

SEQ ID NO: 4697 - DNA, 125 bp, Homo sapiens
ggcgtctgcctgagcccgcttttckacaagatgtggggatttttgaagcgccctgtagtggtgacggctgacatcaacttgagccttgtggccctgactgggatggggttactgagccggctgtg

SEQ ID NO: 4698 - DNA, 201 bp, Homo sapiens; identical to SEQ ID NO: 4672

SEQ ID NO: 4699 - DNA, 201 bp, Homo sapiens; identical to SEQ ID NO: 4673

SEQ ID NO: 4700 - DNA, 201 bp, Homo sapiens; identical to SEQ ID NO: 4674

SEQ ID NO: 4701 - DNA, 201 bp, Homo sapiens; identical to SEQ ID NO: 4675

SEQ ID NO: 4702 - DNA, 169 bp, Homo sapiens; identical to SEQ ID NO: 4676

SEQ ID NO: 4703 - DNA, 201 bp, Homo sapiens; identical to SEQ ID NO: 4677

SEQ ID NO: 4704 - DNA, 201 bp, Homo sapiens; identical to SEQ ID NO: 4678

SEQ ID NO: 4705 - DNA, 201 bp, Homo sapiens; identical to SEQ ID NO: 4653

SEQ ID NO: 4706 - DNA, 201 bp, Homo sapiens; identical to SEQ ID NO: 4654

SEQ ID NO: 4707 - DNA, 201 bp, Homo sapiens; identical to SEQ ID NO: 4655

SEQ ID NO: 4708 - DNA, 201 bp, Homo sapiens; identical to SEQ ID NO: 4656

SEQ ID NO: 4709 - DNA, 201 bp, Homo sapiens; identical to SEQ ID NO: 4657

SEQ ID NO: 4710 - DNA, 201 bp, Homo sapiens; identical to SEQ ID NO: 4658

SEQ ID NO: 4711 - DNA, 201 bp, Homo sapiens; identical to SEQ ID NO: 4659

SEQ ID NO: 4712 - DNA, 201 bp, Homo sapiens; identical to SEQ ID NO: 4660

SEQ ID NO: 4713 - DNA, 201 bp, Homo sapiens; identical to SEQ ID NO: 4661

SEQ ID NO: 4714 - DNA, 201 bp, Homo sapiens; identical to SEQ ID NO: 4662

SEQ ID NO: 4715 - DNA, 141 bp, Homo sapiens
ccctgaacacacatgccgggcgggagacctgccctgaggctcggcagcccctcagtggggtctgctgctggactccaaatgtgaccgtttgccagaggtcrgcatcccagggtggtcccctggctcagaaaaggtccgctt

SEQ ID NO: 4716 - DNA, 201 bp, Homo sapiens; identical to SEQ ID NO: 4663

SEQ ID NO: 4717 - DNA, 201 bp, Homo sapiens; identical to SEQ ID NO: 4664

SEQ ID NO: 4718 - DNA, 201 bp, Homo sapiens; identical to SEQ ID NO: 4665

SEQ ID NO: 4719 - DNA, 201 bp, Homo sapiens; identical to SEQ ID NO: 4666

SEQ ID NO: 4720 - DNA, 201 bp, Homo sapiens; identical to SEQ ID NO: 4667

SEQ ID NO: 4721 - DNA, 201 bp, Homo sapiens; identical to SEQ ID NO: 4668

SEQ ID NO: 4722 - DNA, 201 bp, Homo sapiens; identical to SEQ ID NO: 4669

SEQ ID NO: 4723 - DNA, 201 bp, Homo sapiens; identical to SEQ ID NO: 4670

SEQ ID NO: 4724 - DNA, 199 bp, Homo sapiens
cgagccccgaagtaagaactccgtggcgcgtgcagccctagggaggaagggcgtgctgcgggtgcagtctcaggggcgtctgcctgagcccgcttttckacaagatgtggggatttttgaagcgccctgtagtggtgacggctgacatcaacttgagccttgtggccctgactgggatggggttactgagccggctgtg

SEQ ID NO: 4725 - DNA, 201 bp, Homo sapiens; identical to SEQ ID NO: 4672

SEQ ID NO: 4726 - DNA, 201 bp, Homo sapiens; identical to SEQ ID NO: 4673

SEQ ID NO: 4727 - DNA, 201 bp, Homo sapiens; identical to SEQ ID NO: 4674

SEQ ID NO: 4728 - DNA, 201 bp, Homo sapiens; identical to SEQ ID NO: 4675

SEQ ID NO: 4729 - DNA, 201 bp, Homo sapiens
cacgtcacgtctgcatcactactgtgggtgagcctggacggacgggggctggggctgcccgtggcagcggcaagggatgctttccagagacagccaccackcaggagggaggatcaccccaggcaacccagacacgggtgttcacatgtgaggctgtgagctccacatacagtgggtgtgggtgggcgtccccaggctcag

SEQ ID NO: 4730 - DNA, 201 bp, Homo sapiens; identical to SEQ ID NO: 4677

SEQ ID NO: 4731 - DNA, 201 bp, Homo sapiens; identical to SEQ ID NO: 4678

SEQ ID NO: 4732 - DNA, 201 bp, Homo sapiens; identical to SEQ ID NO: 4653

SEQ ID NO: 4733 - DNA, 201 bp, Homo sapiens; identical to SEQ ID NO: 4654

SEQ ID NO: 4734 - DNA, 201 bp, Homo sapiens; identical to SEQ ID NO: 4655

SEQ ID NO: 4735 - DNA, 201 bp, Homo sapiens; identical to SEQ ID NO: 4656

SEQ ID NO: 4736 - DNA, 201 bp, Homo sapiens; identical to SEQ ID NO: 4657

SEQ ID NO: 4737 - DNA, 201 bp, Homo sapiens; identical to SEQ ID NO: 4659

SEQ ID NO: 4738 - DNA, 201 bp, Homo sapiens; identical to SEQ ID NO: 4660

SEQ ID NO: 4739 - DNA, 201 bp, Homo sapiens; identical to SEQ ID NO: 4661

SEQ ID NO: 4740 - DNA, 201 bp, Homo sapiens; identical to SEQ ID NO: 4662

SEQ ID NO: 4741 - DNA, 141 bp, Homo sapiens; identical to SEQ ID NO: 4715

SEQ ID NO: 4742 - DNA, 201 bp, Homo sapiens; identical to SEQ ID NO: 4663

SEQ ID NO: 4743 - DNA, 201 bp, Homo sapiens; identical to SEQ ID NO: 4665

SEQ ID NO: 4744 - DNA, 201 bp, Homo sapiens; identical to SEQ ID NO: 4668

SEQ ID NO: 4745 - DNA, 201 bp, Homo sapiens; identical to SEQ ID NO: 4669

SEQ ID NO: 4746 - DNA, 201 bp, Homo sapiens; identical to SEQ ID NO: 4672

SEQ ID NO: 4747 - DNA, 201 bp, Homo sapiens; identical to SEQ ID NO: 4670

SEQ ID NO: 4748 - DNA, 199 bp, Homo sapiens; identical to SEQ ID NO: 4724

SEQ ID NO: 4749 - DNA, 201 bp, Homo sapiens; identical to SEQ ID NO: 4673

SEQ ID NO: 4750 - DNA, 201 bp, Homo sapiens; identical to SEQ ID NO: 4674

SEQ ID NO: 4751 - DNA, 201 bp, Homo sapiens; identical to SEQ ID NO: 4675

SEQ ID NO: 4752 - DNA, 201 bp, Homo sapiens; identical to SEQ ID NO: 4729

SEQ ID NO: 4753 - DNA, 201 bp, Homo sapiens; identical to SEQ ID NO: 4678

SEQ ID NO: 4754 - DNA, 201 bp, Homo sapiens; identical to SEQ ID NO: 4677

SEQ ID NO: 4755 - DNA, 201 bp, Homo sapiens; identical to SEQ ID NO: 4653

SEQ ID NO: 4756 - DNA, 201 bp, Homo sapiens; identical to SEQ ID NO: 4654

SEQ ID NO: 4757 - DNA, 201 bp, Homo sapiens; identical to SEQ ID NO: 4655

SEQ ID NO: 4758 - DNA, 201 bp, Homo sapiens; identical to SEQ ID NO: 4656

SEQ ID NO: 4759 - DNA, 201 bp, Homo sapiens; identical to SEQ ID NO: 4657

SEQ ID NO: 4760 - DNA, 201 bp, Homo sapiens
gcagctgtccatgcctggcacctgcttggagaccagactttgtccaatgtaggtgctgatgtccagtgctgcatgaggccggcctgtatggggcagatgcrgatgtcacagggggtacttggtgaaaagactccaatcctcaatgttttagaagcaggcaggcctgggcagcctcgcctcttggcctctgcaggtgcctct

SEQ ID NO: 4761 - DNA, 201 bp, Homo sapiens; identical to SEQ ID NO: 4659

SEQ ID NO: 4762 - DNA, 201 bp, Homo sapiens; identical to SEQ ID NO: 4660

SEQ ID NO: 4763 - DNA, 201 bp, Homo sapiens; identical to SEQ ID NO: 4661

SEQ ID NO: 4764 - DNA, 201 bp, Homo sapiens; identical to SEQ ID NO: 4662

SEQ ID NO: 4765 - DNA, 201 bp, Homo sapiens; identical to SEQ ID NO: 4663

SEQ ID NO: 4766 - DNA, 201 bp, Homo sapiens
gggtgtgttcacgtacgtgctcgtgctgggtgttgcagctgtccatgcctggcacctgcttggagaccagactttgtccaatgtaggtgctgatgtccagkgctgcatgaggccggcctgtatggggcagatgcggatgtcacagggggtacttggtgaaaagactccaatcctcaatgttttagaagcaggcaggcctgg

SEQ ID NO: 4767 - DNA, 201 bp, Homo sapiens
cgtgctgggtgttgcagctgtccatgcctggcacctgcttggagaccagactttgtccaatgtaggtgctgatgtccagtgctgcatgaggccggcctgtrtggggcagatgcggatgtcacagggggtacttggtgaaaagactccaatcctcaatgttttagaagcaggcaggcctgggcagcctcgcctcttggcctc

SEQ ID NO: 4768 - DNA, 201 bp, Homo sapiens; identical to SEQ ID NO: 4665

SEQ ID NO: 4769 - DNA, 201 bp, Homo sapiens
cttggtgaaaagactccaatcctcaatgttttagaagcaggcaggcctgggcagcctcgcctcttggcctctgcaggtgcctctgtatgggaggccagagtttctgtcactaactttttctaagctcacaatgtctagaggtgggtgcgcttttccacgcagtggaacatgacttttctttgaatctctggcaggtctgtg

SEQ ID NO: 4770 - DNA, 201 bp, Homo sapiens
ctgggcagcctcgcctcttggcctctgcaggtgcctctgtatgggaggccagagtttctgtcactaactttttctaagctcacaatgtctagaggtgggtrcgcttttccacgcagtggaacatgacttttctttgaatctctggcaggtctgtgtgttctgtcacttgctcgcccgagcagtggctttgctggtcatccc

SEQ ID NO: 4771 - DNA, 201 bp, Homo sapiens
tgcagctgtccatgcctggcacctgcttggagaccagactttgtccaatgtaggtgctgatgtccagtgctgcatgaggccggcctgtatggggcagatgyggatgtcacagggggtacttggtgaaaagactccaatcctcaatgttttagaagcaggcaggcctgggcagcctcgcctcttggcctctgcaggtgcctc

SEQ ID NO: 4772 - DNA, 201 bp, Homo sapiens; identical to SEQ ID NO: 4668

SEQ ID NO: 4773 - DNA, 201 bp, Homo sapiens; identical to SEQ ID NO: 4669

SEQ ID NO: 4774 - DNA, 201 bp, Homo sapiens; identical to SEQ ID NO: 4671

SEQ ID NO: 4775 - DNA, 201 bp, Homo sapiens; identical to SEQ ID NO: 4670

SEQ ID NO: 4776 - DNA, 201 bp, Homo sapiens; identical to SEQ ID NO: 4672

SEQ ID NO: 4777 - DNA, 201 bp, Homo sapiens; identical to SEQ ID NO: 4673

SEQ ID NO: 4778 - DNA, 201 bp, Homo sapiens; identical to SEQ ID NO: 4674

SEQ ID NO: 4779 - DNA, 201 bp, Homo sapiens; identical to SEQ ID NO: 4675

SEQ ID NO: 4780 - DNA, 169 bp, Homo sapiens; identical to SEQ ID NO: 4676

SEQ ID NO: 4781 - DNA, 201 bp, Homo sapiens; identical to SEQ ID NO: 4678

SEQ ID NO: 4782 - DNA, 201 bp, Homo sapiens; identical to SEQ ID NO: 4677

SEQ ID NO: 4783 - DNA, 201 bp, Homo sapiens; identical to SEQ ID NO: 4653

SEQ ID NO: 4784 - DNA, 201 bp, Homo sapiens; identical to SEQ ID NO: 4654

SEQ ID NO: 4785 - DNA, 201 bp, Homo sapiens; identical to SEQ ID NO: 4655

SEQ ID NO: 4786 - DNA, 201 bp, Homo sapiens; identical to SEQ ID NO: 4656

SEQ ID NO: 4787 - DNA, 201 bp, Homo sapiens; identical to SEQ ID NO: 4657

SEQ ID NO: 4788 - DNA, 201 bp, Homo sapiens; identical to SEQ ID NO: 4658

SEQ ID NO: 4789 - DNA, 201 bp, Homo sapiens; identical to SEQ ID NO: 4659

SEQ ID NO: 4790 - DNA, 201 bp, Homo sapiens; identical to SEQ ID NO: 4660

SEQ ID NO: 4791 - DNA, 201 bp, Homo sapiens; identical to SEQ ID NO: 4661

SEQ ID NO: 4792 - DNA, 201 bp, Homo sapiens; identical to SEQ ID NO: 4662

SEQ ID NO: 4793 - DNA, 201 bp, Homo sapiens; identical to SEQ ID NO: 4663

SEQ ID NO: 4794 - DNA, 201 bp, Homo sapiens; identical to SEQ ID NO: 4664

SEQ ID NO: 4795 - DNA, 201 bp, Homo sapiens; identical to SEQ ID NO: 4665

SEQ ID NO: 4796 - DNA, 201 bp, Homo sapiens; identical to SEQ ID NO: 4666

SEQ ID NO: 4797 - DNA, 201 bp, Homo sapiens; identical to SEQ ID NO: 4667

SEQ ID NO: 4798 - DNA, 201 bp, Homo sapiens; identical to SEQ ID NO: 4668

SEQ ID NO: 4799 - DNA, 201 bp, Homo sapiens; identical to SEQ ID NO: 4669

SEQ ID NO: 4800 - DNA, 201 bp, Homo sapiens; identical to SEQ ID NO: 4670

SEQ ID NO: 4801 - DNA, 199 bp, Homo sapiens; identical to SEQ ID NO: 4724

SEQ ID NO: 4802 - DNA, 201 bp, Homo sapiens; identical to SEQ ID NO: 4672

SEQ ID NO: 4803 - DNA, 201 bp, Homo sapiens; identical to SEQ ID NO: 4673

SEQ ID NO: 4804 - DNA, 201 bp, Homo sapiens; identical to SEQ ID NO: 4674

SEQ ID NO: 4805 - DNA, 201 bp, Homo sapiens; identical to SEQ ID NO: 4675

SEQ ID NO: 4806 - DNA, 169 bp, Homo sapiens; identical to SEQ ID NO: 4676

SEQ ID NO: 4807 - DNA, 201 bp, Homo sapiens; identical to SEQ ID NO: 4677

SEQ ID NO: 4808 - DNA, 201 bp, Homo sapiens; identical to SEQ ID NO: 4678

SEQ ID NO: 4809 - DNA, 201 bp, Homo sapiens; identical to SEQ ID NO: 4653

SEQ ID NO: 4810 - DNA, 201 bp, Homo sapiens; identical to SEQ ID NO: 4654

SEQ ID NO: 4811 - DNA, 201 bp, Homo sapiens; identical to SEQ ID NO: 4655

SEQ ID NO: 4812 - DNA, 201 bp, Homo sapiens; identical to SEQ ID NO: 4656

SEQ ID NO: 4813 - DNA, 201 bp, Homo sapiens; identical to SEQ ID NO: 4657

SEQ ID NO: 4814 - DNA, 201 bp, Homo sapiens; identical to SEQ ID NO: 4658

SEQ ID NO: 4815 - DNA, 201 bp, Homo sapiens; identical to SEQ ID NO: 4659

SEQ ID NO: 4816 - DNA, 201 bp, Homo sapiens; identical to SEQ ID NO: 4660

SEQ ID NO: 4817 - DNA, 201 bp, Homo sapiens; identical to SEQ ID NO: 4661

SEQ ID NO: 4818 - DNA, 201 bp, Homo sapiens; identical to SEQ ID NO: 4662

SEQ ID NO: 4819 - DNA, 201 bp, Homo sapiens; identical to SEQ ID NO: 4663

SEQ ID NO: 4820 - DNA, 201 bp, Homo sapiens; identical to SEQ ID NO: 4664

SEQ ID NO: 4821 - DNA, 201 bp, Homo sapiens; identical to SEQ ID NO: 4665

SEQ ID NO: 4822 - DNA, 201 bp, Homo sapiens; identical to SEQ ID NO: 4666

SEQ ID NO: 4823 - DNA, 201 bp, Homo sapiens; identical to SEQ ID NO: 4667

SEQ ID NO: 4824 - DNA, 201 bp, Homo sapiens; identical to SEQ ID NO: 4668

SEQ ID NO: 4825 - DNA, 201 bp, Homo sapiens; identical to SEQ ID NO: 4669

SEQ ID NO: 4826 - DNA, 201 bp, Homo sapiens; identical to SEQ ID NO: 4670

SEQ ID NO: 4827 - DNA, 201 bp, Homo sapiens; identical to SEQ ID NO: 4672

SEQ ID NO: 4828 - DNA, 201 bp, Homo sapiens; identical to SEQ ID NO: 4673

SEQ ID NO: 4829 - DNA, 201 bp, Homo sapiens; identical to SEQ ID NO: 4674

SEQ ID NO: 4830 - DNA, 201 bp, Homo sapiens; identical to SEQ ID NO: 4675

SEQ ID NO: 4831 - DNA, 169 bp, Homo sapiens; identical to SEQ ID NO: 4676

SEQ ID NO: 4832 - DNA, 201 bp, Homo sapiens; identical to SEQ ID NO: 4677

SEQ ID NO: 4833 - DNA, 201 bp, Homo sapiens; identical to SEQ ID NO: 4678

SEQ ID NO: 4834 - DNA, 201 bp, Homo sapiens; identical to SEQ ID NO: 4653

SEQ ID NO: 4835 - DNA, 201 bp, Homo sapiens; identical to SEQ ID NO: 4655

SEQ ID NO: 4836 - DNA, 201 bp, Homo sapiens; identical to SEQ ID NO: 4654

SEQ ID NO: 4837 - DNA, 201 bp, Homo sapiens; identical to SEQ ID NO: 4656

SEQ ID NO: 4838 - DNA, 201 bp, Homo sapiens; identical to SEQ ID NO: 4657

SEQ ID NO: 4839 - DNA, 201 bp, Homo sapiens; identical to SEQ ID NO: 4760

SEQ ID NO: 4840 - DNA, 201 bp, Homo sapiens; identical to SEQ ID NO: 4659

SEQ ID NO: 4841 - DNA, 201 bp, Homo sapiens; identical to SEQ ID NO: 4660

SEQ ID NO: 4842 - DNA, 201 bp, Homo sapiens
ccacgaccaaatcatgtccagtgccttccaggccagcttagagggaggactagctcggatcacccagggtcagccactggaggtggcctttgggtcccagrtcactctgaggaacgtctttgggaaacctgtgccctgctggcttcattcccaccaggacacctaccccatgatgtaagatatgagaacggccgaggcagc

SEQ ID NO: 4843 - DNA, 201 bp, Homo sapiens; identical to SEQ ID NO: 4662

SEQ ID NO: 4844 - DNA, 201 bp, Homo sapiens; identical to SEQ ID NO: 4663

SEQ ID NO: 4845 - DNA, 201 bp, Homo sapiens; identical to SEQ ID NO: 4766

SEQ ID NO: 4846 - DNA, 201 bp, Homo sapiens; identical to SEQ ID NO: 4767

SEQ ID NO: 4847 - DNA, 201 bp, Homo sapiens
tggcttcattcccaccaggacacctaccccatgatgtaagatatgagaacggccgaggcagctcccaccagcaacaggtgacctgttaccccttcaaagaygtcaataactggtggattgtaaaggatcccaggaggcaccagctggtggtgagcagccctccgagacctgtgaggcacggggacatggtgcagctggtcc

SEQ ID NO: 4848 - DNA, 201 bp, Homo sapiens; identical to SEQ ID NO: 4769

SEQ ID NO: 4849 - DNA, 201 bp, Homo sapiens; identical to SEQ ID NO: 4770

SEQ ID NO: 4850 - DNA, 201 bp, Homo sapiens; identical to SEQ ID NO: 4771

SEQ ID NO: 4851 - DNA, 201 bp, Homo sapiens; identical to SEQ ID NO: 4668

SEQ ID NO: 4852 - DNA, 201 bp, Homo sapiens; identical to SEQ ID NO: 4669

SEQ ID NO: 4853 - DNA, 199 bp, Homo sapiens; identical to SEQ ID NO: 4724

SEQ ID NO: 4854 - DNA, 201 bp, Homo sapiens; identical to SEQ ID NO: 4670

SEQ ID NO: 4855 - DNA, 201 bp, Homo sapiens; identical to SEQ ID NO: 4672

SEQ ID NO: 4856 - DNA, 201 bp, Homo sapiens; identical to SEQ ID NO: 4673

SEQ ID NO: 4857 - DNA, 201 bp, Homo sapiens; identical to SEQ ID NO: 4674

SEQ ID NO: 4858 - DNA, 201 bp, Homo sapiens; identical to SEQ ID NO: 4675

SEQ ID NO: 4859 - DNA, 169 bp, Homo sapiens; identical to SEQ ID NO: 4676

SEQ ID NO: 4860 - DNA, 201 bp, Homo sapiens; identical to SEQ ID NO: 4678

SEQ ID NO: 4861 - DNA, 201 bp, Homo sapiens; identical to SEQ ID NO: 4677

SEQ ID NO: 4862 - DNA, 201 bp, Homo sapiens
ttgaggagacagcctagacactggctggcctgatgttttgttgacagtgaacccacagtgggagagagttttttccagtctgatctggttcttacacactcacacacataactcaaaagttttgtgaacaagtactttccttttttacatgttacatgtcctcatgttttctgttttctgtttcataacacaaggctggtt

SEQ ID NO: 4863 - DNA, 201 bp, Homo sapiens
gctcacagcctcacatgtgaacacccgtgtctgggttgcctggggtgatcctccctcctgcgtggtggctgtctctggaaagcatcccttgccgctgccaygggcagccccagcccccgtccgtccaggctcacccacagtagtgatgcagacgtgacgtgggggaagggggctgagccctgtggctgggttctgacaact

SEQ ID NO: 4864 - DNA, 201 bp, Homo sapiens
attgaggagacagcctagacactggctggcctgatgttttgttgacagtgaacccacagtgggagagagttttttccagtctgatctggttcttacacactcacacacataactcaaaagttttgtgaacaagtactttccttttttacatgttacatgtcctcatgttttctgttttctgtttcataacacaaggctggt

SEQ ID NO: 4865 - DNA, 201 bp, Homo sapiens
tgtctcgaagagttctccgggacgtgcgccgagggagggacctggagcagattctgacgcagtacaccaccttcgtgaagccggccttcgaggagttctgyctgccgacaaagaagtatgccgatgtgatcatcccgcgaggagtggacaatatggttgccatcaacctgatcgtgcagcacatccaggacattctgaatg

SEQ ID NO: 4866 - DNA, 201 bp, Homo sapiens
gaggagacagcctagacactggctggcctgatgttttgttgacagtgaacccacagtgggagagagttttttccagtctgatctggttcttacacactcacacacataactcaaaagttttgtgaacaagtactttccttttttacatgttacatgtcctcatgttttctgttttctgtttcataacacaaggctggttgt

SEQ ID NO: 4867 - DNA, 201 bp, Homo sapiens
tgaggagacagcctagacactggctggcctgatgttttgttgacagtgaacccacagtgggagagagttttttccagtctgatctggttcttacacactcacacacataactcaaaagttttgtgaacaagtactttccttttttacatgttacatgtcctcatgttttctgttttctgtttcataacacaaggctggttg

SEQ ID NO: 4868 - DNA, 117 bp, Homo sapiens
cgtgggggaagggggctgagccctgtggctgggttctgacaactgtaacggttttgtcgagcttaggcccctttggagggagaatcaataaataacaaacmccaactacaaacgcca

SEQ ID NO: 4869 - DNA, 201 bp, Homo sapiens
gacattctgaatggtgacatctgcaaatggcaccgaggagggtccaatgggcggagctacaagcggaccttttctgagccaggggaccaccctgggatgcygacctctggcaaacggtcacatttggagtccagcagcagaccccactgaggggctgccgagcctcagggcaggtctcccgcccggcatgtgtgttcaggg

SEQ ID NO: 4870 - DNA, 201 bp, Homo sapiens
gggacctggagcagattctgacgcagtacaccaccttcgtgaagccggccttcgaggagttctgcctgccgacaaagaagtatgccgatgtgatcatcccrcgaggagtggacaatatggttgccatcaacctgatcgtgcagcacatccaggacattctgaatggtgacatctgcaaatggcaccgaggagggtccaatg

SEQ ID NO: 4871 - DNA, 201 bp, Homo sapiens
gtggctagtggccatatgcagggaatggtgcttctggctgtggcacgcactggatcacccaggtcccagcagacatggccgcccaaagtcagcaagcctcytttgtgctatgtggagctcacagcctcacatgtgaacacccgtgtctgggttgcctggggtgatcctccctcctgcgtggtggctgtctctggaaagcat

SEQ ID NO: 4872 - DNA, 201 bp, Homo sapiens
ggccgcccaaagtcagcaagcctcctttgtgctatgtggagctcacagcctcacatgtgaacacccgtgtctgggttgcctggggtgatcctccctcctgmgtggtggctgtctctggaaagcatcccttgccgctgccacgggcagccccagcccccgtccgtccaggctcacccacagtagtgatgcagacgtgacgtg

SEQ ID NO: 4873 - DNA, 201 bp, Homo sapiens; identical to SEQ ID NO: 4862

SEQ ID NO: 4874 - DNA, 201 bp, Homo sapiens; identical to SEQ ID NO: 4864

SEQ ID NO: 4875 - DNA, 201 bp, Homo sapiens
atggttgccatcaacctgatcgtgcagcacatccaggacattctgaatggtgacatctgcaaatggcaccgaggagggtccaatgggcggagctacaagcygacctctggcaaacggtcacatttggagtccagcagcagaccccactgaggggctgccgagcctcagggcaggtctcccgcccggcatgtgtgttcaggg

SEQ ID NO: 4876 - DNA, 201 bp, Homo sapiens
ggagatccgggacatgttccacctgcgcctcttcgtggacaccgactccgacgtcaggctgtctcgaagagacaaagaagtatgccgatgtgatcatcccrcgaggagtggacaatatggttgccatcaacctgatcgtgcagcacatccaggacattctgaatggtgacatctgcaaatggcaccgaggagggtccaatg

SEQ ID NO: 4877 - DNA, 201 bp, Homo sapiens; identical to SEQ ID NO: 4866

SEQ ID NO: 4878 - DNA, 201 bp, Homo sapiens; identical to SEQ ID NO: 4867

SEQ ID NO: 4879 - DNA, 201 bp, Homo sapiens
tccagcaaccactccagcaaataaaaagaatcgattacctatagcaactcggagcagaagccgcaccaatatgctaatggacctacatatggaccatgaargatcatctcaagaaaccatccaggaggtgcaaccagaagaggtgttggtcatttccttaggtacaggtccccagcttactccagggatgatgtcagaaaa

SEQ ID NO: 4880 - DNA, 201 bp, Homo sapiens
ctttggtgaacaaatttattggttatctcaaacagaacacatattgttttccacatagtttaaggtggatcgtgtctcagatgtacaaaaccctctcctgygtagataggctggaagttggggaggtcagggcaatgtgtactgatctcctgttggcctgcttcatttgtcctgcagttgtcaatccagaacaatatggaa

SEQ ID NO: 4881 - DNA, 201 bp, Homo sapiens
agttcgaagcaggagctctgatatagtatcttctgtccggagacccatgagtgaccccagctggaaccggcgtccaggaaatgaagagcgagaactccctycagctgcagccattggtgctacttctttggtggctgcacctcattcatcatcttcatccccgagtaaggactcctcaagaggagagactgaagaacgcaa

SEQ ID NO: 4882 - DNA, 201 bp, Homo sapiens
aggtaggccgccttttgcagcagttagcaatgactggctctgaagagggagatccccgaacaaagagcagccttggaaagtttgacaaaagctgtgttgcmgctttccttgatgttgtgattgggggccgtgcagtggagacccctccattgtcttccgtcaatcttctggaaggattgagcagaactgtggtttatataa

SEQ ID NO: 4883 - DNA, 201 bp, Homo sapiens
cagccattggtgctacttctttggtggctgcacctcattcatcatcttcatccccgagtaaggactcctcaagaggagagactgaagaacgcaaagatagrgatgatgagaaatcagacaggaacagaccttggtggagaaaacgttttgtttcagccatgcctaaagctcctataccatttagaaagaaagaaaaacaag

SEQ ID NO: 4884 - DNA, 201 bp, Homo sapiens
tagcacgatttaatctgatgcaggtaggccgccttttgcagcagttagcaatgactggctctgaagagggagatccccgaacaaagagcagccttggaaartttgacaaaagctgtgttgccgctttccttgatgttgtgattgggggccgtgcagtggagacccctccattgtcttccgtcaatcttctggaaggattga

SEQ ID NO: 4885 - DNA, 201 bp, Homo sapiens
cagagtctcaccctgttgcccaggctggagtgcaatggtgcgatcttggctcactgcaacctccacctcccagttcaagtgattcccctgcctcagcctcscgagtagctaggactacaggcgcatgtcaccaagcccggctaatttttgtatttttagtagaaacggggtttcaccatgttggccaggatgatcctcaat

SEQ ID NO: 4886 - DNA, 201 bp, Homo sapiens
aaaatttaagctgagcttaaaagcaaaaaacaaaaagtacacagaaatatttattaaaatgtaatacagtttattgaactttctaggtatggagtttgatrgacagggctgcctttaatgagtgtgaaggtcactaagtcacttagacatctcaccgtggaagtttgtgagcctgcattaggagatagactgattaccata

SEQ ID NO: 4887 - DNA, 201 bp, Homo sapiens
tagattttctttatgcctccaccccttcttattcatttactttacaataccaaaataacaaattgcataggagtgtgggatgtggtttctgccttctagakagagatcagaattaaactagtactatgaaatgtccttttgaatgttaggtcaagaaatccatgtacagagtcgtgcacttcattggctgtaactgtcaaa

SEQ ID NO: 4888 - DNA, 201 bp, Homo sapiens
ataaaaagaatcgattacctatagcaactcggagcagaagccgcaccaatatgctaatggacctacatatggaccatgaaggatcatctcaagaaaccatycaggaggtgcaaccagaagaggtgttggtcatttccttaggtacaggtccccagcttactccagggatgatgtcagaaaatgaggtcctaaacatgcagc

SEQ ID NO: 4889 - DNA, 201 bp, Homo sapiens
gaggttctctccatctcagcaggaaaaactctttggagagaagggctcagatagattcaggcaaaaagttcaagaaatggtggagtccaatgaagcaaagytagtggctttggtgaacaaatttattggttatctcaaacagaacacatattgttttccacatagtttaaggtggatcgtgtctcagatgtacaaaaccct

SEQ ID NO: 4890 - DNA, 201 bp, Homo sapiens; identical to SEQ ID NO: 4879

SEQ ID NO: 4891 - DNA, 201 bp, Homo sapiens; identical to SEQ ID NO: 4880

SEQ ID NO: 4892 - DNA, 201 bp, Homo sapiens; identical to SEQ ID NO: 4881

SEQ ID NO: 4893 - DNA, 201 bp, Homo sapiens; identical to SEQ ID NO: 4882

SEQ ID NO: 4894 - DNA, 201 bp, Homo sapiens; identical to SEQ ID NO: 4883

SEQ ID NO: 4895 - DNA, 201 bp, Homo sapiens; identical to SEQ ID NO: 4884

SEQ ID NO: 4896 - DNA, 201 bp, Homo sapiens
cagagtctcaccctgttgcccaggctggagtgcaatggtgcgatcttggctcactgcaacctccacctcccagttcaagtgattcccctgcctcagcctcscgagtagctaggactacaggcgcatgtcaccaagcccggctaatttttgtatttttagtagaaacggggtttcaccatgttggccaggatgatccctcca

SEQ ID NO: 4897 - DNA, 201 bp, Homo sapiens; identical to SEQ ID NO: 4886

SEQ ID NO: 4898 - DNA, 201 bp, Homo sapiens
ttggccaggatgatccctccaccccttcttattcatttactttacaataccaaaataacaaattgcataggagtgtgggatgtggtttctgccttctagakagagatcagaattaaactagtactatgaaatgtccttttgaatgttaggtcaagaaatccatgtacagagtcgtgcacttcattggctgtaactgtcaaa

SEQ ID NO: 4899 - DNA, 201 bp, Homo sapiens; identical to SEQ ID NO: 4888

SEQ ID NO: 4900 - DNA, 201 bp, Homo sapiens; identical to SEQ ID NO: 4889

SEQ ID NO: 4901 - DNA, 201 bp, Homo sapiens; identical to SEQ ID NO: 4879

SEQ ID NO: 4902 - DNA, 201 bp, Homo sapiens; identical to SEQ ID NO: 4880

SEQ ID NO: 4903 - DNA, 201 bp, Homo sapiens; identical to SEQ ID NO: 4881

SEQ ID NO: 4904 - DNA, 201 bp, Homo sapiens; identical to SEQ ID NO: 4882

SEQ ID NO: 4905 - DNA, 201 bp, Homo sapiens; identical to SEQ ID NO: 4883

SEQ ID NO: 4906 - DNA, 201 bp, Homo sapiens; identical to SEQ ID NO: 4884

SEQ ID NO: 4907 - DNA, 201 bp, Homo sapiens; identical to SEQ ID NO: 4896

SEQ ID NO: 4908 - DNA, 201 bp, Homo sapiens; identical to SEQ ID NO: 4886

SEQ ID NO: 4909 - DNA, 201 bp, Homo sapiens; identical to SEQ ID NO: 4898

SEQ ID NO: 4910 - DNA, 201 bp, Homo sapiens; identical to SEQ ID NO: 4888

SEQ ID NO: 4911 - DNA, 201 bp, Homo sapiens; identical to SEQ ID NO: 4889

SEQ ID NO: 4912 - DNA, 201 bp, Homo sapiens; identical to SEQ ID NO: 4879

SEQ ID NO: 4913 - DNA, 201 bp, Homo sapiens; identical to SEQ ID NO: 4880

SEQ ID NO: 4914 - DNA, 201 bp, Homo sapiens; identical to SEQ ID NO: 4881

SEQ ID NO: 4915 - DNA, 201 bp, Homo sapiens; identical to SEQ ID NO: 4882

SEQ ID NO: 4916 - DNA, 201 bp, Homo sapiens
cagccattggtgctacttctttggtggctgcacctcattcatcatcttcatccccgagtaaggactcctcaagaggagagactgaagaacgcaaagatagrgatgatgagaaatcagacaggaacagaccttggtggagaaaacgttttgtttcagccatgcctaaagatgatcccagccctagactcagtgcacaagctc

SEQ ID NO: 4917 - DNA, 201 bp, Homo sapiens; identical to SEQ ID NO: 4884

SEQ ID NO: 4918 - DNA, 201 bp, Homo sapiens; identical to SEQ ID NO: 4896

SEQ ID NO: 4919 - DNA, 201 bp, Homo sapiens; identical to SEQ ID NO: 4886

SEQ ID NO: 4920 - DNA, 201 bp, Homo sapiens; identical to SEQ ID NO: 4898

SEQ ID NO: 4921 - DNA, 201 bp, Homo sapiens; identical to SEQ ID NO: 4888

SEQ ID NO: 4922 - DNA, 201 bp, Homo sapiens; identical to SEQ ID NO: 4889

SEQ ID NO: 4923 - DNA, 201 bp, Homo sapiens; identical to SEQ ID NO: 4879

SEQ ID NO: 4924 - DNA, 201 bp, Homo sapiens; identical to SEQ ID NO: 4880

SEQ ID NO: 4925 - DNA, 201 bp, Homo sapiens; identical to SEQ ID NO: 4881

SEQ ID NO: 4926 - DNA, 201 bp, Homo sapiens; identical to SEQ ID NO: 4882

SEQ ID NO: 4927 - DNA, 201 bp, Homo sapiens; identical to SEQ ID NO: 4916

SEQ ID NO: 4928 - DNA, 201 bp, Homo sapiens; identical to SEQ ID NO: 4884

SEQ ID NO: 4929 - DNA, 201 bp, Homo sapiens; identical to SEQ ID NO: 4885

SEQ ID NO: 4930 - DNA, 201 bp, Homo sapiens; identical to SEQ ID NO: 4886

SEQ ID NO: 4931 - DNA, 201 bp, Homo sapiens; identical to SEQ ID NO: 4887

SEQ ID NO: 4932 - DNA, 201 bp, Homo sapiens; identical to SEQ ID NO: 4888

SEQ ID NO: 4933 - DNA, 201 bp, Homo sapiens; identical to SEQ ID NO: 4889

SEQ ID NO: 4934 - DNA, 201 bp, Homo sapiens; identical to SEQ ID NO: 4879

SEQ ID NO: 4935 - DNA, 201 bp, Homo sapiens; identical to SEQ ID NO: 4880

SEQ ID NO: 4936 - DNA, 201 bp, Homo sapiens; identical to SEQ ID NO: 4881

SEQ ID NO: 4937 - DNA, 201 bp, Homo sapiens; identical to SEQ ID NO: 4882

SEQ ID NO: 4938 - DNA, 201 bp, Homo sapiens; identical to SEQ ID NO: 4883

SEQ ID NO: 4939 - DNA, 201 bp, Homo sapiens; identical to SEQ ID NO: 4884

SEQ ID NO: 4940 - DNA, 201 bp, Homo sapiens; identical to SEQ ID NO: 4896

SEQ ID NO: 4941 - DNA, 201 bp, Homo sapiens; identical to SEQ ID NO: 4886

SEQ ID NO: 4942 - DNA, 201 bp, Homo sapiens; identical to SEQ ID NO: 4898

SEQ ID NO: 4943 - DNA, 201 bp, Homo sapiens; identical to SEQ ID NO: 4888

SEQ ID NO: 4944 - DNA, 201 bp, Homo sapiens; identical to SEQ ID NO: 4889

SEQ ID NO: 4945 - DNA, 201 bp, Homo sapiens; identical to SEQ ID NO: 4879

SEQ ID NO: 4946 - DNA, 201 bp, Homo sapiens; identical to SEQ ID NO: 4880

SEQ ID NO: 4947 - DNA, 201 bp, Homo sapiens; identical to SEQ ID NO: 4881

SEQ ID NO: 4948 - DNA, 201 bp, Homo sapiens; identical to SEQ ID NO: 4882

SEQ ID NO: 4949 - DNA, 201 bp, Homo sapiens; identical to SEQ ID NO: 4883

SEQ ID NO: 4950 - DNA, 201 bp, Homo sapiens; identical to SEQ ID NO: 4884

SEQ ID NO: 4951 - DNA, 201 bp, Homo sapiens; identical to SEQ ID NO: 4885

SEQ ID NO: 4952 - DNA, 201 bp, Homo sapiens; identical to SEQ ID NO: 4886

SEQ ID NO: 4953 - DNA, 201 bp, Homo sapiens; identical to SEQ ID NO: 4887

SEQ ID NO: 4954 - DNA, 201 bp, Homo sapiens; identical to SEQ ID NO: 4888

SEQ ID NO: 4955 - DNA, 201 bp, Homo sapiens; identical to SEQ ID NO: 4889

SEQ ID NO: 4956 - DNA, 201 bp, Homo sapiens; identical to SEQ ID NO: 4879

SEQ ID NO: 4957 - DNA, 201 bp, Homo sapiens; identical to SEQ ID NO: 4880

SEQ ID NO: 4958 - DNA, 201 bp, Homo sapiens; identical to SEQ ID NO: 4881

SEQ ID NO: 4959 - DNA, 201 bp, Homo sapiens; identical to SEQ ID NO: 4882

SEQ ID NO: 4960 - DNA, 201 bp, Homo sapiens; identical to SEQ ID NO: 4883

SEQ ID NO: 4961 - DNA, 201 bp, Homo sapiens; identical to SEQ ID NO: 4884

SEQ ID NO: 4962 - DNA, 201 bp, Homo sapiens; identical to SEQ ID NO: 4885

SEQ ID NO: 4963 - DNA, 201 bp, Homo sapiens; identical to SEQ ID NO: 4886

SEQ ID NO: 4964 - DNA, 201 bp, Homo sapiens; identical to SEQ ID NO: 4887

SEQ ID NO: 4965 - DNA, 201 bp, Homo sapiens; identical to SEQ ID NO: 4888

SEQ ID NO: 4966 - DNA, 201 bp, Homo sapiens; identical to SEQ ID NO: 4889

SEQ ID NO: 4967 - DNA, 201 bp, Homo sapiens
cagagtaccttgtcgtgtacacgcccacccacgagggtggtctggaaatgcagttccgtgtgcctggggaccagacgtccaccatcatccgggagctggarcctggtgtggagtactttatccgtgtatttgccatcctggagaacaagaagagcattcctgtcagcgccagggtggccacgtacttacctgcacctgaag

SEQ ID NO: 4968 - DNA, 201 bp, Homo sapiens
gatcccagacagtcagtgctatagcaacaacagccatgggctccccaaaggaagtcattttctcagacatcactgaaaattcggctactgtcagctggagrgcacccacagcccaagtggagagcttccggattacctatgtgcccattacaggaggtacaccctccatggtaactgtggacggaaccaagactcagacca

SEQ ID NO: 4969 - DNA, 201 bp, Homo sapiens
cagccatgggctccccaaaggaagtcattttctcagacatcactgaaaattcggctactgtcagctggagggcacccacagcccaagtggagagcttccgrattacctatgtgcccattacaggaggtacaccctccatggtaactgtggacggaaccaagactcagaccaggctggtgaaactcatacctggcgtggagt

SEQ ID NO: 4970 - DNA, 201 bp, Homo sapiens
cctgtcagcgccagggtggccacgtacttacctgcacctgaaggcctgaaattcaagtccatcaaggagacatctgtggaagtggagtgggatcctctagrcattgcttttgaaacctgggagatcatcttccggaatatgaataaagaagatgagggagagatcaccaaaagcctgaggaggccagagacctcttaccgg

SEQ ID NO: 4971 - DNA, 201 bp, Homo sapiens
cagtgggatcccagtgttcggtggatctggagtcagccagtggggagaaagacctggcaccgccttcagagcccagcgaaagctttcaggagcacacagtrgatggggaaaaccagattgtcttcacacatcgcatcaacatcccccgccgggcctgtggctgtgccgcagcccctgatgttaaggagctgctgagcagac

SEQ ID NO: 4972 - DNA, 201 bp, Homo sapiens
gccagagacctcttaccggcaaactggtctagctcctgggcaagagtatgagatatctctgcacatagtgaaaaacaatacccggggccctggcctgaagmgggtgaccaccacacgcttggatgcccccagccagatcgaggtgaaagatgtcacagacaccactgccttgatcacctggttcaagcccctggctgagat

SEQ ID NO: 4973 - DNA, 201 bp, Homo sapiens
agttcacaacagacctcgattctccaagagacttgactgctactgaggttcagtcggaaactgccctccttacctggcgacccccccgggcatcagtcacmggttacctgctggtctatgaatcagtggatggcacagtcaaggaagtcattgtgggtccagataccacctcctacagcctggcagacctgagcccatcca

SEQ ID NO: 4974 - DNA, 201 bp, Homo sapiens
tttatctgaatggtgataaggctcaggcgctggaagtcttctgtgacatgacctctgatgggggtggatggattgtgttcctgagacgcaaaaacggacgygagaacttctaccaaaactggaaggcatatgctgctggatttggggaccgcagagaagaattctggcttgggctggacaacctgaacaaaatcacagccc

SEQ ID NO: 4975 - DNA, 201 bp, Homo sapiens
tcacctggttcaagcccctggctgagatcgatggcattgagctgacctacggcatcaaagacgtgccaggagaccgtaccaccatcgatctcacagaggaygagaaccagtactccatcgggaacctgaagcctgacactgagtacgaggtgtccctcatctcccgcagaggtgacatgtcaagcaacccagccaaagaga

SEQ ID NO: 4976 - DNA, 201 bp, Homo sapiens
agacgtgccaggagaccgtaccaccatcgatctcacagaggacgagaaccagtactccatcgggaacctgaagcctgacactgagtacgaggtgtccctcrtctcccgcagaggtgacatgtcaagcaacccagccaaagagaccttcacaacaggcctcgatgctcccaggaatcttcgacgtgtttcccagacagataa

SEQ ID NO: 4977 - DNA, 201 bp, Homo sapiens
ttggacacgcccaaggaccttcaggtttctgaaactgcagagaccagcctgaccctgctctggaagacaccgttggccaaatttgaccgctaccgcctcarttacagtctccccacaggccagtgggtgggagtgcagcttccaagaaacaccacttcctatgtcctgagaggcctggaaccaggacaggagtacaatgtc

SEQ ID NO: 4978 - DNA, 201 bp, Homo sapiens
tggactcctgtaccccttccccaaggactgctcccaagcaatgctgaatggagacacgacctctggcctctacaccatttatctgaatggtgataaggctsaggcgctggaagtcttctgtgacatgacctctgatgggggtggatggattgtgttcctgagacgcaaaaacggacgcgagaacttctaccaaaactggaa

SEQ ID NO: 4979 - DNA, 201 bp, Homo sapiens
agggccgctgcgtggacggccagtgcatctgccacgagggcttcacaggcctggactgtggccagcactcctgccccagtgactgcaacaacttaggacartgcgtctcgggccgctgcatctgcaacgagggctacagcggagaagactgctcagaggtgtctcctcccaaagacctcgttgtgacagaagtgacggaag

SEQ ID NO: 4980 - DNA, 201 bp, Homo sapiens
gttggctgggatggcctcagactcaactggaccgcagctgaccaggcctatgagcactttatcattcaggtgcaggaggccaacaaggtggaggcagctcrgaacctcaccgtgcctggcagccttcgggctgtggacataccgggcctcaaggctgctacgccttatacagtctccatctatggggtgatccagggctat

SEQ ID NO: 4981 - DNA, 201 bp, Homo sapiens
ggtgcattgatgggcagtgcatctgtgacgacggcttcacgggcgaggactgcagccagctggcttgccccagcgactgcaatgaccagggcaagtgcgtraatggagtctgcatctgtttcgaaggctacgccggggctgactgcagccgtgaaatctgcccagtgccctgcagtgaggagcacggcacatgtgtagatg

SEQ ID NO: 4982 - DNA, 201 bp, Homo sapiens
caccatcgatctcacagaggacgagaaccagtactccatcgggaacctgaagcctgacactgagtacgaggtgtccctcatctcccgcagaggtgacatgkcaagcaacccagccaaagagaccttcacaacaggcctcgatgctcccaggaatcttcgacgtgtttcccagacagataacagcatcaccctggaatggag

SEQ ID NO: 4983 - DNA, 201 bp, Homo sapiens
agcacccagccaaacccacctccaccatgggggccatgactcagctgttggcaggtgtctttcttgctttccttgccctcgctaccgaaggtggggtcctsaagaaagtcatccggcacaagcgacagagtggggtgaacgccaccctgccagaagagaaccagccagtggtgtttaaccacgtttacaacatcaagctgc

SEQ ID NO: 4984 - DNA, 201 bp, Homo sapiens
atggcctcagactcaactggaccgcagctgacaatgcctatgagcactttgtcattcaggtgcaggaggtcaacaaagtggaggcagcccagaacctcacrttgcctggcagcctcagggctgtggacatcccgggcctcgaggctgccacgccttatagagtctccatctatggggtgatccggggctatagaacaccag

SEQ ID NO: 4985 - DNA, 201 bp, Homo sapiens
taatataataatgatgatgatgatgatgaaaactaaggatttttcaagagatctttctttccaaaacatttctggacagtacctgattgtattttttttttaaataaaagcacaagtacttttgagtttgttattttgctttgaattgttgagtctgaatttcaccaaagccaatcatttgaacaaagcggggaatgttgg

SEQ ID NO: 4986 - DNA, 201 bp, Homo sapiens
ctgcccatatctcagggctaccccctagtactgattttattgtctacctctctggacttgctcccagcatccggaccaaaaccatcagtgccacagccacracagaggccctgccccttctggaaaacctaaccatttccgacattaatccctacgggttcacagtttcctggatggcatcggagaatgcctttgacagct

SEQ ID NO: 4987 - DNA, 201 bp, Homo sapiens
caccactgccttgatcacctggttcaagcccctggctgagatcgatggcattgagctgacctacggcatcaaagacgtgccaggagaccgtaccaccatcsatctcacagaggacgagaaccagtactccatcgggaacctgaagcctgacactgagtacgaggtgtccctcatctcccgcagaggtgacatgtcaagcaa

SEQ ID NO: 4988 - DNA, 201 bp, Homo sapiens
ccacaggccagtgggtgggagtgcagcttccaagaaacaccacttcctatgtcctgagaggcctggaaccaggacaggagtacaatgtcctcctgacagcygagaaaggcagacacaagagcaagcccgcacgtgtgaaggcatccactgaacaagcccctgagctggaaaacctcaccgtgactgaggttggctgggatg

SEQ ID NO: 4989 - DNA, 201 bp, Homo sapiens
tcaactggaccgcagctgaccaggcctatgagcactttatcattcaggtgcaggaggccaacaaggtggaggcagctcggaacctcaccgtgcctggcagmcttcgggctgtggacataccgggcctcaaggctgctacgccttatacagtctccatctatggggtgatccagggctatagaacaccagtgctctctgctg

SEQ ID NO: 4990 - DNA, 201 bp, Homo sapiens
agaaacaccacttcctatgtcctgagaggcctggaaccaggacaggagtacaatgtcctcctgacagccgagaaaggcagacacaagagcaagcccgcacrtgtgaaggcatccactgaacaagcccctgagctggaaaacctcaccgtgactgaggttggctgggatggcctcagactcaactggaccgcagctgaccag

SEQ ID NO: 4991 - DNA, 201 bp, Homo sapiens
cacaggtgaagactgcgggaaacccacctgcccacatgcctgccacacccagggccggtgtgaggaggggcagtgtgtatgtgatgagggctttgccggtktggactgcagcgagaagaggtgtcctgctgactgtcacaatcgtggccgctgtgtagacgggcggtgtgagtgtgatgatggtttcactggagctgactg

SEQ ID NO: 4992 - DNA, 201 bp, Homo sapiens
agcaacaggggcctctgtgtggacggacagtgcgtctgtgaggacggcttcaccggccctgactgtgcagaactctcctgtccaaatgactgccatggccrgggtcgctgtgtgaatgggcagtgcgtgtgccatgaaggatttatgggcaaagactgcaaggagcaaagatgtcccagtgactgtcatggccagggccgc

SEQ ID NO: 4993 - DNA, 201 bp, Homo sapiens
ccgctgcgtggacggccagtgcatctgccacgagggcttcacaggcctggactgtggccagcactcctgccccagtgactgcaacaacttaggacaatgcrtctcgggccgctgcatctgcaacgagggctacagcggagaagactgctcagaggtgtctcctcccaaagacctcgttgtgacagaagtgacggaagagac

SEQ ID NO: 4994 - DNA, 201 bp, Homo sapiens
ccatcttcaccacaattggactcctgtaccccttccccaaggactgctcccaagcaatgctgaatggagacacgacctctggcctctacaccatttatctraatggtgataaggctcaggcgctggaagtcttctgtgacatgacctctgatgggggtggatggattgtgttcctgagacgcaaaaacggacgcgagaact

SEQ ID NO: 4995 - DNA, 201 bp, Homo sapiens
tgggtgagagaggaataaggcccagagcgaggaaaggattttaccaaagcatcaatacaaccagcccaaccatcggtccacacctgggcatttggtgagartcaaagctgaccatggatccctggggccaacggcaacagcatgggcctcacctcctctgtgatttctttctttgcaccaaagacatcagtctccaacatg

SEQ ID NO: 4996 - DNA, 201 bp, Homo sapiens
cactggaagggccacgaacactcaatccagtttgctgagatgaagctgagaccaagcaacttcagaaatcttgaaggcaggcgcaaacgggcataaattcsagggaccactgggtgagagaggaataaggcccagagcgaggaaaggattttaccaaagcatcaatacaaccagcccaaccatcggtccacacctgggcat

SEQ ID NO: 4997 - DNA, 201 bp, Homo sapiens
ccactggaagggccacgaacactcaatccagtttgctgagatgaagctgagaccaagcaacttcagaaatcttgaaggcaggcgcaaacgggcataaattscagggaccactgggtgagagaggaataaggcccagagcgaggaaaggattttaccaaagcatcaatacaaccagcccaaccatcggtccacacctgggca

SEQ ID NO: 4998 - DNA, 201 bp, Homo sapiens
agcccgcacgtgtgaaggcatccactgaacaagcccctgagctggaaaacctcaccgtgactgaggttggctgggatggcctcagactcaactggaccgcrgctgaccaggcctatgagcactttatcattcaggtgcaggaggccaacaaggtggaggcagctcggaacctcaccgtgcctggcagccttcgggctgtgg

SEQ ID NO: 4999 - DNA, 201 bp, Homo sapiens
cactgccttgatcacctggttcaagcccctggctgagatcgatggcattgagctgacctacggcatcaaagacgtgccaggagaccgtaccaccatcgatstcacagaggacgagaaccagtactccatcgggaacctgaagcctgacactgagtacgaggtgtccctcatctcccgcagaggtgacatgtcaagcaaccc

SEQ ID NO: 5000 - DNA, 201 bp, Homo sapiens
ccagggcaagtgcgtaaatggagtctgcatctgtttcgaaggctacgccggggctgactgcagccgtgaaatctgcccagtgccctgcagtgaggagcacrgcacatgtgtagatggcttgtgtgtgtgccacgatggctttgcaggcgatgactgcaacaagcctctgtgtctcaacaattgctacaaccgtggacgatg

SEQ ID NO: 5001 - DNA, 201 bp, Homo sapiens
cagtcagtgctatagcaacaacagccatgggctccccaaaggaagtcattttctcagacatcactgaaaattcggctactgtcagctggagggcacccacrgcccaagtggagagcttccggattacctatgtgcccattacaggaggtacaccctccatggtaactgtggacggaaccaagactcagaccaggctggtga

SEQ ID NO: 5002 - DNA, 201 bp, Homo sapiens
agcgacagagtggggtgaacgccaccctgccagaagagaaccagccagtggtgtttaaccacgtttacaacatcaagctgccagtgggatcccagtgttcrgtggatctggagtcagccagtggggagaaagacctggcaccgccttcagagcccagcgaaagctttcaggagcacacagtggatggggaaaaccagattg

SEQ ID NO: 5003 - DNA, 201 bp, Homo sapiens
gaaataaccctacttgcccccgaacgtaccagggacttaacaggtctcagagaggctactgaatacgaaattgaactctatggaataagcaaaggaaggcratcccagacagtcagtgctatagcaacaacagccatgggctccccaaaggaagtcattttctcagacatcactgaaaattcggctactgtcagctggagg

SEQ ID NO: 5004 - DNA, 201 bp, Homo sapiens
atgcgggtcacagagtaccttgtcgtgtacacgcccacccacgagggtggtctggaaatgcagttccgtgtgcctggggaccagacgtccaccatcatccrggagctggagcctggtgtggagtactttatccgtgtatttgccatcctggagaacaagaagagcattcctgtcagcgccagggtggccacgtacttacct

SEQ ID NO: 5005 - DNA, 201 bp, Homo sapiens
agcctgccacggaatacacactgagaatctttgcagagaaagggccccagaagagctcaaccatcactgccaagttcacaacagacctcgattctccaagrgacttgactgctactgaggttcagtcggaaactgccctccttacctggcgacccccccgggcatcagtcaccggttacctgctggtctatgaatcagtgg

SEQ ID NO: 5006 - DNA, 201 bp, Homo sapiens
tgaaggggtcttcgacaattttgttctcaaaatcagagataccaaaaagcagtctgagccactggaaataaccctacttgcccccgaacgtaccagggacwtaacaggtctcagagaggctactgaatacgaaattgaactctatggaataagcaaaggaaggcgatcccagacagtcagtgctatagcaacaacagccat

SEQ ID NO: 5007 - DNA, 201 bp, Homo sapiens
acagtgcgtctgtgaggacggcttcaccggccctgactgtgcagaactctcctgtccaaatgactgccatggccggggtcgctgtgtgaatgggcagtgcrtgtgccatgaaggatttatgggcaaagactgcaaggagcaaagatgtcccagtgactgtcatggccagggccgctgcgtggacggccagtgcatctgcca

SEQ ID NO: 5008 - DNA, 201 bp, Homo sapiens
tacaggaggtacaccctccatggtaactgtggacggaaccaagactcagaccaggctggtgaaactcatacctggcgtggagtaccttgtcagcatcatcrccatgaagggctttgaggaaagtgaacctgtctcagggtcattcaccacagctctggatggcccatctggcctggtgacagccaacatcactgactcaga

SEQ ID NO: 5009 - DNA, 201 bp, Homo sapiens
ttagaggcctcataactggcattggctatgaggttatggtctctggcttcacccaagggcatcaaaccaagcccttgagggctgagattgttacagaagcmgaaccggaagttgacaaccttctggtttcagatgccaccccagacggtttccgtctgtcctggacagctgatgaaggggtcttcgacaattttgttctca

SEQ ID NO: 5010 - DNA, 201 bp, Homo sapiens
catttccgacattaatccctacgggttcacagtttcctggatggcatcggagaatgcctttgacagctttctagtaacggtggtggattctgggaagctgytggacccccaggaattcacactttcaggaacccagaggaagctggagcttagaggcctcataactggcattggctatgaggttatggtctctggcttcac

SEQ ID NO: 5011 - DNA, 201 bp, Homo sapiens; identical to SEQ ID NO: 4967

SEQ ID NO: 5012 - DNA, 201 bp, Homo sapiens; identical to SEQ ID NO: 4968

SEQ ID NO: 5013 - DNA, 201 bp, Homo sapiens; identical to SEQ ID NO: 4969

SEQ ID NO: 5014 - DNA, 201 bp, Homo sapiens; identical to SEQ ID NO: 4970

SEQ ID NO: 5015 - DNA, 201 bp, Homo sapiens; identical to SEQ ID NO: 4971

SEQ ID NO: 5016 - DNA, 201 bp, Homo sapiens; identical to SEQ ID NO: 4972

SEQ ID NO: 5017 - DNA, 201 bp, Homo sapiens; identical to SEQ ID NO: 4973

SEQ ID NO: 5018 - DNA, 201 bp, Homo sapiens; identical to SEQ ID NO: 4974

SEQ ID NO: 5019 - DNA, 201 bp, Homo sapiens; identical to SEQ ID NO: 4975

SEQ ID NO: 5020 - DNA, 201 bp, Homo sapiens; identical to SEQ ID NO: 4976

SEQ ID NO: 5021 - DNA, 201 bp, Homo sapiens; identical to SEQ ID NO: 4977

SEQ ID NO: 5022 - DNA, 201 bp, Homo sapiens; identical to SEQ ID NO: 4978

SEQ ID NO: 5023 - DNA, 201 bp, Homo sapiens; identical to SEQ ID NO: 4979

SEQ ID NO: 5024 - DNA, 201 bp, Homo sapiens; identical to SEQ ID NO: 4980

SEQ ID NO: 5025 - DNA, 201 bp, Homo sapiens; identical to SEQ ID NO: 4981

SEQ ID NO: 5026 - DNA, 201 bp, Homo sapiens; identical to SEQ ID NO: 4982

SEQ ID NO: 5027 - DNA, 183 bp, Homo sapiens
accggccacagcctgcctactgtcacccgcctctcccgcgcgcagatacacgcccccgcctccgtgggcacaaaggcagcgckgctggggaactcgggggaacgcgcacgtgggaaccgccgcagctccacactccaggtacttcttccaaggacctaggtctctcgcccatcggaaagaaaa

SEQ ID NO: 5028 - DNA, 201 bp, Homo sapiens; identical to SEQ ID NO: 4983

SEQ ID NO: 5029 - DNA, 201 bp, Homo sapiens; identical to SEQ ID NO: 4984

SEQ ID NO: 5030 - DNA, 201 bp, Homo sapiens; identical to SEQ ID NO: 4985

SEQ ID NO: 5031 - DNA, 201 bp, Homo sapiens; identical to SEQ ID NO: 4986

SEQ ID NO: 5032 - DNA, 201 bp, Homo sapiens; identical to SEQ ID NO: 4987

SEQ ID NO: 5033 - DNA, 191 bp, Homo sapiens
accggccacagcctgcctactgtcacccgcctctcccgcgcgcagatacacgcccccgcctccgtgggcacaaaggcagcgctgctggggractcgggggaacgcgcacgtgggaaccgccgcagctccacactccaggtacttcttccaaggacctaggtctctcgcccatcggaaagaaaataattctt

SEQ ID NO: 5034 - DNA, 201 bp, Homo sapiens; identical to SEQ ID NO: 4988

SEQ ID NO: 5035 - DNA, 201 bp, Homo sapiens; identical to SEQ ID NO: 4989

SEQ ID NO: 5036 - DNA, 201 bp, Homo sapiens; identical to SEQ ID NO: 4990

SEQ ID NO: 5037 - DNA, 201 bp, Homo sapiens; identical to SEQ ID NO: 4991

SEQ ID NO: 5038 - DNA, 201 bp, Homo sapiens; identical to SEQ ID NO: 4992

SEQ ID NO: 5039 - DNA, 201 bp, Homo sapiens; identical to SEQ ID NO: 4993

SEQ ID NO: 5040 - DNA, 201 bp, Homo sapiens; identical to SEQ ID NO: 4994

SEQ ID NO: 5041 - DNA, 201 bp, Homo sapiens; identical to SEQ ID NO: 4995

SEQ ID NO: 5042 - DNA, 201 bp, Homo sapiens; identical to SEQ ID NO: 4996

SEQ ID NO: 5043 - DNA, 201 bp, Homo sapiens; identical to SEQ ID NO: 4999

SEQ ID NO: 5044 - DNA, 201 bp, Homo sapiens; identical to SEQ ID NO: 4998

SEQ ID NO: 5045 - DNA, 201 bp, Homo sapiens; identical to SEQ ID NO: 4997

SEQ ID NO: 5046 - DNA, 201 bp, Homo sapiens; identical to SEQ ID NO: 5000

SEQ ID NO: 5047 - DNA, 201 bp, Homo sapiens; identical to SEQ ID NO: 5001

SEQ ID NO: 5048 - DNA, 201 bp, Homo sapiens; identical to SEQ ID NO: 5002

SEQ ID NO: 5049 - DNA, 201 bp, Homo sapiens; identical to SEQ ID NO: 5003

SEQ ID NO: 5050 - DNA, 201 bp, Homo sapiens; identical to SEQ ID NO: 5004

SEQ ID NO: 5051 - DNA, 201 bp, Homo sapiens; identical to SEQ ID NO: 5005

SEQ ID NO: 5052 - DNA, 201 bp, Homo sapiens; identical to SEQ ID NO: 5006

SEQ ID NO: 5053 - DNA, 201 bp, Homo sapiens; identical to SEQ ID NO: 5007

SEQ ID NO: 5054 - DNA, 201 bp, Homo sapiens; identical to SEQ ID NO: 5008

SEQ ID NO: 5055 - DNA, 201 bp, Homo sapiens; identical to SEQ ID NO: 5009

SEQ ID NO: 5056 - DNA, 201 bp, Homo sapiens; identical to SEQ ID NO: 5010

SEQ ID NO: 5057 - DNA, 201 bp, Homo sapiens; identical to SEQ ID NO: 4967

SEQ ID NO: 5058 - DNA, 201 bp, Homo sapiens; identical to SEQ ID NO: 4968

SEQ ID NO: 5059 - DNA, 201 bp, Homo sapiens; identical to SEQ ID NO: 4969

SEQ ID NO: 5060 - DNA, 201 bp, Homo sapiens; identical to SEQ ID NO: 4970

SEQ ID NO: 5061 - DNA, 201 bp, Homo sapiens; identical to SEQ ID NO: 4971

SEQ ID NO: 5062 - DNA, 201 bp, Homo sapiens; identical to SEQ ID NO: 4972

SEQ ID NO: 5063 - DNA, 201 bp, Homo sapiens; identical to SEQ ID NO: 4973

SEQ ID NO: 5064 - DNA, 201 bp, Homo sapiens; identical to SEQ ID NO: 4974

SEQ ID NO: 5065 - DNA, 201 bp, Homo sapiens; identical to SEQ ID NO: 4975

SEQ ID NO: 5066 - DNA, 201 bp, Homo sapiens; identical to SEQ ID NO: 4976

SEQ ID NO: 5067 - DNA, 201 bp, Homo sapiens; identical to SEQ ID NO: 4977

SEQ ID NO: 5068 - DNA, 201 bp, Homo sapiens; identical to SEQ ID NO: 4978

SEQ ID NO: 5069 - DNA, 201 bp, Homo sapiens; identical to SEQ ID NO: 4979

SEQ ID NO: 5070 - DNA, 201 bp, Homo sapiens; identical to SEQ ID NO: 4980

SEQ ID NO: 5071 - DNA, 201 bp, Homo sapiens; identical to SEQ ID NO: 4981

SEQ ID NO: 5072 - DNA, 201 bp, Homo sapiens; identical to SEQ ID NO: 4982

SEQ ID NO: 5073 - DNA, 183 bp, Homo sapiens; identical to SEQ ID NO: 5027

SEQ ID NO: 5074 - DNA, 201 bp, Homo sapiens; identical to SEQ ID NO: 4983

SEQ ID NO: 5075 - DNA, 201 bp, Homo sapiens; identical to SEQ ID NO: 4984

SEQ ID NO: 5076 - DNA, 201 bp, Homo sapiens; identical to SEQ ID NO: 4986

SEQ ID NO: 5077 - DNA, 201 bp, Homo sapiens; identical to SEQ ID NO: 4987

SEQ ID NO: 5078 - DNA, 191 bp, Homo sapiens; identical to SEQ ID NO: 5033

SEQ ID NO: 5079 - DNA, 201 bp, Homo sapiens; identical to SEQ ID NO: 4988

SEQ ID NO: 5080 - DNA, 201 bp, Homo sapiens; identical to SEQ ID NO: 4989

SEQ ID NO: 5081 - DNA, 201 bp, Homo sapiens; identical to SEQ ID NO: 4990

SEQ ID NO: 5082 - DNA, 201 bp, Homo sapiens; identical to SEQ ID NO: 4991

SEQ ID NO: 5083 - DNA, 201 bp, Homo sapiens; identical to SEQ ID NO: 4992

SEQ ID NO: 5084 - DNA, 201 bp, Homo sapiens; identical to SEQ ID NO: 4993

SEQ ID NO: 5085 - DNA, 201 bp, Homo sapiens; identical to SEQ ID NO: 4994

SEQ ID NO: 5086 - DNA, 201 bp, Homo sapiens; identical to SEQ ID NO: 4995

SEQ ID NO: 5087 - DNA, 201 bp, Homo sapiens; identical to SEQ ID NO: 4996

SEQ ID NO: 5088 - DNA, 201 bp, Homo sapiens; identical to SEQ ID NO: 4999

SEQ ID NO: 5089 - DNA, 201 bp, Homo sapiens; identical to SEQ ID NO: 4998

SEQ ID NO: 5090 - DNA, 201 bp, Homo sapiens; identical to SEQ ID NO: 4997

SEQ ID NO: 5091 - DNA, 201 bp, Homo sapiens; identical to SEQ ID NO: 5000

SEQ ID NO: 5092 - DNA, 201 bp, Homo sapiens; identical to SEQ ID NO: 5001

SEQ ID NO: 5093 - DNA, 201 bp, Homo sapiens; identical to SEQ ID NO: 5002

SEQ ID NO: 5094 - DNA, 201 bp, Homo sapiens; identical to SEQ ID NO: 5003

SEQ ID NO: 5095 - DNA, 201 bp, Homo sapiens; identical to SEQ ID NO: 5004

SEQ ID NO: 5096 - DNA, 201 bp, Homo sapiens; identical to SEQ ID NO: 5005

SEQ ID NO: 5097 - DNA, 201 bp, Homo sapiens; identical to SEQ ID NO: 5006

SEQ ID NO: 5098 - DNA, 201 bp, Homo sapiens; identical to SEQ ID NO: 5007

SEQ ID NO: 5099 - DNA, 201 bp, Homo sapiens; identical to SEQ ID NO: 5008

SEQ ID NO: 5100 - DNA, 201 bp, Homo sapiens; identical to SEQ ID NO: 5009

SEQ ID NO: 5101 - DNA, 201 bp, Homo sapiens; identical to SEQ ID NO: 5010

SEQ ID NO: 5102 - DNA, 201 bp, Homo sapiens
ctaagctccaacgctctgctcgactagccgcgcgccttccggggctccgcagacccgcgagatggcaccaaggtaagacccgcttctctgcttcctcgcgkcccgggcccctccaatactcttgcccgcctcaccttttctccctcgggcacatcttgcaggaggaacaacgggcagtgctggtgtctgctgatgctgctc

SEQ ID NO: 5103 - DNA, 201 bp, Homo sapiens
tgatcaatatcacccatggattcatgaatttctcggacattcctgagctggtggggcctccggggccggacgggttgcctgggctgccaggatttccaggycctagaggaccaaaaggtgacactggtttacctggctttccaggactaaaaggagaacagggcgagaagggagagccgggtgccatcctgacagaggaca

SEQ ID NO: 5104 - DNA, 201 bp, Homo sapiens
ggccaccggggcccccggggccaccaggacctccagctatcctgggagcagctgtggcccttccaggtccccctggccctccaggacagccagggcttccyggatccagaaacctggtcagtattatcatcagggtggacggggtctcactctgtcacccaaactggagtacagtggtcacagcattcagcaacatggatg

SEQ ID NO: 5105 - DNA, 201 bp, Homo sapiens
ttaacatcaaaggagccattttcccaatacccgtccgaccacactgcaaaatgccagttgatactgctcatcctgggagtccagagctcatcacttttcayggtgttaaaggagagaaaggatcctggggtcttcctggctcaaagggagaaaaaggcgaccagggagcccagggaccaccaggtcctccacttgatctag

SEQ ID NO: 5106 - DNA, 201 bp, Homo sapiens
cattcctgagctggtggggcctccggggccggacgggttgcctgggctgccaggatttccaggtcctagaggaccaaaaggtgacactggtttacctggcyttccaggactaaaaggagaacagggcgagaagggagagccgggtgccatcctgacagaggacattcctctggaaaggctgatggggaaaaagggtgaacc

SEQ ID NO: 5107 - DNA, 201 bp, Homo sapiens
  misc_feature (1)...(201): n = A,T,C or G, or insertion/deletion polymorphism (see Tables 1-2)
tgaggaagtgaccctcctcgtgaactgtgaggagcacagccgcatccccttccagcggtcctcccaggctttggcttttgagtccagcgctggaatcttcntgggcaatgcaggagctacagggctcgagagattcactggctccctccagcagctcaccgtgcaccccgaccccaggactcccgaggagctgtgtgaccc

SEQ ID NO: 5108 - DNA, 201 bp, Homo sapiens
ggccaccagcggatcatcctctactacacggagccaggctcccatgtgtcccaagaggctgctgccttctcggtgcctgtgatgacccacaggtggaaccrcttcgccatgattgtccagggtgaggaagtgaccctcctcgtgaactgtgaggagcacagccgcatccccttccagcggtcctcccaggctttggctttt

SEQ ID NO: 5109 - DNA, 201 bp, Homo sapiens
tgacttgctggaaaagttgaaactccaaataatctgaaactagaaaagaaatagcacataattactaccttccccttggcggctctcctccccaacccccmccccacaattttatgacttccatttggcaattgttgaattataactgcgactgaaacaaacaggttcatagagatgaattttctgagaaacatatatcta

SEQ ID NO: 5110 - DNA, 201 bp, Homo sapiens
gtgtaagatgtccttcatgttttcttataaagtcagtgtttagaaatgttaccctttctaagttatatacagatcaaatgcttttttctttcacgtacatscatcatttgcaactgctgttcgtacacagaaacaggactgctcaaatgatcctatttgtattttctgatgctatcagactctaatgtttttttccctaaa

SEQ ID NO: 5111 - DNA, 201 bp, Homo sapiens
gaacgcatcccaacataggttaagagcaagttgaaaacaaaggccatggcattctgccactgcatccttcagacagttatatcctccttttaaaccattgwtgttgagtgtaagatgtccttcatgttttcttataaagtcagtgtttagaaatgttaccctttctaagttatatacagatcaaatgcttttttctttcac

SEQ ID NO: 5112 - DNA, 201 bp, Homo sapiens
gaggactcagatcaaagacaaaatctgatccatatattggtgctagattctgcaggaaaccccagcagtgtgaacgcatcccaacataggttaagagcaarttgaaaacaaaggccatggcattctgccactgcatccttcagacagttatatcctccttttaaaccattgttgttgagtgtaagatgtccttcatgtttt

SEQ ID NO: 5113 - DNA, 201 bp, Homo sapiens
aagtaatggccttctgatgattcttaaagagttttcaattttttcttatgtgaagagttgacactgaaatctaaaatgtttaattgttgtaaatattacagtttttttttttttactacatattctttacaacagcaaccaaagaaaacatacctcaatacactcaaaactgaagacatagaggactcagatcaaagacaa

SEQ ID NO: 5114 - DNA, 201 bp, Homo sapiens
  misc_feature (1)...(201): n = A,T,C or G, or insertion/deletion polymorphism (see Tables 1-2)
agtacttttgaggatgaggaagccagtggggtccccacagatggcctggctcccctcacagccaccatggcccctgagcgggcagtcacttctggtcctgntgatgaagaagacttggcagcagccacaacagaggagcccctcatcacagctgggggtgaagagtccggcagccctccccctgatgggccaccgctgccc

SEQ ID NO: 5115 - DNA, 201 bp, Homo sapiens
agcaggggaggccgaggcactcgccagcatgcctggggaagtggaggccagtggtgtggcccccggggagctggacctctccatgtccgcccagagcctcrgggaagaggccactgtgggtccaagcagtgaagacagtttaacaacagctgcagctgcaaccgaagtgtccctcagtacttttgaggatgaggaagccag

SEQ ID NO: 5116 - DNA, 201 bp, Homo sapiens
caatatgcatattccaatatactcctttgatggtcgagacataatgacagatccttcttggccccagaaagtcatttggcatggctccagcccccatggcrtccgccttgtggataactactgtgaagcatggcgaaccgcggacacagcggtcacgggacttgcctccccgctgagcacggggaagattctggaccagaa

SEQ ID NO: 5117 - DNA, 201 bp, Homo sapiens
tgctggaaaagttgaaactccaaataatctgaaactagaaaagaaatagcacataattactaccttccccttggcggctctcctccccaacccccaccccmcaattttatgacttccatttggcaattgttgaattataactgcgactgaaacaaacaggttcatagagatgaattttctgagaaacatatatctacatgt

SEQ ID NO: 5118 - DNA, 201 bp, Homo sapiens
ccacctgggcacatcaaggtcttgtctaattccttgatcaatatcacccatggattcatgaatttctcggacattcctgagctggtggggcctccggggcyggacgggttgcctgggctgccaggatttccaggtcctagaggaccaaaaggtgacactggtttacctggctttccaggactaaaaggagaacagggcgag

SEQ ID NO: 5119 - DNA, 201 bp, Homo sapiens
gcagtcacttctggtcctggtgatgaagaagacttggcagcagccacaacagaggagcccctcatcacagctgggggtgaagagtccggcagccctccccstgatgggccaccgctgcccctgcccacagtggctcctgaaagatggatcactccagctcaaagagaacatgtgggaatgaaaggacaggctgggcccaaa

SEQ ID NO: 5120 - DNA, 201 bp, Homo sapiens
tgtccacggagaacccagaggaaggggtcactccaggtccagataatgaagagcgtttagcagcaacagcagcaggggaggccgaggcactcgccagcatrcctggggaagtggaggccagtggtgtggcccccggggagctggacctctccatgtccgcccagagcctcggggaagaggccactgtgggtccaagcagtg

SEQ ID NO: 5121 - DNA, 201 bp, Homo sapiens
ctggaccccctgggcccccaggccctggatgcacaatgggacttggattcgaggataccgaaggctctggaagcacccagctattgaatgaacccaaactstccagaccaacggctgcaattggtctcaaaggagagaaaggagaccggggacccaagggagaaagggggatggatggagccagtattgtgggaccccctg

SEQ ID NO: 5122 - DNA, 201 bp, Homo sapiens
gacaggctgggcccaaaggagaaaagggtgatgctggggaggagcttcctggccctcctgaaccttctgggcctgttggacccacggcaggagcagaagcrgagggctctggcctaggctggggctcggacgtcggctctggctctggtgacctggtgggcagtgagcagctgctgagaggtcctccaggacccccagggc

SEQ ID NO: 5123 - DNA, 201 bp, Homo sapiens
aagagtgctttcttgcgggtcagccccgacaggacagacttaagggcgggagggagcccatcccgcttgccccaacgaacgcgggcgcggggctttcctckcaggttacataaggcagccgcgggtggaggcagcagaggcgagcgcacgtccgtcgagggggaaaggggcgtggggaggcggccggggcggccggtatcc

SEQ ID NO: 5124 - DNA, 201 bp, Homo sapiens
ctcagtctccttgtccatcatataaggaaatcactgattccagccttcctgggctgtggagaggattccctcagcggctgtgaaagagtgctttcttgcgsgtcagccccgacaggacagacttaagggcgggagggagcccatcccgcttgccccaacgaacgcgggcgcggggctttcctcgcaggttacataaggcag

SEQ ID NO: 5125 - DNA, 201 bp, Homo sapiens
gattgtccagggtgaggaagtgaccctcctcgtgaactgtgaggagcacagccgcatccccttccagcggtcctcccaggctttggcttttgagtccagcrctggaatcttcatgggcaatgcaggagctacagggctcgagagattcactggctccctccagcagctcaccgtgcaccccgaccccaggactcccgagga

SEQ ID NO: 5126 - DNA, 201 bp, Homo sapiens
attttcccaatacccgtccgaccacactgcaaaatgccagttgatactgctcatcctgggagtccagagctcatcacttttcacggtgttaaaggagagaraggatcctggggtcttcctggctcaaagggagaaaaaggcgaccagggagcccagggaccaccaggtcctccacttgatctagcttacctgagacacttt

SEQ ID NO: 5127 - DNA, 201 bp, Homo sapiens
caacggctgcaattggtctcaaaggagagaaaggagaccggggacccaagggagaaagggggatggatggagccagtattgtgggaccccctgggccgagrgggccacctgggcacatcaaggtcttgtctaattccttgatcaatatcacccatggattcatgaatttctcggacattcctgagctggtggggcctccgg

SEQ ID NO: 5128 - DNA, 201 bp, Homo sapiens
ttgaggatgaggaagccagtggggtccccacagatggcctggctcccctcacagccaccatggcccctgagcgggcagtcacttctggtcctggtgatgamgaagacttggcagcagccacaacagaggagcccctcatcacagctgggggtgaagagtccggcagccctccccctgatgggccaccgctgcccctgccca

SEQ ID NO: 5129 - DNA, 201 bp, Homo sapiens
ccagttgatactgctcatcctgggagtccagagctcatcacttttcacggtgttaaaggagagaaaggatcctggggtcttcctggctcaaagggagaaaraggcgaccagggagcccagggaccaccaggtcctccacttgatctagcttacctgagacactttctgaacaacttgaagggggagaatggagacaagggg

SEQ ID NO: 5130 - DNA, 201 bp, Homo sapiens
ctgctctcggtctccacgcccctccctgctgtcacccagacccgcggtgcgacagagactgcttcccagggtcacctggacctcacgcagctcatcggtgwcccgctgccctcgtccgtatcctttgtcacaggctatggtggcttcccggcctacagtttcgggcctggtgccaatgttggccgcccagccaggactctc

SEQ ID NO: 5131 - DNA, 201 bp, Homo sapiens
tctcctccccaacccccaccccacaattttatgacttccatttggcaattgttgaattataactgcgactgaaacaaacaggttcatagagatgaattttytgagaaacatatatctacatgttgtataattggattttttttccatgtaagtgaacataaaaacatcttttccgggtgctttcttcatttgactttttcc

SEQ ID NO: 5132 - DNA, 201 bp, Homo sapiens; identical to SEQ ID NO: 5102

SEQ ID NO: 5133 - DNA, 201 bp, Homo sapiens; identical to SEQ ID NO: 5103

SEQ ID NO: 5134 - DNA, 201 bp, Homo sapiens
ggccaccggggcccccggggccaccaggacctccagctatcctgggagcagctgtggcccttccaggtccccctggccctccaggacagccagggcttccyggatccagaaacctggtcacagcattcagcaacatggatgacatgctgcagaaagcgcatttggttatagaaggaacattcatctacctgagggacagca

SEQ ID NO: 5135 - DNA, 201 bp, Homo sapiens; identical to SEQ ID NO: 5105

SEQ ID NO: 5136 - DNA, 201 bp, Homo sapiens; identical to SEQ ID NO: 5106

SEQ ID NO: 5137 - DNA, 201 bp, Homo sapiens; identical to SEQ ID NO: 5107
  misc_feature (1)...(201): n = A,T,C or G, or insertion/deletion polymorphism (see Tables 1-2)

SEQ ID NO: 5138 - DNA, 201 bp, Homo sapiens; identical to SEQ ID NO: 5108

SEQ ID NO: 5139 - DNA, 201 bp, Homo sapiens; identical to SEQ ID NO: 5109

SEQ ID NO: 5140 - DNA, 201 bp, Homo sapiens; identical to SEQ ID NO: 5110

SEQ ID NO: 5141 - DNA, 201 bp, Homo sapiens; identical to SEQ ID NO: 5111

SEQ ID NO: 5142 - DNA, 201 bp, Homo sapiens; identical to SEQ ID NO: 5112

SEQ ID NO: 5143 - DNA, 201 bp, Homo sapiens; identical to SEQ ID NO: 5113

SEQ ID NO: 5144 - DNA, 201 bp, Homo sapiens; identical to SEQ ID NO: 5114
  misc_feature (1)...(201): n = A,T,C or G, or insertion/deletion polymorphism (see Tables 1-2)

SEQ ID NO: 5145 - DNA, 201 bp, Homo sapiens; identical to SEQ ID NO: 5115

SEQ ID NO: 5146 - DNA, 201 bp, Homo sapiens; identical to SEQ ID NO: 5116

SEQ ID NO: 5147 - DNA, 201 bp, Homo sapiens; identical to SEQ ID NO: 5117

SEQ ID NO: 5148 - DNA, 201 bp, Homo sapiens; identical to SEQ ID NO: 5118

SEQ ID NO: 5149 - DNA, 201 bp, Homo sapiens; identical to SEQ ID NO: 5119

SEQ ID NO: 5150 - DNA, 201 bp, Homo sapiens; identical to SEQ ID NO: 5120

SEQ ID NO: 5151 - DNA, 201 bp, Homo sapiens; identical to SEQ ID NO: 5121

SEQ ID NO: 5152 - DNA, 201 bp, Homo sapiens; identical to SEQ ID NO: 5122

SEQ ID NO: 5153 - DNA, 201 bp, Homo sapiens; identical to SEQ ID NO: 5123

SEQ ID NO: 5154 - DNA, 201 bp, Homo sapiens; identical to SEQ ID NO: 5124

SEQ ID NO: 5155 - DNA, 201 bp, Homo sapiens; identical to SEQ ID NO: 5125

SEQ ID NO: 5156 - DNA, 201 bp, Homo sapiens; identical to SEQ ID NO: 5126

SEQ ID NO: 5157 - DNA, 201 bp, Homo sapiens; identical to SEQ ID NO: 5127

SEQ ID NO: 5158 - DNA, 201 bp, Homo sapiens; identical to SEQ ID NO: 5128

SEQ ID NO: 5159 - DNA, 201 bp, Homo sapiens; identical to SEQ ID NO: 5129

SEQ ID NO: 5160 - DNA, 201 bp, Homo sapiens; identical to SEQ ID NO: 5130

SEQ ID NO: 5161 - DNA, 201 bp, Homo sapiens; identical to SEQ ID NO: 5131

SEQ ID NO: 5162 - DNA, 201 bp, Homo sapiens; identical to SEQ ID NO: 5103

SEQ ID NO: 5163 - DNA, 201 bp, Homo sapiens; identical to SEQ ID NO: 5134

SEQ ID NO: 5164 - DNA, 201 bp, Homo sapiens; identical to SEQ ID NO: 5105

SEQ ID NO: 5165 - DNA, 201 bp, Homo sapiens; identical to SEQ ID NO: 5106

SEQ ID NO: 5166 - DNA, 201 bp, Homo sapiens; identical to SEQ ID NO: 5107
  misc_feature (1)...(201): n = A,T,C or G, or insertion/deletion polymorphism (see Tables 1-2)

SEQ ID NO: 5167 - DNA, 201 bp, Homo sapiens; identical to SEQ ID NO: 5108

SEQ ID NO: 5168 - DNA, 201 bp, Homo sapiens; identical to SEQ ID NO: 5109

SEQ ID NO: 5169 - DNA, 201 bp, Homo sapiens; identical to SEQ ID NO: 5110

SEQ ID NO: 5170 - DNA, 201 bp, Homo sapiens; identical to SEQ ID NO: 5111

SEQ ID NO: 5171 - DNA, 201 bp, Homo sapiens; identical to SEQ ID NO: 5112

SEQ ID NO: 5172 - DNA, 201 bp, Homo sapiens; identical to SEQ ID NO: 5113

SEQ ID NO: 5173 - DNA, 201 bp, Homo sapiens; identical to SEQ ID NO: 5114
  misc_feature (1)...(201): n = A,T,C or G, or insertion/deletion polymorphism (see Tables 1-2)

SEQ ID NO: 5174 - DNA, 201 bp, Homo sapiens; identical to SEQ ID NO: 5115

SEQ ID NO: 5175 - DNA, 201 bp, Homo sapiens; identical to SEQ ID NO: 5116

SEQ ID NO: 5176 - DNA, 201 bp, Homo sapiens; identical to SEQ ID NO: 5117

SEQ ID NO: 5177 - DNA, 201 bp, Homo sapiens; identical to SEQ ID NO: 5118

SEQ ID NO: 5178 - DNA, 201 bp, Homo sapiens; identical to SEQ ID NO: 5119

SEQ ID NO: 5179 - DNA, 201 bp, Homo sapiens; identical to SEQ ID NO: 5120

SEQ ID NO: 5180 - DNA, 201 bp, Homo sapiens; identical to SEQ ID NO: 5121

SEQ ID NO: 5181 - DNA, 201 bp, Homo sapiens; identical to SEQ ID NO: 5122

SEQ ID NO: 5182 - DNA, 201 bp, Homo sapiens; identical to SEQ ID NO: 5123

SEQ ID NO: 5183 - DNA, 201 bp, Homo sapiens; identical to SEQ ID NO: 5124

SEQ ID NO: 5184 - DNA, 201 bp, Homo sapiens; identical to SEQ ID NO: 5125

SEQ ID NO: 5185 - DNA, 201 bp, Homo sapiens; identical to SEQ ID NO: 5127

SEQ ID NO: 5186 - DNA, 201 bp, Homo sapiens; identical to SEQ ID NO: 5126

SEQ ID NO: 5187 - DNA, 201 bp, Homo sapiens; identical to SEQ ID NO: 5128

SEQ ID NO: 5188 - DNA, 201 bp, Homo sapiens; identical to SEQ ID NO: 5130

SEQ ID NO: 5189 - DNA, 201 bp, Homo sapiens; identical to SEQ ID NO: 5129

SEQ ID NO: 5190 - DNA, 201 bp, Homo sapiens; identical to SEQ ID NO: 5131

SEQ ID NO: 5191 - DNA, 201 bp, Homo sapiens; identical to SEQ ID NO: 5102

SEQ ID NO: 5192 - DNA, 201 bp, Homo sapiens; identical to SEQ ID NO: 5103

SEQ ID NO: 5193 - DNA, 201 bp, Homo sapiens; identical to SEQ ID NO: 5134

SEQ ID NO: 5194 - DNA, 201 bp, Homo sapiens; identical to SEQ ID NO: 5105

SEQ ID NO: 5195 - DNA, 201 bp, Homo sapiens; identical to SEQ ID NO: 5106

SEQ ID NO: 5196 - DNA, 201 bp, Homo sapiens; identical to SEQ ID NO: 5107
  misc_feature (1)...(201): n = A,T,C or G, or insertion/deletion polymorphism (see Tables 1-2)

SEQ ID NO: 5197 - DNA, 201 bp, Homo sapiens; identical to SEQ ID NO: 5108

SEQ ID NO: 5198 - DNA, 201 bp, Homo sapiens; identical to SEQ ID NO: 5109

SEQ ID NO: 5199 - DNA, 201 bp, Homo sapiens; identical to SEQ ID NO: 5110

SEQ ID NO: 5200 - DNA, 201 bp, Homo sapiens; identical to SEQ ID NO: 5111

SEQ ID NO: 5201 - DNA, 201 bp, Homo sapiens; identical to SEQ ID NO: 5112

SEQ ID NO: 5202 - DNA, 201 bp, Homo sapiens; identical to SEQ ID NO: 5113

SEQ ID NO: 5203 - DNA, 201 bp, Homo sapiens; identical to SEQ ID NO: 5114
  misc_feature (1)...(201): n = A,T,C or G, or insertion/deletion polymorphism (see Tables 1-2)

SEQ ID NO: 5204 - DNA, 201 bp, Homo sapiens; identical to SEQ ID NO: 5115

SEQ ID NO: 5205 - DNA, 201 bp, Homo sapiens; identical to SEQ ID NO: 5116

SEQ ID NO: 5206 - DNA, 201 bp, Homo sapiens; identical to SEQ ID NO: 5117

SEQ ID NO: 5207 - DNA, 201 bp, Homo sapiens; identical to SEQ ID NO: 5118

SEQ ID NO: 5208 - DNA, 201 bp, Homo sapiens; identical to SEQ ID NO: 5119

SEQ ID NO: 5209 - DNA, 201 bp, Homo sapiens; identical to SEQ ID NO: 5120

SEQ ID NO: 5210 - DNA, 201 bp, Homo sapiens; identical to SEQ ID NO: 5121

SEQ ID NO: 5211 - DNA, 201 bp, Homo sapiens; identical to SEQ ID NO: 5122

SEQ ID NO: 5212 - DNA, 201 bp, Homo sapiens; identical to SEQ ID NO: 5123

SEQ ID NO: 5213 - DNA, 201 bp, Homo sapiens; identical to SEQ ID NO: 5124

SEQ ID NO: 5214 - DNA, 201 bp, Homo sapiens; identical to SEQ ID NO: 5125

SEQ ID NO: 5215 - DNA, 201 bp, Homo sapiens; identical to SEQ ID NO: 5127

SEQ ID NO: 5216 - DNA, 201 bp, Homo sapiens; identical to SEQ ID NO: 5126

SEQ ID NO: 5217 - DNA, 201 bp, Homo sapiens; identical to SEQ ID NO: 5128

SEQ ID NO: 5218 - DNA, 201 bp, Homo sapiens; identical to SEQ ID NO: 5130

SEQ ID NO: 5219 - DNA, 201 bp, Homo sapiens; identical to SEQ ID NO: 5129

SEQ ID NO: 5220 - DNA, 201 bp, Homo sapiens; identical to SEQ ID NO: 5131

SEQ ID NO: 5221 - DNA, 201 bp, Homo sapiens
tgatcaatatcacccatggattcatgaatttctcggacattcctgagctggtggggcctccggggccggacgggttgcctgggctgccaggatttccaggycctagaggaccaaaaggtgacactggtttacctggctttccaggactaaaaggagaacaggactacctttcctcatcagtggagtgggcgagaagggaga

SEQ ID NO: 5222 - DNA, 201 bp, Homo sapiens; identical to SEQ ID NO: 5134

SEQ ID NO: 5223 - DNA, 201 bp, Homo sapiens; identical to SEQ ID NO: 5105

SEQ ID NO: 5224 - DNA, 201 bp, Homo sapiens
cattcctgagctggtggggcctccggggccggacgggttgcctgggctgccaggatttccaggtcctagaggaccaaaaggtgacactggtttacctggcyttccaggactaaaaggagaacaggactacctttcctcatcagtggagtgggcgagaagggagagccgggtgccatcctgacagaggacattcctctggaa

SEQ ID NO: 5225 - DNA, 201 bp, Homo sapiens; identical to SEQ ID NO: 5107
  misc_feature (1)...(201): n = A,T,C or G, or insertion/deletion polymorphism (see Tables 1-2)

SEQ ID NO: 5226 - DNA, 201 bp, Homo sapiens; identical to SEQ ID NO: 5108

SEQ ID NO: 5227 - DNA, 201 bp, Homo sapiens; identical to SEQ ID NO: 5109

SEQ ID NO: 5228 - DNA, 201 bp, Homo sapiens; identical to SEQ ID NO: 5110

SEQ ID NO: 5229 - DNA, 201 bp, Homo sapiens; identical to SEQ ID NO: 5111

SEQ ID NO: 5230 - DNA, 201 bp, Homo sapiens; identical to SEQ ID NO: 5112

SEQ ID NO: 5231 - DNA, 201 bp, Homo sapiens; identical to SEQ ID NO: 5113

SEQ ID NO: 5232 - DNA, 201 bp, Homo sapiens
  misc_feature (1)...(201): n = A,T,C or G, or insertion/deletion polymorphism (see Tables 1-2)
agcatgcctggggaagtggaggccagtggtgtggcccccggggagctggacctctccatgtccgcccagagcctcggggaagaggccactgtgggtcctgntgatgaagaagacttggcagcagccacaacagaggagcccctcatcacagctgggggtgaagagtccggcagccctccccctgatgggccaccgctgccc

SEQ ID NO: 5233 - DNA, 201 bp, Homo sapiens
agcaggggaggccgaggcactcgccagcatgcctggggaagtggaggccagtggtgtggcccccggggagctggacctctccatgtccgcccagagcctcrgggaagaggccactgtgggtcctggtgatgaagaagacttggcagcagccacaacagaggagcccctcatcacagctgggggtgaagagtccggcagccc

SEQ ID NO: 5234 - DNA, 201 bp, Homo sapiens
gcctgggctgccaggatttccaggtcctagaggaccaaaaggtgacactggtttacctggctttccaggactaaaaggagaacaggactacctttcctcaycagtggagtgggcgagaagggagagccgggtgccatcctgacagaggacattcctctggaaaggctgatggggaaaaagggtgaacctggaatgcatgga

SEQ ID NO: 5235 - DNA, 201 bp, Homo sapiens; identical to SEQ ID NO: 5116

SEQ ID NO: 5236 - DNA, 201 bp, Homo sapiens; identical to SEQ ID NO: 5117

SEQ ID NO: 5237 - DNA, 201 bp, Homo sapiens
ccacctgggcacatcaaggtcttgtctaattccttgatcaatatcacccatggattcatgaatttctcggacattcctgagctggtggggcctccggggcyggacgggttgcctgggctgccaggatttccaggtcctagaggaccaaaaggtgacactggtttacctggctttccaggactaaaaggagaacaggactac

SEQ ID NO: 5238 - DNA, 201 bp, Homo sapiens
gaggccactgtgggtcctggtgatgaagaagacttggcagcagccacaacagaggagcccctcatcacagctgggggtgaagagtccggcagccctccccstgatgggccaccgctgcccctgcccacagtggctcctgaaagatggatcactccagctcaaagagaacatgtgggaatgaaaggacaggctgggcccaaa

SEQ ID NO: 5239 - DNA, 201 bp, Homo sapiens
tgtccacggagaacccagaggaaggggtcactccaggtccagataatgaagagcgtttagcagcaacagcagcaggggaggccgaggcactcgccagcatrcctggggaagtggaggccagtggtgtggcccccggggagctggacctctccatgtccgcccagagcctcggggaagaggccactgtgggtcctggtgatg

SEQ ID NO: 5240 - DNA, 201 bp, Homo sapiens; identical to SEQ ID NO: 5121

SEQ ID NO: 5241 - DNA, 201 bp, Homo sapiens; identical to SEQ ID NO: 5122

SEQ ID NO: 5242 - DNA, 201 bp, Homo sapiens; identical to SEQ ID NO: 5123

SEQ ID NO: 5243 - DNA, 201 bp, Homo sapiens; identical to SEQ ID NO: 5124

SEQ ID NO: 5244 - DNA, 201 bp, Homo sapiens; identical to SEQ ID NO: 5125

SEQ ID NO: 5245 - DNA, 201 bp, Homo sapiens; identical to SEQ ID NO: 5127

SEQ ID NO: 5246 - DNA, 201 bp, Homo sapiens; identical to SEQ ID NO: 5126

SEQ ID NO: 5247 - DNA, 201 bp, Homo sapiens
ctggggaagtggaggccagtggtgtggcccccggggagctggacctctccatgtccgcccagagcctcggggaagaggccactgtgggtcctggtgatgamgaagacttggcagcagccacaacagaggagcccctcatcacagctgggggtgaagagtccggcagccctccccctgatgggccaccgctgcccctgccca

SEQ ID NO: 5248 - DNA, 201 bp, Homo sapiens; identical to SEQ ID NO: 5130

SEQ ID NO: 5249 - DNA, 201 bp, Homo sapiens; identical to SEQ ID NO: 5129

SEQ ID NO: 5250 - DNA, 201 bp, Homo sapiens; identical to SEQ ID NO: 5131

SEQ ID NO: 5251 - DNA, 201 bp, Homo sapiens; identical to SEQ ID NO: 5103

SEQ ID NO: 5252 - DNA, 201 bp, Homo sapiens; identical to SEQ ID NO: 5134

SEQ ID NO: 5253 - DNA, 201 bp, Homo sapiens; identical to SEQ ID NO: 5105

SEQ ID NO: 5254 - DNA, 201 bp, Homo sapiens; identical to SEQ ID NO: 5106

SEQ ID NO: 5255 - DNA, 201 bp, Homo sapiens; identical to SEQ ID NO: 5107
  misc_feature (1)...(201): n = A,T,C or G, or insertion/deletion polymorphism (see Tables 1-2)

SEQ ID NO: 5256 - DNA, 201 bp, Homo sapiens; identical to SEQ ID NO: 5108

SEQ ID NO: 5257 - DNA, 201 bp, Homo sapiens; identical to SEQ ID NO: 5109

SEQ ID NO: 5258 - DNA, 201 bp, Homo sapiens; identical to SEQ ID NO: 5110

SEQ ID NO: 5259 - DNA, 201 bp, Homo sapiens; identical to SEQ ID NO: 5111

SEQ ID NO: 5260 - DNA, 201 bp, Homo sapiens; identical to SEQ ID NO: 5112

SEQ ID NO: 5261 - DNA, 201 bp, Homo sapiens; identical to SEQ ID NO: 5113

SEQ ID NO: 5262 - DNA, 201 bp, Homo sapiens; identical to SEQ ID NO: 5114
  misc_feature (1)...(201): n = A,T,C or G, or insertion/deletion polymorphism (see Tables 1-2)

SEQ ID NO: 5263 - DNA, 201 bp, Homo sapiens; identical to SEQ ID NO: 5115

SEQ ID NO: 5264 - DNA, 201 bp, Homo sapiens; identical to SEQ ID NO: 5116

SEQ ID NO: 5265 - DNA, 201 bp, Homo sapiens; identical to SEQ ID NO: 5117

SEQ ID NO: 5266 - DNA, 201 bp, Homo sapiens; identical to SEQ ID NO: 5118

SEQ ID NO: 5267 - DNA, 201 bp, Homo sapiens; identical to SEQ ID NO: 5119

SEQ ID NO: 5268 - DNA, 201 bp, Homo sapiens; identical to SEQ ID NO: 5120

SEQ ID NO: 5269 - DNA, 201 bp, Homo sapiens; identical to SEQ ID NO: 5121

SEQ ID NO: 5270 - DNA, 201 bp, Homo sapiens; identical to SEQ ID NO: 5122

SEQ ID NO: 5271 - DNA, 201 bp, Homo sapiens; identical to SEQ ID NO: 5123

SEQ ID NO: 5272 - DNA, 201 bp, Homo sapiens; identical to SEQ ID NO: 5124

SEQ ID NO: 5273 - DNA, 201 bp, Homo sapiens; identical to SEQ ID NO: 5125

SEQ ID NO: 5274 - DNA, 201 bp, Homo sapiens; identical to SEQ ID NO: 5127

SEQ ID NO: 5275 - DNA, 201 bp, Homo sapiens; identical to SEQ ID NO: 5126

SEQ ID NO: 5276 - DNA, 201 bp, Homo sapiens; identical to SEQ ID NO: 5128

SEQ ID NO: 5277 - DNA, 201 bp, Homo sapiens; identical to SEQ ID NO: 5130

SEQ ID NO: 5278 - DNA, 201 bp, Homo sapiens; identical to SEQ ID NO: 5129

SEQ ID NO: 5279 - DNA, 201 bp, Homo sapiens; identical to SEQ ID NO: 5131

SEQ ID NO: 5280 - DNA, 201 bp, Homo sapiens
ttctgttccttccacctagaatggcatttcctccatctatgcatgactgagctccaggggcatcttgttcattaactttttcttgatatttttgatagggycctagaggaccaaaaggtgacactggtttacctggctttccaggactaaaaggagaacagcagggcgagaagggagagccgggtgccatcctgacagagg

SEQ ID NO: 5281 - DNA, 197 bp, Homo sapiens
tatgcatgactgagctccaggggcatcttgttcattaactttttcttgatatttttgatagggtcctagaggaccaaaaggtgacactggtttacctggcyttccaggactaaaaggagaacagcagggcgagaagggagagccgggtgccatcctgacagaggacattcctctggaaaggctgatggggaaaaagg

SEQ ID NO: 5282 - DNA, 201 bp, Homo sapiens; identical to SEQ ID NO: 5107
  misc_feature (1)...(201): n = A,T,C or G, or insertion/deletion polymorphism (see Tables 1-2)

SEQ ID NO: 5283 - DNA, 201 bp, Homo sapiens; identical to SEQ ID NO: 5108

SEQ ID NO: 5284 - DNA, 201 bp, Homo sapiens; identical to SEQ ID NO: 5114
  misc_feature (1)...(201): n = A,T,C or G, or insertion/deletion polymorphism (see Tables 1-2)

SEQ ID NO: 5285 - DNA, 201 bp, Homo sapiens; identical to SEQ ID NO: 5115

SEQ ID NO: 5286 - DNA, 201 bp, Homo sapiens; identical to SEQ ID NO: 5119

SEQ ID NO: 5287 - DNA, 201 bp, Homo sapiens
ccacctgggcacatcaaggtcttgtctaattccttgatcaatatcacccatggattcatgaatttctcggacattcctgagctggtggggcctccggggcyggacgggttgcctgggctgccaggatttccagtaagtaccaccctcgctgtcttctatctgtgccccgtggctgcgatcattctgttccttccacctaga

SEQ ID NO: 5288 - DNA, 201 bp, Homo sapiens; identical to SEQ ID NO: 5122

SEQ ID NO: 5289 - DNA, 201 bp, Homo sapiens; identical to SEQ ID NO: 5121

SEQ ID NO: 5290 - DNA, 201 bp, Homo sapiens; identical to SEQ ID NO: 5120

SEQ ID NO: 5291 - DNA, 201 bp, Homo sapiens; identical to SEQ ID NO: 5123

SEQ ID NO: 5292 - DNA, 201 bp, Homo sapiens; identical to SEQ ID NO: 5124

SEQ ID NO: 5293 - DNA, 201 bp, Homo sapiens; identical to SEQ ID NO: 5125

SEQ ID NO: 5294 - DNA, 201 bp, Homo sapiens; identical to SEQ ID NO: 5127

SEQ ID NO: 5295 - DNA, 201 bp, Homo sapiens; identical to SEQ ID NO: 5128

SEQ ID NO: 5296 - DNA, 201 bp, Homo sapiens; identical to SEQ ID NO: 5130

SEQ ID NO: 5297 - DNA, 201 bp, Homo sapiens
ttttccagaaagctggttgtgggaagttcatcttgttcccagaagaaaacagttgcagtttgccctacctgattctctaaccacctgggaaattcaaggcrttggcatttcaaacactggtatatgtgttgctgatactgtcaaggcaaaggtgttcaaagatgtcttcctggaaatgaatataccatattctgttgtacg

SEQ ID NO: 5298 - DNA, 201 bp, Homo sapiens
acaaactgaatttggttgctactcctcttttcctgaagcctgggattccatatcccatcaaggtgcaggttaaagattcgcttgaccagttggtaggaggrgtcccagtaacactgaatgcacaaacaattgatgtaaaccaagagacatctgacttggatccaagcaaaagtgtaacacgtgttgatgatggagtagctt

SEQ ID NO: 5299 - DNA, 201 bp, Homo sapiens
gagcagaggtatggaggtggcttttattcaacccaggacacaatcaatgccattgagggcctgacggaatattcactcctggttaaacaactccgcttgartatggacatcgatgtttcttacaagcataaaggtgccttacataattataaaatgacagacaagaatttccttgggaggccagtagaggtgcttctcaat

SEQ ID NO: 5300 - DNA, 201 bp, Homo sapiens
actttggcacgagggagaaattttcagatgcatcttatcaaagtataaacattccagtaacacagaacatggttccttcatcccgacttctggtctattayatcgtcacaggagaacagacagcagaattagtgtctgattcagtctggttaaatattgaagaaaaatgtggcaaccagctccaggttcatctgtctcctg

SEQ ID NO: 5301 - DNA, 201 bp, Homo sapiens
tgggagaacatctgaatattattgttacccccaaaagcccatatattgacaaaataactcactataattacttgattttatccaagggcaaaattatccaytttggcacgagggagaaattttcagatgcatcttatcaaagtataaacattccagtaacacagaacatggttccttcatcccgacttctggtctattaca

SEQ ID NO: 5302 - DNA, 143 bp, Homo sapiens
ttatatccgtggtttcctgctacctccaaccatgggccttttkggaatactttgttttttaatcttcctggggaaaacctggggacaggagcaaacatatgtcatttcagcaccaaaaatattccgtgttggagcatctgaaa

SEQ ID NO: 5303 - DNA, 201 bp, Homo sapiens
ggcttttattcaacccaggacacaatcaatgccattgagggcctgacggaatattcactcctggttaaacaactccgcttgagtatggacatcgatgtttyttacaagcataaaggtgccttacataattataaaatgacagacaagaatttccttgggaggccagtagaggtgcttctcaatgatgacctcattgtcagt

SEQ ID NO: 5304 - DNA, 201 bp, Homo sapiens
ttgagtgtaaaaggactgcttgtaggtgagatcttgtctgcagttctaagtcaggaaggcatcaatatcctaacccacctccccaaagggagtgcagaggyggagctgatgagcgttgtcccagtattctatgtttttcactacctggaaacaggaaatcattggaacatttttcattctgacccattaattgaaaagcag

SEQ ID NO: 5305 - DNA, 201 bp, Homo sapiens
cccactacagaggctacggaaactctgattacaaacgcatagtagcatgtgccagctacaagcccagcagggaagaatcatcatctggatcctctcatgcrgtgatggacatctccttgcctactggaatcagtgcaaatgaagaagacttaaaagcccttgtggaaggggtggatcaactattcactgattaccaaatca

SEQ ID NO: 5306 - DNA, 186 bp, Homo sapiens
ttatatccgtggtttcctgctacctccaaccatgggccttttgggaatactttgttttttaatcttcctggggaaaacctggggayaggagcaaacatatgtcatttcagcaccaaaaatattccgtgttggagcatctgaaaatattgtgattcaagtttatggatacactgaagcatttgatgc

SEQ ID NO: 5307 - DNA, 201 bp, Homo sapiens
tggagtagcttcctttgtgcttaatctcccatctggagtgacggtgctggagtttaatgtcaaaactgatgctccagatcttccagaagaaaatcaggccrgggaaggttaccgagcaatagcatactcatctctcagccaaagttacctttatattgattggactgataaccataaggctttgctagtgggagaacatct

SEQ ID NO: 5308 - DNA, 201 bp, Homo sapiens
acttaaaagatgatcaaaaagaaatgatgcaaacagcaatgcaaaacacaatgttgataaatggaattgctcaagtcacatttgattctgaaacagcagtsaaagaactgtcatactacagtttagaagatttaaacaacaagtacctttatattgctgtaacagtcatagagtctacaggtggattttctgaagaggcag

SEQ ID NO: 5309 - DNA, 201 bp, Homo sapiens
gccaaagttacctttatattgattggactgataaccataaggctttgctagtgggagaacatctgaatattattgttacccccaaaagcccatatattgayaaaataactcactataattacttgattttatccaagggcaaaattatccactttggcacgagggagaaattttcagatgcatcttatcaaagtataaaca

SEQ ID NO: 5310 - DNA, 201 bp, Homo sapiens
caagtacctttatattgctgtaacagtcatagagtctacaggtggattttctgaagaggcagaaatacctggcatcaaatatgtcctctctccctacaaamtgaatttggttgctactcctcttttcctgaagcctgggattccatatcccatcaaggtgcaggttaaagattcgcttgaccagttggtaggaggagtccc

SEQ ID NO: 5311 - DNA, 201 bp, Homo sapiens
acactgaagcatttgatgcaacaatctctattaaaagttatcctgataaaaaatttagttactcctcaggccatgttcatttatcctcagagaataaattycaaaactctgcaatcttaacaatacaaccaaaacaattgcctggaggacaaaacccagtttcttatgtgtatttggaagttgtatcaaagcatttttcaa

SEQ ID NO: 5312 - DNA, 201 bp, Homo sapiens
caatagcatactcatctctcagccaaagttacctttatattgattggactgataaccataaggctttgctagtgggagaacatctgaatattattgttacycccaaaagcccatatattgacaaaataactcactataattacttgattttatccaagggcaaaattatccactttggcacgagggagaaattttcagatg

SEQ ID NO: 5313 - DNA, 201 bp, Homo sapiens
gaatttccttgggaggccagtagaggtgcttctcaatgatgacctcattgtcagtacaggatttggcagtggcttggctacagtacatgtaacaactgtakttcacaaaaccagtacctctgaggaagtttgcagcttttatttgaaaatcgatactcaggatattgaagcatcccactacagaggctacggaaactctga

SEQ ID NO: 5314 - DNA, 201 bp, Homo sapiens
tctattacatcgtcacaggagaacagacagcagaattagtgtctgattcagtctggttaaatattgaagaaaaatgtggcaaccagctccaggttcatctrtctcctgatgcagatgcatattctccaggccaaactgtgtctcttaatatggcaactggaatggattcctgggtggcattagcagcagtggacagtgctg

SEQ ID NO: 5315 - DNA, 201 bp, Homo sapiens
tgtccaggatgggtgcgacacccactccctttaagtccacaggggatattgcaggcacagttgtcccagagaccaacaaggaacccagataccaagaggamcccccagctcctcaaccaaaagcagccccgagaacttttcttcgtcctagtcctgaagatgaagcaatatatggccctaataccaaaatggtaaggttca

SEQ ID NO: 5316 - DNA, 201 bp, Homo sapiens
caacgctggggaccgggcagatttctggagaatgcgtggccagaggtctggggtgaagaagaacctgaggaaaagtcgggaagacctcacagctgttgtgyctgtcagcaccaagttcccagcttatgagagggttttgctgcgagaagctggtttcaagagacctgtggtcttattcggccccatagctgatatagcaat

SEQ ID NO: 5317 - DNA, 201 bp, Homo sapiens
ccagttagaatgcaccatggagacgtggtgggactccagctcgtgtgtcctcatggagaacccaggggacagctggtgcaaattcagaactgagggctctrtttgtgggactgggttagaggagtctgtggctttttgttcagaattaagcagaacactgcagtcagatcctgttacttgcttcagtggaccgaaatctgt

SEQ ID NO: 5318 - DNA, 201 bp, Homo sapiens
tgaattacacccagtggttcccaattgtgatttttttcaacccagactccagacaaggtgtcaaaaccatgagacaaaggttaaatccaacgtccaacaawagttctcgaaagttatttgatcaagccaacaagcttaaaaaaacgtgtgcacacctttttacagctacaatcaacctaaattcagccaatgatagctggt

SEQ ID NO: 5319 - DNA, 201 bp, Homo sapiens
gaaagctgtggacctgttgaattacacccagtggttcccaattgtgatttttttcaacccagactccagacaaggtgtcaaaaccatgagacaaaggttaratccaacgtccaacaaaagttctcgaaagttatttgatcaagccaacaagcttaaaaaaacgtgtgcacacctttttacagctacaatcaacctaaattc

SEQ ID NO: 5320 - DNA, 201 bp, Homo sapiens
aagtcaaaatatttgagaagatggatcacaaggccaggttacagagaatgcaggagctccaggaagcacagaatgcaaggatcgaaattgcccagaagcaycctgatatctatgcagttccaatcaaaacgcacaagccagaccctggcacgccccagcacacgagttccagaccccctgagccacagaaagctccttcca

SEQ ID NO: 5321 - DNA, 201 bp, Homo sapiens
cgttttttataagaagccactttgaatgtgagaaggaaactccacagagcctggccttcaccagaggggaggtcttccgagtggtagacacactgtatgayggcaagctgggcaactggctggctgtgaggattgggaacgagttggagaaaggcttaatccccaacaagagcagagctgaacaaatggccagtgttcaaa

SEQ ID NO: 5322 - DNA, 201 bp, Homo sapiens
cactactggatgtgactccgaaagctgtggacctgttgaattacacccagtggttcccaattgtgatttttttcaacccagactccagacaaggtgtcaamaccatgagacaaaggttaaatccaacgtccaacaaaagttctcgaaagttatttgatcaagccaacaagcttaaaaaaacgtgtgcacacctttttacag

SEQ ID NO: 5323 - DNA, 201 bp, Homo sapiens
acacactgtatgacggcaagctgggcaactggctggctgtgaggattgggaacgagttggagaaaggcttaatccccaacaagagcagagctgaacaaatrgccagtgttcaaaatgcccagagagacaacgctggggaccgggcagatttctggagaatgcgtggccagaggtctggggtgaagaagaacctgaggaaaa

SEQ ID NO: 5324 - DNA, 201 bp, Homo sapiens
ttgtgatttttttcaacccagactccagacaaggtgtcaaaaccatgagacaaaggttaaatccaacgtccaacaaaagttctcgaaagttatttgatcamgccaacaagcttaaaaaaacgtgtgcacacctttttacagctacaatcaacctaaattcagccaatgatagctggtttggcagcttaaaggacactattc

SEQ ID NO: 5325 - DNA, 201 bp, Homo sapiens
tttgcgtacttgtaatatgtatattaagaagcaataactatttttcctcattaatagctgccttcaaggactgtttcagtgtgagtcagaatgtgaaaaakgaataaaaaatactgttgggctcaaactaaattcaaagaagtactttattgcaactcttttaagtgccttggatgagaagtgtcttaaattttcttcctt

SEQ ID NO: 5326 - DNA, 201 bp, Homo sapiens
aaaacattttgactaagtttttataccagcttaatagctgtagttttccctgcactgtgtcatcttttcaaggcatttgtctttgtaatattttccataawtttggactgtctatatcataactatacttgatagtttggctataagtgctcaatagcttgaagcccaagaagttggtatcgaaatttgttgtttgtttaa

SEQ ID NO: 5327 - DNA, 201 bp, Homo sapiens
ctgcactgtgtcatcttttcaaggcatttgtctttgtaatattttccataaatttggactgtctatatcataactatacttgatagtttggctataagtgytcaatagcttgaagcccaagaagttggtatcgaaatttgttgtttgtttaaacccaagtgctgcacaaaagcagatacttgaggaaaacactatttccaa

SEQ ID NO: 5328 - DNA, 200 bp, Homo sapiens
gtctatatcataactatacttgatagtttggctataagtgctcaatagcttgaagcccaagaagttggtatcgaaatttgttgtttgtttaaacccaagtrctgcacaaaagcagatacttgaggaaaacactatttccaaaagcacatgtattgacaacagttttataatttaataaaaaggaatacattgcaatccgt

SEQ ID NO: 5329 - DNA, 201 bp, Homo sapiens
ttaaccgccatgggcgcggactatctgagttgcgacagccgcctcatcagtgactttgaagacacggacggtgaaggaggcgcctacactgacaatgagcyggatgagccagccgaggagccgctggtgtcgtccatcacccgctcctcggagccggtgcagcacgaggagagcataaggaaacccagcccagagccacga

SEQ ID NO: 5330 - DNA, 201 bp, Homo sapiens
aaggagacataattctcaagatcaatgggactgtaactgagaacatgtctttaacggatgctcgaaaattgatagaaaagtcaagaggaaaactacagctrgtggtgttgagagacagccagcagaccctcatcaacatcccgtcattaaatgacagtgactcagaaatagaagatatttcagaaatagagtcaaaccgat

SEQ ID NO: 5331 - DNA, 201 bp, Homo sapiens
agcatcagcaaggagaagcggtttgggtctctgaaggaaagatggaagggatggatgatgaccccgaagaccgcatgtcctacttaaccgccatgggcgcrgactatctgagttgcgacagccgcctcatcagtgactttgaagacacggacggtgaaggaggcgcctacactgacaatgagctggatgagccagccgagg

SEQ ID NO: 5332 - DNA, 201 bp, Homo sapiens
aggagagacgtcatcagtattctgattatgattatcattcctcaagtgagaagctgaaggaaaggccaagttccagagaggacacgccgagcagattgtcyaggatgggtgcgacacccactccctttaagtccacaggggatattgcaggcacagttgtcccagagaccaacaaggaacccagataccaagaggaacccc

SEQ ID NO: 5333 - DNA, 201 bp, Homo sapiens
aggacactattcagcatcagcaaggagaagcggtttgggtctctgaaggaaagatggaagggatggatgatgaccccgaagaccgcatgtcctacttaacygccatgggcgcggactatctgagttgcgacagccgcctcatcagtgactttgaagacacggacggtgaaggaggcgcctacactgacaatgagctggatg

SEQ ID NO: 5334 - DNA, 201 bp, Homo sapiens
aagtccacaggggatattgcaggcacagttgtcccagagaccaacaaggaacccagataccaagaggaacccccagctcctcaaccaaaagcagccccgaraacttttcttcgtcctagtcctgaagatgaagcaatatatggccctaataccaaaatggtaaggttcaagaagggagacagcgtgggcctccggttggct

SEQ ID NO: 5335 - DNA, 201 bp, Homo sapiens; identical to SEQ ID NO: 5315

SEQ ID NO: 5336 - DNA, 201 bp, Homo sapiens; identical to SEQ ID NO: 5316

SEQ ID NO: 5337 - DNA, 201 bp, Homo sapiens; identical to SEQ ID NO: 5317

SEQ ID NO: 5338 - DNA, 201 bp, Homo sapiens; identical to SEQ ID NO: 5318

SEQ ID NO: 5339 - DNA, 201 bp, Homo sapiens; identical to SEQ ID NO: 5319

SEQ ID NO: 5340 - DNA, 201 bp, Homo sapiens; identical to SEQ ID NO: 5320

SEQ ID NO: 5341 - DNA, 201 bp, Homo sapiens; identical to SEQ ID NO: 5321

SEQ ID NO: 5342 - DNA, 201 bp, Homo sapiens; identical to SEQ ID NO: 5322

SEQ ID NO: 5343 - DNA, 201 bp, Homo sapiens; identical to SEQ ID NO: 5323

SEQ ID NO: 5344 - DNA, 201 bp, Homo sapiens; identical to SEQ ID NO: 5324

SEQ ID NO: 5345 - DNA, 201 bp, Homo sapiens; identical to SEQ ID NO: 5326

SEQ ID NO: 5346 - DNA, 186 bp, Homo sapiens
ctgcactgtgtcatcttttcaaggcatttgtctttgtaatattttccataaatttggactgtctatatcataactatacttgatagtttggctataagtgytcaatagcttgaagcccaagaagttggtatcgaaatttgttgtttgtttaaacccaagtgctgcacaaaagcagatacttgagga

SEQ ID NO: 5347 - DNA, 126 bp, Homo sapiens
gtctatatcataactatacttgatagtttggctataagtgctcaatagcttgaagcccaagaagttggtatcgaaatttgttgtttgtttaaacccaagtrctgcacaaaagcagatacttgagga

SEQ ID NO: 5348 - DNA, 201 bp, Homo sapiens; identical to SEQ ID NO: 5329

SEQ ID NO: 5349 - DNA, 201 bp, Homo sapiens; identical to SEQ ID NO: 5330

SEQ ID NO: 5350 - DNA, 201 bp, Homo sapiens; identical to SEQ ID NO: 5331

SEQ ID NO: 5351 - DNA, 201 bp, Homo sapiens; identical to SEQ ID NO: 5332

SEQ ID NO: 5352 - DNA, 201 bp, Homo sapiens; identical to SEQ ID NO: 5333

SEQ ID NO: 5353 - DNA, 201 bp, Homo sapiens; identical to SEQ ID NO: 5334

SEQ ID NO: 5354 - DNA, 201 bp, Homo sapiens; identical to SEQ ID NO: 5315

SEQ ID NO: 5355 - DNA, 201 bp, Homo sapiens; identical to SEQ ID NO: 5316

SEQ ID NO: 5356 - DNA, 201 bp, Homo sapiens; identical to SEQ ID NO: 5317

SEQ ID NO: 5357 - DNA, 201 bp, Homo sapiens; identical to SEQ ID NO: 5318

SEQ ID NO: 5358 - DNA, 201 bp, Homo sapiens; identical to SEQ ID NO: 5319

SEQ ID NO: 5359 - DNA, 201 bp, Homo sapiens
acaatgagctggatgagccagccgaggagccgctggtgtcgtccatcacccgctcctcggagccggtgcagcacgaggagatcgaaattgcccagaagcaycctgatatctatgcagttccaatcaaaacgcacaagccagaccctggcacgccccagcacacgagttccagaccccctgagccacagaaagctccttcca

SEQ ID NO: 5360 - DNA, 201 bp, Homo sapiens; identical to SEQ ID NO: 5321

SEQ ID NO: 5361 - DNA, 201 bp, Homo sapiens; identical to SEQ ID NO: 5322

SEQ ID NO: 5362 - DNA, 201 bp, Homo sapiens; identical to SEQ ID NO: 5323

SEQ ID NO: 5363 - DNA, 201 bp, Homo sapiens; identical to SEQ ID NO: 5324

SEQ ID NO: 5364 - DNA, 201 bp, Homo sapiens; identical to SEQ ID NO: 5326

SEQ ID NO: 5365 - DNA, 186 bp, Homo sapiens; identical to SEQ ID NO: 5346

SEQ ID NO: 5366 - DNA, 126 bp, Homo sapiens; identical to SEQ ID NO: 5347

SEQ ID NO: 5367 - DNA, 201 bp, Homo sapiens
ttaaccgccatgggcgcggactatctgagttgcgacagccgcctcatcagtgactttgaagacacggacggtgaaggaggcgcctacactgacaatgagcyggatgagccagccgaggagccgctggtgtcgtccatcacccgctcctcggagccggtgcagcacgaggagatcgaaattgcccagaagcatcctgatatc

SEQ ID NO: 5368 - DNA, 201 bp, Homo sapiens; identical to SEQ ID NO: 5330

SEQ ID NO: 5369 - DNA, 201 bp, Homo sapiens; identical to SEQ ID NO: 5331

SEQ ID NO: 5370 - DNA, 201 bp, Homo sapiens; identical to SEQ ID NO: 5332

SEQ ID NO: 5371 - DNA, 201 bp, Homo sapiens; identical to SEQ ID NO: 5333

SEQ ID NO: 5372 - DNA, 201 bp, Homo sapiens; identical to SEQ ID NO: 5334

SEQ ID NO: 5373 - DNA, 201 bp, Homo sapiens
ttaactgccatgggcgcagactatctgagttgcgacagccgcctcatcagtgactttgaagacacggacggtgaaggaggcgcctacactgacaatgagcyggatgagccagccgaggagccgctggtgtcgtccatcacccgctcctcggagccggtgcagcacgaggagagcataaggaaacccagcccagagccacga

SEQ ID NO: 5374 - DNA, 201 bp, Homo sapiens; identical to SEQ ID NO: 5332

SEQ ID NO: 5375 - DNA, 201 bp, Homo sapiens; identical to SEQ ID NO: 5321

SEQ ID NO: 5376 - DNA, 201 bp, Homo sapiens
aagtcaaaatatttggagaagatggatcacaagggccagggttacaagagaatgcaggagctccaggaagcacagaatgcaaggatcgaaattgcccagaygcatcctgatatctatgcagttccaatcaaaacgcacaagccagaccctggcacgccccagcacacgagttccagaccccctgagccacagaaagctcct

SEQ ID NO: 5377 - DNA, 201 bp, Homo sapiens; identical to SEQ ID NO: 5317

SEQ ID NO: 5378 - DNA, 201 bp, Homo sapiens; identical to SEQ ID NO: 5323

SEQ ID NO: 5379 - DNA, 201 bp, Homo sapiens; identical to SEQ ID NO: 5334

SEQ ID NO: 5380 - DNA, 201 bp, Homo sapiens
agcatcagcaaggagaagcggtttgggtctctgaaggaaagatggaagggatggatgatgaccccgaagaccgcatgtcctacttaactgccatgggcgcrgactatctgagttgcgacagccgcctcatcagtgactttgaagacacggacggtgaaggaggcgcctacactgacaatgagctggatgagccagccgagg

SEQ ID NO: 5381 - DNA, 201 bp, Homo sapiens
aggacactattcagcatcagcaaggagaagcggtttgggtctctgaaggaaagatggaagggatggatgatgaccccgaagaccgcatgtcctacttaacygccatgggcgcagactatctgagttgcgacagccgcctcatcagtgactttgaagacacggacggtgaaggaggcgcctacactgacaatgagctggatg

SEQ ID NO: 5382 - DNA, 201 bp, Homo sapiens; identical to SEQ ID NO: 5315

SEQ ID NO: 5383 - DNA, 201 bp, Homo sapiens; identical to SEQ ID NO: 5325

SEQ ID NO: 5384 - DNA, 201 bp, Homo sapiens; identical to SEQ ID NO: 5326

SEQ ID NO: 5385 - DNA, 201 bp, Homo sapiens; identical to SEQ ID NO: 5327

SEQ ID NO: 5386 - DNA, 200 bp, Homo sapiens; identical to SEQ ID NO: 5328

SEQ ID NO: 5387 - DNA, 201 bp, Homo sapiens; identical to SEQ ID NO: 5316

SEQ ID NO: 5388 - DNA, 201 bp, Homo sapiens
aaggagacataattctcaagatcaatgggactgtaactgagaacatgtctttaacggatgctcgaaaattgatagaaaagtcaagaggaaaactacagctrgtggtgttgagagacagccagcagaccctcatcaacatcccgtcattaaatgacagtgactcagaaatagaagatatttcagaaatagagtcaacccgat

SEQ ID NO: 5389 - DNA, 201 bp, Homo sapiens
ggagcctggggggctccccatctgtgtccaaataaaaagcggtgggcaagggctggccgcagctcctgtgccctgtcaggacgactgagggctcaaacacmccacacttaatggctttctgggtcttttatttgtacccatgtgtctgtcacaccatgaatgtacctggggaaatcaactgacctccctgaacatttcacg

SEQ ID NO: 5390 - DNA, 179 bp, Homo sapiens
tccctgaacatttcacgcagtcagggaacaggtgaggaaagaaataaataagtgattctaatgctgcctaggtcaccctcaacccccatttactggcacarttgggtggagagaagggaaggggtatgattgtcctgatggctcagggttgcaggaggttcagaggggaaggaggaaag

SEQ ID NO: 5391 - DNA, 201 bp, Homo sapiens
gtcagaagtgccgaaagacagcacacaccagtggttggacggctcagactgtgtactccaggcccctggcaacacttcctgcctgctgcattacatgcctyaggctcccagtgcagagcctcccctggagtggccattccctgacctcttctcagagcctctctgccgaggtcccatcctccccctgcaggcaaatctcac

SEQ ID NO: 5392 - DNA, 201 bp, Homo sapiens
ggacagtggataggtgcccgaggcctacagctggcctggggctcgtgtctgggcttcggacgttggggcccggtggcccaccctttccgtagttgtcccaratggagctggaattggatgctggtgaccaagacctgctggccttcctgctagaggaaagtgaagatttggggacggcacccgatgaggccgtgagggccc

SEQ ID NO: 5393 - DNA, 112 bp, Homo sapiens
cctggcaggaarcgagggtgcggcgcaatccggagaggacgccaggacgacgcccgagttccctttcaggctagaactcttcctttttctagcttggggtagaaggcggagc

SEQ ID NO: 5394 - DNA, 201 bp, Homo sapiens
atatggagcttcagaacaaagtacagcttctggaggaacagaatttgtcccttctagatcaactgaggaaactccaggccatggtgattgagatatcaaayaaaaccagcagcagcagcacctgcatcttggtcctactagtctccttctgcctcctccttgtacctgctatgtactcctctgacacaagggggagcctgc

SEQ ID NO: 5395 - DNA, 201 bp, Homo sapiens
caggagcctggggggctccccatctgtgtccaaataaaaagcggtgggcaagggctggccgcagctcctgtgccctgtcaggacgactgagggctcaaacmcaccacacttaatggctttctgggtcttttatttgtacccatgtgtctgtcacaccatgaatgtacctggggaaatcaactgacctccctgaacatttca

SEQ ID NO: 5396 - DNA, 201 bp, Homo sapiens; identical to SEQ ID NO: 5389

SEQ ID NO: 5397 - DNA, 201 bp, Homo sapiens
tccctgaacatttcacgcagtcagggaacaggtgaggaaagaaataaataagtgattctaatgctgcctaggtcaccctcaacccccatttactggcacarttgggtggagagaagggaaggggtatgattgtcctgatggctcagggttgcaggaggttcagaggggaaggaggaaaggtgtcttcttttccacatgggt

SEQ ID NO: 5398 - DNA, 201 bp, Homo sapiens; identical to SEQ ID NO: 5391

SEQ ID NO: 5399 - DNA, 201 bp, Homo sapiens; identical to SEQ ID NO: 5392

SEQ ID NO: 5400 - DNA, 112 bp, Homo sapiens; identical to SEQ ID NO: 5393

SEQ ID NO: 5401 - DNA, 201 bp, Homo sapiens; identical to SEQ ID NO: 5394

SEQ ID NO: 5402 - DNA, 201 bp, Homo sapiens; identical to SEQ ID NO: 5395

SEQ ID NO: 5403 - DNA, 201 bp, Homo sapiens; identical to SEQ ID NO: 5389

SEQ ID NO: 5404 - DNA, 201 bp, Homo sapiens; identical to SEQ ID NO: 5397

SEQ ID NO: 5405 - DNA, 201 bp, Homo sapiens; identical to SEQ ID NO: 5391

SEQ ID NO: 5406 - DNA, 201 bp, Homo sapiens; identical to SEQ ID NO: 5392

SEQ ID NO: 5407 - DNA, 112 bp, Homo sapiens; identical to SEQ ID NO: 5393

SEQ ID NO: 5408 - DNA, 201 bp, Homo sapiens; identical to SEQ ID NO: 5394

SEQ ID NO: 5409 - DNA, 201 bp, Homo sapiens; identical to SEQ ID NO: 5395

SEQ ID NO: 5410 - DNA, 201 bp, Homo sapiens
ggcctctgaagaagatagtattgaaaaagataaagaagaagctgcaatatctagagaactttctgagatcaccacagcagaggcagagcctgtggttcctygaggaggctttgactctcccttttaccgagacagtctcccaggttctcagcggaagacccactcggcagcctccagttctcagggcgccagcgtgaaccc

SEQ ID NO: 5411 - DNA, 201 bp, Homo sapiens
tggaactggaatctcacctggccaagaaagaccaccttcttttggaacagaagaaatatctagaggatgtcaaactccaggcaagaggacagctgcaggcygcagagagcaggtatgaggctcagaaaaggataacccaggtgtttgaattggagatcttagatttatatggcaggttggagaaagatggcctcctgaaaa

SEQ ID NO: 5412 - DNA, 201 bp, Homo sapiens
agcacctcttggacaggattaacgaatatgtgggcaaagccgccactcgtttatccatcctctcgttactgggtcatgtcataagactgcagccatcttgraagcataagctctctcaagcacctcttttgccttctttactaaaatgtctcaagatggacactgacgtcgttgtcctcacaacaggcgtcttggtgttga

SEQ ID NO: 5413 - DNA, 201 bp, Homo sapiens
acataatgctgccatgaaagatcagttgaagttacaagagaaggacatccagatgtggaaggttagtctgcagaaagaacaagctagatacaatcagctcyaggagcagcgtgacactatggtaaccaagctccacagccagatcagacagctgcagcatgaccgagaggaattctacaaccagagccaggaattacagac

SEQ ID NO: 5414 - DNA, 201 bp, Homo sapiens
ttgcacatcctgaccaccttgcaagagccacatgacaagcacctcttggacaggattaacgaatatgtgggcaaagccgccactcgtttatccatcctctmgttactgggtcatgtcataagactgcagccatcttggaagcataagctctctcaagcacctcttttgccttctttactaaaatgtctcaagatggacact

SEQ ID NO: 5415 - DNA, 201 bp, Homo sapiens
ctctggaggaacataatgctgccatgaaagatcagttgaagttacaagagaaggacatccagatgtggaaggttagtctgcagaaagaacaagctagatasaatcagctccaggagcagcgtgacactatggtaaccaagctccacagccagatcagacagctgcagcatgaccgagaggaattctacaaccagagccagg

SEQ ID NO: 5416 - DNA, 201 bp, Homo sapiens
tgctgccatgaaagatcagttgaagttacaagagaaggacatccagatgtggaaggttagtctgcagaaagaacaagctagatacaatcagctccaggagyagcgtgacactatggtaaccaagctccacagccagatcagacagctgcagcatgaccgagaggaattctacaaccagagccaggaattacagacgaagct

SEQ ID NO: 5417 - DNA, 201 bp, Homo sapiens
gtggcagggcgtggtcccaactactcagcctagcacaggctggcagttggtactgaattgtcagatgtggagtattagtgacaccacacatttaattcagmtttgtccaaaggaaagcttaaaacccaatacagtctagtttcctggttccgttttagaaaaggaaaacgtgaacaaacttagaaagggaaggaaatccca

SEQ ID NO: 5418 - DNA, 201 bp, Homo sapiens
ggctttggaagcgggcagcctcccccgtatgatcatctttttgaggtggcattgccaaagacagcccatcattttgtcatcaggaagactgaggagctgtwaaagaaagcaaaaggaaacacagaggaagatggtgtgccctctacctccccaatggaagtgctggacagactgatacagcagggagcagacgcgcacagc

SEQ ID NO: 5419 - DNA, 201 bp, Homo sapiens
aagcacctcttggacaggattaacgaatatgtgggcaaagccgccactcgtttatccatcctctcgttactgggtcatgtcataagactgcagccatcttrgaagcataagctctctcaagcacctcttttgccttctttactaaaatgtctcaagatggacactgacgtcgttgtcctcacaacaggcgtcttggtgttg

SEQ ID NO: 5420 - DNA, 201 bp, Homo sapiens
attggaaaggaaaagaggcccaagtgcaaaagaaaaaacattttagaaacggacagcttataaaaataaagggaagaaaggaggcagcatggagagaggcctgtgctagaagctccatggacgtgtctgcacagggtcctcagctcatccatgcggcctgggtgtccttttactcagctttataacaaatgtggctccaag

SEQ ID NO: 5421 - DNA, 201 bp, Homo sapiens
ggcggctcctccgcaaggtgatcaaagcagcagctctggaggaacataatgctgccatgaaagatcagttgaagttacaagagaaggacatccagatgtgraaggttagtctgcagaaagaacaagctagatacaatcagctccaggagcagcgtgacactatggtaaccaagctccacagccagatcagacagctgcagc

SEQ ID NO: 5422 - DNA, 201 bp, Homo sapiens
accttcccctccacccgccctaaccccctctcatttacctcgcagtgtgttctaatccaagggccagttggtgttcctcagtagctttactttcttcctttcccccccaaatggttgcgtcctttgaacctgtgcaatatgaggccaaatttaatctttgagtctaacacaccactttctgctttcccgaagttcagataa

SEQ ID NO: 5423 - DNA, 201 bp, Homo sapiens
agcagtctaaacagagtccgggagaatgctggcaaaggctggctgtgtatacccactaggctgccccacgtgctcccgagagatgacactagtcagaaaaktggcagtggcagagaatccaaactcaacaagtgctcctgaaagaaatgctagaagcctaagaactgtggtctggtgttccagctgaggcagggggatttg

SEQ ID NO: 5424 - DNA, 201 bp, Homo sapiens
tatacccactaggctgccccacgtgctcccgagagatgacactagtcagaaaagtggcagtggcagagaatccaaactcaacaagtgctcctgaaagaaaygctagaagcctaagaactgtggtctggtgttccagctgaggcagggggatttggtaggaaggagccagtgaacttggctttcctgtttctatctttcatt

SEQ ID NO: 5425 - DNA, 201 bp, Homo sapiens
ctgcagaacaagcactcagataccacaaaggaagtagaaatgatgaaagccgcctatcggaaagagctagaaaaaaacagaagccatgttctccagcagastcagaggcttgatacctcccaaaaacggattttggaactggaatctcacctggccaagaaagaccaccttcttttggaacagaagaaatatctagaggat

SEQ ID NO: 5426 - DNA, 201 bp, Homo sapiens
atctgcatctgatagaactttgatggattttcaaaaagccgttgacaaggctctgctatacagtctataaaaattgttattatgggattggaagaaacacrtggtcatgaatagaaaaaaaacaaacccaaaggtaggaaggtcaaggtcatttcttagatggagaagttgtgaaagatgtccttggagatgagttttagg

SEQ ID NO: 5427 - DNA, 201 bp, Homo sapiens
cccaggccacagtcacaccccccaggaaggaagagagaatggattctgcaagaccatgtctacacagacaacaccatcttctgaatgacagaggatcagargagccacctggcagcaaaggttctgtcactctaagtgatcttccagggtttttaggtgatctggcctctgaagaagatagtattgaaaaagataaagaag

SEQ ID NO: 5428 - DNA, 201 bp, Homo sapiens
agcctttacactcctccctggacaagcttgggcctgacacaccaaagcaagcctttactcccatagacctgccctgcggcagtgctgatgaaagccctgcrggagacagggaatgccagacttctttggagaccagtatcttcactcccagtccttgtaaaattccacctccgacgagagtgggctttggaagcgggcagc

SEQ ID NO: 5429 - DNA, 201 bp, Homo sapiens
tcagccgatgtcaccaccagcccttatgctgacacacagaatagctatgggtgtgctacttctaccccttactccacgtctcggctgatgttgttaaataygccagggcagctacctcagactctgagttccccatcgacacggctgataactgaaccaccacaagctactctttggagcccatctatggtttgtggtatg

SEQ ID NO: 5430 - DNA, 201 bp, Homo sapiens
gtttctatctttcattaaaaagaatagaaggattcagtcataaagaggtaaaaaactgtcacggtacgaaatcttagtgcctacggaggcctcgagcagaragaatgaaagtcttttttttttttttttttttttagcatggcaataaatattctagcatccctaactaaaggggactagacagttagagactctgtcacc

SEQ ID NO: 5431 - DNA, 201 bp, Homo sapiens
cagtgaacttggctttcctgtttctatctttcattaaaaagaatagaaggattcagtcataaagaggtaaaaaactgtcacggtacgaaatcttagtgccyacggaggcctcgagcagaaagaatgaaagtcttttttttttttttttttttttagcatggcaataaatattctagcatccctaactaaaggggactagac

SEQ ID NO: 5432 - DNA, 201 bp, Homo sapiens
acaactgcagaacaagcactcagataccacaaaggaagtagaaatgatgaaagccgcctatcggaaagagctagaaaaaaacagaagccatgttctccagyagactcagaggcttgatacctcccaaaaacggattttggaactggaatctcacctggccaagaaagaccaccttcttttggaacagaagaaatatctaga

SEQ ID NO: 5433 - DNA, 201 bp, Homo sapiens
agataaagaagaagctgcaatatctagagaactttctgagatcaccacagcagaggcagagcctgtggttcctcgaggaggctttgactctcccttttacygagacagtctcccaggttctcagcggaagacccactcggcagcctccagttctcagggcgccagcgtgaaccctgagcctttacactcctccctggacaa

SEQ ID NO: 5434 - DNA, 201 bp, Homo sapiens
cctggacaagcttgggcctgacacaccaaagcaagcctttactcccatagacctgccctgcggcagtgctgatgaaagccctgcgggagacagggaatgcyagacttctttggagaccagtatcttcactcccagtccttgtaaaattccacctccgacgagagtgggctttggaagcgggcagcctcccccgtatgatca

SEQ ID NO: 5435 - DNA, 201 bp, Homo sapiens
gcgtcttggtgttgataaccatgctaccaatgattccacagtctgggaaacagcatcttcttgatttctttgacatttttggccgtctgtcatcatggtgmctgaagaaaccaggccacgtggcggaagtctatctcgtccatctccatgccagtgtgtacgcactctttcatcgcctttatggaatgtacccttgcaact

SEQ ID NO: 5436 - DNA, 201 bp, Homo sapiens
tgggcctgacacaccaaagcaagcctttactcccatagacctgccctgcggcagtgctgatgaaagccctgcgggagacagggaatgccagacttctttgkagaccagtatcttcactcccagtccttgtaaaattccacctccgacgagagtgggctttggaagcgggcagcctcccccgtatgatcatctttttgaggt

SEQ ID NO: 5437 - DNA, 201 bp, Homo sapiens
cccatagacctgccctgcggcagtgctgatgaaagccctgcgggagacagggaatgccagacttctttggagaccagtatcttcactcccagtccttgtaraattccacctccgacgagagtgggctttggaagcgggcagcctcccccgtatgatcatctttttgaggtggcattgccaaagacagcccatcattttgtc

SEQ ID NO: 5438 - DNA, 201 bp, Homo sapiens
ggaacaactgcagaacaagcactcagataccacaaaggaagtagaaatgatgaaagccgcctatcggaaagagctagaaaaaaacagaagccatgttctcyagcagactcagaggcttgatacctcccaaaaacggattttggaactggaatctcacctggccaagaaagaccaccttcttttggaacagaagaaatatct

SEQ ID NO: 5439 - DNA, 201 bp, Homo sapiens
ccatgaactggaccctcgaaggtggaagagattagaaactcatgatgttgtgatcgagtgtgccaaaatctctctggatcccacagaagcctcatatgaakatggctattctgtgtctcaccaaatctcagcccgctttcctcatcgttcagccgatgtcaccaccagcccttatgctgacacacagaatagctatgggtg

SEQ ID NO: 5440 - DNA, 201 bp, Homo sapiens
cctatgcttgtaaacaccttggtggattattacctggaaaccagctctcagccggcattgcacatcctgaccaccttgcaagagccacatgacaagcaccycttggacaggattaacgaatatgtgggcaaagccgccactcgtttatccatcctctcgttactgggtcatgtcataagactgcagccatcttggaagcat

SEQ ID NO: 5441 - DNA, 201 bp, Homo sapiens
gcctctgaagaagatagtattgaaaaagataaagaagaagctgcaatatctagagaactttctgagatcaccacagcagaggcagagcctgtggttcctcraggaggctttgactctcccttttaccgagacagtctcccaggttctcagcggaagacccactcggcagcctccagttctcagggcgccagcgtgaaccct

SEQ ID NO: 5442 - DNA, 201 bp, Homo sapiens
gtacccttgcaacttcgtctcctttttgcgttctcattacagtatgaaagaaaacctggagacttttgaagaagtggtcaagccaatgatggagcatgtgygaattcatccggaattagtgactggatccaaggaccatgaactggaccctcgaaggtggaagagattagaaactcatgatgttgtgatcgagtgtgccaa

SEQ ID NO: 5443 - DNA, 201 bp, Homo sapiens
agaagcctcatatgaagatggctattctgtgtctcaccaaatctcagcccgctttcctcatcgttcagccgatgtcaccaccagcccttatgctgacacayagaatagctatgggtgtgctacttctaccccttactccacgtctcggctgatgttgttaaatatgccagggcagctacctcagactctgagttccccatc

SEQ ID NO: 5444 - DNA, 201 bp, Homo sapiens
aaaggaactcctctgggaaccccagcaacctctcctcctccagccccactctgtcattcggatgactacgtgcacatttcactcccccaggccacagtcayaccccccaggaaggaagagagaatggattctgcaagaccatgtctacacagacaacaccatcttctgaatgacagaggatcagaagagccacctggcagc

SEQ ID NO: 5445 - DNA, 201 bp, Homo sapiens
ctcccccaggccacagtcacaccccccaggaaggaagagagaatggattctgcaagaccatgtctacacagacaacaccatcttctgaatgacagaggatsagaagagccacctggcagcaaaggttctgtcactctaagtgatcttccagggtttttaggtgatctggcctctgaagaagatagtattgaaaaagataaa

SEQ ID NO: 5446 - DNA, 201 bp, Homo sapiens
ccaccactgtgggctcacttcccagttcaaaaagcttcctgggtatgaaggctcgagagttatttcgtaataagagcgagagccagtgtgatgaggacggyatgaccagtagcctttctgagagcctaaagacagaactgggcaaagacttgggtgtggaagccaagattcccctgaacctagatggccctcacccgtctc

SEQ ID NO: 5447 - DNA, 201 bp, Homo sapiens
aaacagctgagggggaggagacggtggtttggtagtggccccaatgaagaaccttcagaacctgtagcacacgtcctggagccagcacagcgccttcgagygagagaatggcccaacaagcaaatgtcggggagcttcttgccatgctggactcccccatgctgggtgtgcgggacgacgtgacagctgtctttaaagaga

SEQ ID NO: 5448 - DNA, 201 bp, Homo sapiens
gcagcagcatgccctccggaacaggcggctcctccgcaaggtgatcaaagcagcagctctggaggaacataatgctgccatgaaagatcagttgaagttayaagagaaggacatccagatgtggaaggttagtctgcagaaagaacaagctagatacaatcagctccaggagcagcgtgacactatggtaaccaagctcca

SEQ ID NO: 5449 - DNA, 201 bp, Homo sapiens
agctgttaaagaaagcaaaaggaaacacagaggaagatggtgtgccctctacctccccaatggaagtgctggacagactgatacagcagggagcagacgcrcacagcaaggagctgaacaagttgcctttacccagcaagtctgtcgactggacccactttggaggctctcctccttcagatgagatccgcaccctccgag

SEQ ID NO: 5450 - DNA, 201 bp, Homo sapiens
gctggaggactgcaggaacatgattgcggagctgcggatagaactgaagaaggccaacaacaaggtgtgtcacactgagctgctgctcagtcaggtttccyaaaagctctcaaacagtgagtcggtccagcagcagatggagttcttgaacaggcagctgttggttcttggggaggtcaacgagctctatttggaacaact

SEQ ID NO: 5451 - DNA, 201 bp, Homo sapiens
tgcaggaacatgattgcggagctgcggatagaactgaagaaggccaacaacaaggtgtgtcacactgagctgctgctcagtcaggtttcccaaaagctctsaaacagtgagtcggtccagcagcagatggagttcttgaacaggcagctgttggttcttggggaggtcaacgagctctatttggaacaactgcagaacaag

SEQ ID NO: 5452 - DNA, 201 bp, Homo sapiens
ccttttctcgctgaaagcactaagaggtgggaggaggcctgcacaggctggaggagggtttgggcagagcgaagacccggccaggaccttggtgagatggrgtgccgcccacctcctgcggatactcttggagagttgttcccccagggggctctgccccacctggagaaggaagctgcctggtgtggagtgactcaaatc

SEQ ID NO: 5453 - DNA, 201 bp, Homo sapiens; identical to SEQ ID NO: 5410

SEQ ID NO: 5454 - DNA, 201 bp, Homo sapiens; identical to SEQ ID NO: 5411

SEQ ID NO: 5455 - DNA, 201 bp, Homo sapiens; identical to SEQ ID NO: 5412

SEQ ID NO: 5456 - DNA, 201 bp, Homo sapiens; identical to SEQ ID NO: 5413

SEQ ID NO: 5457 - DNA, 201 bp, Homo sapiens; identical to SEQ ID NO: 5414

SEQ ID NO: 5458 - DNA, 201 bp, Homo sapiens; identical to SEQ ID NO: 5415

SEQ ID NO: 5459 - DNA, 201 bp, Homo sapiens; identical to SEQ ID NO: 5416

SEQ ID NO: 5460 - DNA, 201 bp, Homo sapiens; identical to SEQ ID NO: 5417

SEQ ID NO: 5461 - DNA, 201 bp, Homo sapiens; identical to SEQ ID NO: 5418

SEQ ID NO: 5462 - DNA, 201 bp, Homo sapiens; identical to SEQ ID NO: 5419

SEQ ID NO: 5463 - DNA, 201 bp, Homo sapiens; identical to SEQ ID NO: 5420

SEQ ID NO: 5464 - DNA, 201 bp, Homo sapiens; identical to SEQ ID NO: 5421

SEQ ID NO: 5465 - DNA, 201 bp, Homo sapiens; identical to SEQ ID NO: 5422

SEQ ID NO: 5466 - DNA, 201 bp, Homo sapiens; identical to SEQ ID NO: 5423

SEQ ID NO: 5467 - DNA, 201 bp, Homo sapiens; identical to SEQ ID NO: 5424

SEQ ID NO: 5468 - DNA, 201 bp, Homo sapiens; identical to SEQ ID NO: 5425

SEQ ID NO: 5469 - DNA, 201 bp, Homo sapiens; identical to SEQ ID NO: 5426

SEQ ID NO: 5470 - DNA, 201 bp, Homo sapiens; identical to SEQ ID NO: 5427

SEQ ID NO: 5471 - DNA, 201 bp, Homo sapiens; identical to SEQ ID NO: 5428

SEQ ID NO: 5472 - DNA, 201 bp, Homo sapiens; identical to SEQ ID NO: 5429

SEQ ID NO: 5473 - DNA, 201 bp, Homo sapiens; identical to SEQ ID NO: 5430

SEQ ID NO: 5474 - DNA, 201 bp, Homo sapiens; identical to SEQ ID NO: 5431

SEQ ID NO: 5475 - DNA, 201 bp, Homo sapiens; identical to SEQ ID NO: 5432

SEQ ID NO: 5476 - DNA, 201 bp, Homo sapiens; identical to SEQ ID NO: 5433

SEQ ID NO: 5477 - DNA, 201 bp, Homo sapiens; identical to SEQ ID NO: 5434

SEQ ID NO: 5478 - DNA, 201 bp, Homo sapiens; identical to SEQ ID NO: 5435

SEQ ID NO: 5479 - DNA, 201 bp, Homo sapiens; identical to SEQ ID NO: 5436

SEQ ID NO: 5480 - DNA, 201 bp, Homo sapiens; identical to SEQ ID NO: 5437

SEQ ID NO: 5481 - DNA, 201 bp, Homo sapiens; identical to SEQ ID NO: 5438

SEQ ID NO: 5482 - DNA, 201 bp, Homo sapiens; identical to SEQ ID NO: 5439

SEQ ID NO: 5483 - DNA, 201 bp, Homo sapiens; identical to SEQ ID NO: 5440

SEQ ID NO: 5484 - DNA, 201 bp, Homo sapiens; identical to SEQ ID NO: 5441

SEQ ID NO: 5485 - DNA, 201 bp, Homo sapiens; identical to SEQ ID NO: 5442

SEQ ID NO: 5486 - DNA, 201 bp, Homo sapiens; identical to SEQ ID NO: 5443

SEQ ID NO: 5487 - DNA, 201 bp, Homo sapiens; identical to SEQ ID NO: 5444

SEQ ID NO: 5488 - DNA, 201 bp, Homo sapiens; identical to SEQ ID NO: 5445

SEQ ID NO: 5489 - DNA, 201 bp, Homo sapiens; identical to SEQ ID NO: 5446

SEQ ID NO: 5490 - DNA, 174 bp, Homo sapiens
tttggtagtggccccaatgaagaaccttcagaacctgtagcacacgtcctggagccagcacagcgccttcgagygagagaatggcccaacaagcaaatgtcggggagcttcttgccatgctggactcccccatgctgggtgtgcgggacgacgtgacagctgtctttaaagaga

SEQ ID NO: 5491 - DNA, 201 bp, Homo sapiens; identical to SEQ ID NO: 5448

SEQ ID NO: 5492 - DNA, 201 bp, Homo sapiens; identical to SEQ ID NO: 5449

SEQ ID NO: 5493 - DNA, 201 bp, Homo sapiens; identical to SEQ ID NO: 5450

SEQ ID NO: 5494 - DNA, 201 bp, Homo sapiens; identical to SEQ ID NO: 5451

SEQ ID NO: 5495 - DNA, 201 bp, Homo sapiens; identical to SEQ ID NO: 5452

SEQ ID NO: 5496 - DNA, 201 bp, Homo sapiens; identical to SEQ ID NO: 5410

SEQ ID NO: 5497 - DNA, 201 bp, Homo sapiens; identical to SEQ ID NO: 5411

SEQ ID NO: 5498 - DNA, 201 bp, Homo sapiens; identical to SEQ ID NO: 5412

SEQ ID NO: 5499 - DNA, 201 bp, Homo sapiens; identical to SEQ ID NO: 5413

SEQ ID NO: 5500 - DNA, 201 bp, Homo sapiens; identical to SEQ ID NO: 5414

SEQ ID NO: 5501 - DNA, 201 bp, Homo sapiens; identical to SEQ ID NO: 5415

SEQ ID NO: 5502 - DNA, 201 bp, Homo sapiens; identical to SEQ ID NO: 5416

SEQ ID NO: 5503 - DNA, 201 bp, Homo sapiens; identical to SEQ ID NO: 5417

SEQ ID NO: 5504 - DNA, 201 bp, Homo sapiens; identical to SEQ ID NO: 5418

SEQ ID NO: 5505 - DNA, 201 bp, Homo sapiens; identical to SEQ ID NO: 5419

SEQ ID NO: 5506 - DNA, 201 bp, Homo sapiens; identical to SEQ ID NO: 5420

SEQ ID NO: 5507 - DNA, 201 bp, Homo sapiens; identical to SEQ ID NO: 5421

SEQ ID NO: 5508 - DNA, 201 bp, Homo sapiens; identical to SEQ ID NO: 5422

SEQ ID NO: 5509 - DNA, 201 bp, Homo sapiens; identical to SEQ ID NO: 5423

SEQ ID NO: 5510 - DNA, 201 bp, Homo sapiens; identical to SEQ ID NO: 5424

SEQ ID NO: 5511 - DNA, 201 bp, Homo sapiens; identical to SEQ ID NO: 5425

SEQ ID NO: 5512 - DNA, 201 bp, Homo sapiens; identical to SEQ ID NO: 5426

SEQ ID NO: 5513 - DNA, 201 bp, Homo sapiens; identical to SEQ ID NO: 5427

SEQ ID NO: 5514 - DNA, 201 bp, Homo sapiens; identical to SEQ ID NO: 5428

SEQ ID NO: 5515 - DNA, 201 bp, Homo sapiens; identical to SEQ ID NO: 5429

SEQ ID NO: 5516 - DNA, 201 bp, Homo sapiens; identical to SEQ ID NO: 5430

SEQ ID NO: 5517 - DNA, 201 bp, Homo sapiens; identical to SEQ ID NO: 5431

SEQ ID NO: 5518 - DNA, 201 bp, Homo sapiens; identical to SEQ ID NO: 5432

SEQ ID NO: 5519 - DNA, 201 bp, Homo sapiens; identical to SEQ ID NO: 5433

SEQ ID NO: 5520 - DNA, 201 bp, Homo sapiens; identical to SEQ ID NO: 5434

SEQ ID NO: 5521 - DNA, 201 bp, Homo sapiens; identical to SEQ ID NO: 5435

SEQ ID NO: 5522 - DNA, 201 bp, Homo sapiens; identical to SEQ ID NO: 5436

SEQ ID NO: 5523 - DNA, 201 bp, Homo sapiens; identical to SEQ ID NO: 5437

SEQ ID NO: 5524 - DNA, 201 bp, Homo sapiens; identical to SEQ ID NO: 5438

SEQ ID NO: 5525 - DNA, 201 bp, Homo sapiens; identical to SEQ ID NO: 5439

SEQ ID NO: 5526 - DNA, 201 bp, Homo sapiens; identical to SEQ ID NO: 5440

SEQ ID NO: 5527 - DNA, 201 bp, Homo sapiens; identical to SEQ ID NO: 5441

SEQ ID NO: 5528 - DNA, 201 bp, Homo sapiens; identical to SEQ ID NO: 5442

SEQ ID NO: 5529 - DNA, 201 bp, Homo sapiens; identical to SEQ ID NO: 5443

SEQ ID NO: 5530 - DNA, 201 bp, Homo sapiens; identical to SEQ ID NO: 5444

SEQ ID NO: 5531 - DNA, 201 bp, Homo sapiens; identical to SEQ ID NO: 5445

SEQ ID NO: 5532 - DNA, 201 bp, Homo sapiens; identical to SEQ ID NO: 5446

SEQ ID NO: 5533 - DNA, 201 bp, Homo sapiens
ctgaagtaccagttgtcgctagaacagtttggtagtggccccaatgaagaaccttcagaacctgtagcacacgtcctggagccagcacagcgccttcgagygagagaatggcccaacaagcaaatgtcggggagcttcttgccatgctggactcccccatgctgggtgtgcgggacgacgtgacagctgtctttaaagaga

SEQ ID NO: 5534 - DNA, 201 bp, Homo sapiens; identical to SEQ ID NO: 5448

SEQ ID NO: 5535 - DNA, 201 bp, Homo sapiens; identical to SEQ ID NO: 5449

SEQ ID NO: 5536 - DNA, 201 bp, Homo sapiens; identical to SEQ ID NO: 5450

SEQ ID NO: 5537 - DNA, 201 bp, Homo sapiens; identical to SEQ ID NO: 5451

SEQ ID NO: 5538 - DNA, 201 bp, Homo sapiens; identical to SEQ ID NO: 5452

SEQ ID NO: 5539 - DNA, 201 bp, Homo sapiens
gcatcgcgccagatgagcaatttggggcctggttccgggccgtggagcggctcagcgagactgagagctacaacctgtcgtgcgagctggagcccccatcygagtcagccagcaacaccctcaggaccaagaagaacacagccattgtcaagcgctggagcgaccgccaggcccccagcactgagctcagtaccagtggca

SEQ ID NO: 5540 - DNA, 201 bp, Homo sapiens
agctgctgcagattctctcagatgaccggaagctgaagatccctgaaaacgccaacgtcttctatgccatgaactctactgccaactatgactttgtcctsaagaagcggaccttcaccaagggagtgaaggtcaagcacggagccagctccaccctccctcgcatgaagcagaaaggactcaagattgccaagggcatct

SEQ ID NO: 5541 - DNA, 201 bp, Homo sapiens
aacaggatccagctccctcacaaactctagagctggagccagctccagcaccagttccatcattacagccttcctggccttcacctgtggttgcagagaaygggctgagtgaggagaagcctcacctcttggtgttccctccagatctggtggcagagcagtttacactgatggatgcggaactgttcaagaaggtggtgc

SEQ ID NO: 5542 - DNA, 201 bp, Homo sapiens
acatgtacaagagcatcctggtaagccggcgggggtggcctgggtgcctccctccactggcggcaaatgcaccctgaacacagtgcaccatccctgccctyccggggtctaccttgtagttggcggggaaggacagatgtcagccaggtacagaaatgaagaaggtagtgatcagggacaaggctggcctgagggcagagg

SEQ ID NO: 5543 - DNA, 201 bp, Homo sapiens
cgtgcgagctggagcccccatccgagtcagccagcaacaccctcaggaccaagaagaacacagccattgtcaagcgctggagcgaccgccaggcccccagyactgagctcagtaccagtggcagctcccactccaagtcctgtgaccagctcaggtgtggcccctacctcagcagcggggacatcgctgacgcgctcagcg

SEQ ID NO: 5544 - DNA, 201 bp, Homo sapiens
tgggactagaatcggctccagcgccagctctggaactagagccagctccagaacaggatccagctccctcacaaactctagagctggagccagctccagcrccagttccatcattacagccttcctggccttcacctgtggttgcagagaacgggctgagtgaggagaagcctcacctcttggtgttccctccagatctgg

SEQ ID NO: 5545 - DNA, 129 bp, Homo sapiens
cgggctcacagcggtggcaaagcccagcmgcgcgggccgcgccgccgcccccgccgcgcgccgggccggccccgcgcccgcgctgcgagccttccatggtgcagcgcatgtgggccgaggcggccgggc

SEQ ID NO: 5546 - DNA, 201 bp, Homo sapiens
gccttaggtgccttctgctctctggaaccagaggactagctgacttttgccaaggagcagtgccaacgggcatggcatggtgccctgcctgcccccgggcrccacctctgtacacttccctgacaccttcccaggtgtgggtcactgccacctgtgcccatgggcaccccagagcacccactgtgaccactgcagttctct

SEQ ID NO: 5547 - DNA, 201 bp, Homo sapiens
atcgaggtggccagggagtgccggatcctcaagaacttctcgtcactgtatgccatcctctctgccctgcagagcaactccatccaccgtctgaagaagaygtgggaagacgtttccagggacagtttccggatctttcagaagctgtcagagatcttctcagatgagaacaactactcattgagccgggagctgctcatc

SEQ ID NO: 5548 - DNA, 201 bp, Homo sapiens
cgcagctagaccccgacctgccgcgcccggagagctccacgcaggagatcggtgaggagctgatcaacggagtcatctactccatctccctgcgcaaggtkcagctgcaccacggaggcaacaaggggcagcgctggctcgggtatgagaatgagtcggccctgaacctttatgagacttgcaaggtgcggaccgtgaagg

SEQ ID NO: 5549 - DNA, 201 bp, Homo sapiens
aggaggagccggaggactatgagctgctgcagattctctcagatgaccggaagctgaagatccctgaaaacgccaacgtcttctatgccatgaactctacygccaactatgactttgtcctgaagaagcggaccttcaccaagggagtgaaggtcaagcacggagccagctccaccctccctcgcatgaagcagaaaggac

SEQ ID NO: 5550 - DNA, 201 bp, Homo sapiens
aaggacagatgtcagccaggtacagaaatgaagaaggtagtgatcagggacaaggctggcctgagggcagagggggaggaaaggagcagccgtgcaaagcycccaggagtgaccagccaagataaggctccggctgtaatccgcaaggccatggacaaacacaacctggaggaggaggagccggaggactatgagctgctg

SEQ ID NO: 5551 - DNA, 201 bp, Homo sapiens
gtaccagtggcagctcccactccaagtcctgtgaccagctcaggtgtggcccctacctcagcagcggggacatcgctgacgcgctcagcgtgcactcggcyggctcctctagctccgacgtggaggagatcaacatcagcttcgtcccggagtctcctgatggccaggaaaagaaggtgactgcctgcccttctccccaat

SEQ ID NO: 5552 - DNA, 201 bp, Homo sapiens
aggggcagcgctggctcgggtatgagaatgagtcggccctgaacctttatgagacttgcaaggtgcggaccgtgaaggctggcacgctggagaagctggtrgagcacctggtgccagccttccagggcagcgacctctcctacgtcaccatcttcctgtgtacctatagagccttcaccaccacccaacaggtcctggacc

SEQ ID NO: 5553 - DNA, 201 bp, Homo sapiens
cgaaagccccagacagggccagggtggtggagcactggatcgaggtggccagggagtgccggatcctcaagaacttctcgtcactgtatgccatcctctckgccctgcagagcaactccatccaccgtctgaagaagacgtgggaagacgtttccagggacagtttccggatctttcagaagctgtcagagatcttctcag

SEQ ID NO: 5554 - DNA, 201 bp, Homo sapiens
ccagctcaggtgtggcccctacctcagcagcggggacatcgctgacgcgctcagcgtgcactcggccggctcctctagctccgacgtggaggagatcaacmtcagcttcgtcccggagtctcctgatggccaggaaaagaaggtgactgcctgcccttctccccaatatcctttcccatctccccactccaaatccatgca

SEQ ID NO: 5555 - DNA, 201 bp, Homo sapiens
ttccctgcctcaagcagctggtggcctacgtgcagctcaacatgccaggctcagacctggagcgccgtgcccaccttctcctggcccagctggagcactcrgaacccattgaggcagagcctgaggctctgtcaccagtgccagctctaaaaccaactccagagctcgagctagctctaacaccagctcgagcacccagcc

SEQ ID NO: 5556 - DNA, 201 bp, Homo sapiens
aaaggagcagccgtgcaaagcccccaggagtgaccagccaagataaggctccggctgtaatccgcaaggccatggacaaacacaacctggaggaggaggarccggaggactatgagctgctgcagattctctcagatgaccggaagctgaagatccctgaaaacgccaacgtcttctatgccatgaactctactgccaact

SEQ ID NO: 5557 - DNA, 201 bp, Homo sapiens
ccagctcaggtgtggcccctacctcagcagcggggacatcgctgacgcgctcagcgtgcactcggccggctcctctagctccgacgtggaggagatcaacmtcagcttcgtcccggagtctcctgatggccaggaaaagaagttctgggaatcagcctcacagtcatccccggagacctccggcatcagctcagcctccag

SEQ ID NO: 5558 - DNA, 201 bp, Homo sapiens; identical to SEQ ID NO: 5552

SEQ ID NO: 5559 - DNA, 201 bp, Homo sapiens; identical to SEQ ID NO: 5553

SEQ ID NO: 5560 - DNA, 129 bp, Homo sapiens; identical to SEQ ID NO: 5545

SEQ ID NO: 5561 - DNA, 201 bp, Homo sapiens; identical to SEQ ID NO: 5539

SEQ ID NO: 5562 - DNA, 201 bp, Homo sapiens; identical to SEQ ID NO: 5547

SEQ ID NO: 5563 - DNA, 201 bp, Homo sapiens; identical to SEQ ID NO: 5555

SEQ ID NO: 5564 - DNA, 201 bp, Homo sapiens; identical to SEQ ID NO: 5541

SEQ ID NO: 5565 - DNA, 201 bp, Homo sapiens; identical to SEQ ID NO: 5543

SEQ ID NO: 5566 - DNA, 201 bp, Homo sapiens; identical to SEQ ID NO: 5548

SEQ ID NO: 5567 - DNA, 201 bp, Homo sapiens; identical to SEQ ID NO: 5544

SEQ ID NO: 5568 - DNA, 201 bp, Homo sapiens
gtaccagtggcagctcccactccaagtcctgtgaccagctcaggtgtggcccctacctcagcagcggggacatcgctgacgcgctcagcgtgcactcggcyggctcctctagctccgacgtggaggagatcaacatcagcttcgtcccggagtctcctgatggccaggaaaagaagttctgggaatcagcctcacagtcat

SEQ ID NO: 5569 - DNA, 201 bp, Homo sapiens; identical to SEQ ID NO: 5540

SEQ ID NO: 5570 - DNA, 201 bp, Homo sapiens; identical to SEQ ID NO: 5539

SEQ ID NO: 5571 - DNA, 201 bp, Homo sapiens; identical to SEQ ID NO: 5547

SEQ ID NO: 5572 - DNA, 201 bp, Homo sapiens; identical to SEQ ID NO: 5541

SEQ ID NO: 5573 - DNA, 201 bp, Homo sapiens; identical to SEQ ID NO: 5549

SEQ ID NO: 5574 - DNA, 201 bp, Homo sapiens; identical to SEQ ID NO: 5543

SEQ ID NO: 5575 - DNA, 201 bp, Homo sapiens
caccgaggctgaggatgatggtagattgccagagctccacgcaggagatcggtgaggagctgatcaacggagtcatctactccatctccctgcgcaaggtkcagctgcaccacggaggcaacaaggggcagcgctggctcgggtatgagaatgagtcggccctgaacctttatgagacttgcaaggtgcggaccgtgaagg

SEQ ID NO: 5576 - DNA, 201 bp, Homo sapiens; identical to SEQ ID NO: 5544

SEQ ID NO: 5577 - DNA, 201 bp, Homo sapiens; identical to SEQ ID NO: 5568

SEQ ID NO: 5578 - DNA, 201 bp, Homo sapiens; identical to SEQ ID NO: 5552

SEQ ID NO: 5579 - DNA, 201 bp, Homo sapiens; identical to SEQ ID NO: 5553

SEQ ID NO: 5580 - DNA, 201 bp, Homo sapiens; identical to SEQ ID NO: 5557

SEQ ID NO: 5581 - DNA, 201 bp, Homo sapiens; identical to SEQ ID NO: 5555

SEQ ID NO: 5582 - DNA, 201 bp, Homo sapiens; identical to SEQ ID NO: 5546

SEQ ID NO: 5583 - DNA, 201 bp, Homo sapiens
acaatggcaacatgtacaagagcatcctggtgaccagccaagataaggctccggctgtaatccgcaaggccatggacaaacacaacctggaggaggaggarccggaggactatgagctgctgcagattctctcagatgaccggaagctgaagatccctgaaaacgccaacgtcttctatgccatgaactctactgccaact

SEQ ID NO: 5584 - DNA, 201 bp, Homo sapiens; identical to SEQ ID NO: 5539

SEQ ID NO: 5585 - DNA, 201 bp, Homo sapiens; identical to SEQ ID NO: 5540

SEQ ID NO: 5586 - DNA, 201 bp, Homo sapiens; identical to SEQ ID NO: 5541

SEQ ID NO: 5587 - DNA, 201 bp, Homo sapiens; identical to SEQ ID NO: 5542

SEQ ID NO: 5588 - DNA, 201 bp, Homo sapiens; identical to SEQ ID NO: 5543

SEQ ID NO: 5589 - DNA, 201 bp, Homo sapiens; identical to SEQ ID NO: 5544

SEQ ID NO: 5590 - DNA, 201 bp, Homo sapiens; identical to SEQ ID NO: 5546

SEQ ID NO: 5591 - DNA, 201 bp, Homo sapiens; identical to SEQ ID NO: 5547

SEQ ID NO: 5592 - DNA, 201 bp, Homo sapiens; identical to SEQ ID NO: 5575

SEQ ID NO: 5593 - DNA, 201 bp, Homo sapiens; identical to SEQ ID NO: 5549

SEQ ID NO: 5594 - DNA, 201 bp, Homo sapiens; identical to SEQ ID NO: 5550

SEQ ID NO: 5595 - DNA, 201 bp, Homo sapiens; identical to SEQ ID NO: 5551

SEQ ID NO: 5596 - DNA, 201 bp, Homo sapiens; identical to SEQ ID NO: 5552

SEQ ID NO: 5597 - DNA, 201 bp, Homo sapiens; identical to SEQ ID NO: 5553

SEQ ID NO: 5598 - DNA, 201 bp, Homo sapiens; identical to SEQ ID NO: 5554

SEQ ID NO: 5599 - DNA, 201 bp, Homo sapiens; identical to SEQ ID NO: 5555

SEQ ID NO: 5600 - DNA, 201 bp, Homo sapiens; identical to SEQ ID NO: 5556

SEQ ID NO: 5601 - DNA, 201 bp, Homo sapiens; identical to SEQ ID NO: 5540

SEQ ID NO: 5602 - DNA, 201 bp, Homo sapiens; identical to SEQ ID NO: 5539

SEQ ID NO: 5603 - DNA, 201 bp, Homo sapiens; identical to SEQ ID NO: 5541

SEQ ID NO: 5604 - DNA, 201 bp, Homo sapiens; identical to SEQ ID NO: 5543

SEQ ID NO: 5605 - DNA, 201 bp, Homo sapiens; identical to SEQ ID NO: 5544

SEQ ID NO: 5606 - DNA, 129 bp, Homo sapiens; identical to SEQ ID NO: 5545

SEQ ID NO: 5607 - DNA, 201 bp, Homo sapiens; identical to SEQ ID NO: 5546

SEQ ID NO: 5608 - DNA, 201 bp, Homo sapiens; identical to SEQ ID NO: 5547

SEQ ID NO: 5609 - DNA, 201 bp, Homo sapiens; identical to SEQ ID NO: 5549

SEQ ID NO: 5610 - DNA, 201 bp, Homo sapiens; identical to SEQ ID NO: 5548

SEQ ID NO: 5611 - DNA, 201 bp, Homo sapiens; identical to SEQ ID NO: 5568

SEQ ID NO: 5612 - DNA, 201 bp, Homo sapiens; identical to SEQ ID NO: 5552

SEQ ID NO: 5613 - DNA, 201 bp, Homo sapiens; identical to SEQ ID NO: 5553

SEQ ID NO: 5614 - DNA, 201 bp, Homo sapiens; identical to SEQ ID NO: 5557

SEQ ID NO: 5615 - DNA, 201 bp, Homo sapiens; identical to SEQ ID NO: 5555

SEQ ID NO: 5616 - DNA, 201 bp, Homo sapiens; identical to SEQ ID NO: 5583

SEQ ID NO: 5617 - DNA, 201 bp, Homo sapiens
caatcagcccacccccagcccccgcccctgccgctgcgcctctaccctgtggaccaacagagaccatccccagcttcctgctcaccagggcagggcgagaycaggccatctgtgagctgcaagaagaggtgtcccggcttcgtctgcggctggaagacagcctgcaccagccactccagggcagcccgacacgcccagcat

SEQ ID NO: 5618 - DNA, 201 bp, Homo sapiens
gcctggaagagctgaaggaacacatagaccagacccagcaagagcctgagccgcccgggtcagactcagctctggacagcaccccagccctgccctgcctycatcagccaacgcacctgcctgctccttctggacaagcccccatgccagccatcaagacctcctgccctgagcctgctaccaccactgccgccgccagca

SEQ ID NO: 5619 - DNA, 201 bp, Homo sapiens
tttccctcagacaagctacaaagtgcccaggatgccatccaccatggtccccttcagtacctcacgcatggtccccagcttctcctaggatcccagtggcrtttatcagtggccagctacctgccaggcccgggctggggcacggtctgcggccatgaggccaggccgcctcccgcacccctaccccgtggcagcagcata

SEQ ID NO: 5620 - DNA, 201 bp, Homo sapiens
gcccagaaggcccgcatagttcctcaccaggagggtctccctccagcacaggtcccgcctgctcagtccctgtgctttccaagtggagggggtgtcagctyggtcaccaagagaagtgacttcccaggagcaccagtcccctcacagaggtgctgtgagcgaggcctccttcggtccaggcagaacctcaggcagtctctc

SEQ ID NO: 5621 - DNA, 201 bp, Homo sapiens
cccttcagtacctcacgcatggtccccagcttctcctaggatcccagtggcatttatcagtggccagctacctgccaggcccgggctggggcacggtctgyggccatgaggccaggccgcctcccgcacccctaccccgtggcagcagcatacctctgcatttctggaatgtgtgtgcatcaatgatgtttgtatatttga

SEQ ID NO: 5622 - DNA, 201 bp, Homo sapiens
cattgcacgtaaatgtggaggtgagctctggcaacagtgaggtggaggacaggccacaggaccccctggcccgactcaggcacaaggagctgcagatggarcaagtttaccatggcctcatggagcggtacctcagtgtgaagtctctcccagaagccatgagaatggaggaggaggaagaaggagaggaggaggaggagg

SEQ ID NO: 5623 - DNA, 201 bp, Homo sapiens
atggcagtaaatccacagagagattgcctggtgagcctagaggtgaagagcagattgtccctccaggaaggcagcgagccaggtcttcctcagtgcctcgrgaggtgctccgactgtccctgagttcagaatctgagctgccctccctaccactgttctctgagaagagcaagaccaccaaggacagtccacaggcagctc

SEQ ID NO: 5624 - DNA, 201 bp, Homo sapiens
tcagtgtcccctgtgtggtcaagttgggtctcccccagaggcagatggtccaggctcagccacctctggggcagagaaggccaccacgaggagaaaagcaycttcaactcccagccccaagcagaggagcaagcaggcggggtcgtcgccacgcccaccccccggactgtggtatctggcaacagcgcccccagcaccagc

SEQ ID NO: 5625 - DNA, 201 bp, Homo sapiens
gtagtatgaccagcctggagggaagcggcatctctgagcgccttccacagaagcctttgcaccgaggcggtgggccccacctggaggagacctggatggcrtccccagagacagacagtggctttgtgggctcagaaacaagcagagtttcacccctcacccagactccagagcaccggctctcccacatcagcacagcag

SEQ ID NO: 5626 - DNA, 201 bp, Homo sapiens
ggcggggtcgtcgccacgcccaccccccggactgtggtatctggcaacagcgcccccagcaccagcccctccagcctttgcctacatctcctcggttcccrtcatgccttatccacctgccgctgtgtactatgcgcctgcaggacctacctcagcccaaccagctgccaagtggccgcccacagcctctcccccaccagc

SEQ ID NO: 5627 - DNA, 201 bp, Homo sapiens
cccagcttcctgctcaccagggcagggcgagaccaggccatctgtgagctgcaagaagaggtgtcccggcttcgtctgcggctggaagacagcctgcaccrgccactccagggcagcccgacacgcccagcatctgcctttgaccgccccgcccggacccgcggccggccagcagactccccagccacctggggctcccat

SEQ ID NO: 5628 - DNA, 201 bp, Homo sapiens
ggcagggcgagaccaggccatctgtgagctgcaagaagaggtgtcccggcttcgtctgcggctggaagacagcctgcaccagccactccagggcagcccgrcacgcccagcatctgcctttgaccgccccgcccggacccgcggccggccagcagactccccagccacctggggctcccattatggcagtaaatccacaga

SEQ ID NO: 5629 - DNA, 201 bp, Homo sapiens
gggcgagaccaggccatctgtgagctgcaagaagaggtgtcccggcttcgtctgcggctggaagacagcctgcaccagccactccagggcagcccgacacrcccagcatctgcctttgaccgccccgcccggacccgcggccggccagcagactccccagccacctggggctcccattatggcagtaaatccacagagaga

SEQ ID NO: 5630 - DNA, 201 bp, Homo sapiens
gagaaggccaccacgaggagaaaagcaccttcaactcccagccccaagcagaggagcaagcaggcggggtcgtcgccacgcccaccccccggactgtggtrtctggcaacagcgcccccagcaccagcccctccagcctttgcctacatctcctcggttcccatcatgccttatccacctgccgctgtgtactatgcgcct

SEQ ID NO: 5631 - DNA, 201 bp, Homo sapiens
cggcttcgtctgcggctggaagacagcctgcaccagccactccagggcagcccgacacgcccagcatctgcctttgaccgccccgcccggacccgcggccrgccagcagactccccagccacctggggctcccattatggcagtaaatccacagagagattgcctggtgagcctagaggtgaagagcagattgtccctcca

SEQ ID NO: 5632 - DNA, 131 bp, Homo sapiens
cccaccccagcccaaccacagcatccacacrggaatggtgccccaggggaccaaggtcttgtccttcaccatcccacagccccgctctgcagagtggtggccgggcccggccgaggacccccaggcctctg

SEQ ID NO: 5633 - DNA, 201 bp, Homo sapiens
ctgaaggaacacatagaccagacccagcaagagcctgagccgcccgggtcagactcagctctggacagcaccccagccctgccctgcctccatcagccaaygcacctgcctgctccttctggacaagcccccatgccagccatcaagacctcctgccctgagcctgctaccaccactgccgccgccagcactggcccctgc

SEQ ID NO: 5634 - DNA, 183 bp, Homo sapiens
cccaccccagcccaaccacagcatccacacgggaatggtgccccaggggaccaaggtcttgtccttcaccatcccacagcccygctctgcagagtggtggccgggcccggccgaggacccccaggcctctgcggcctcagcctgggggcagccctggccctgccacttggcatcttggtgacc

SEQ ID NO: 5635 - DNA, 201 bp, Homo sapiens
gggggcagccctggccctgccacttggcatcttggtgaccctggggtggccatcagctcgaggagacttgagcccctcctcgcttaccagcatgcccaccstggggtggcttccggagaaccgggacatctctgaggaccagtcctcagcagagcagacccaggcactggcttctcaggccagccagttcctggccaaggt

SEQ ID NO: 5636 - DNA, 201 bp, Homo sapiens
agatggcggttcctggctcagagtttgaggggcacaaacggatttctgaacagccccttcccaacaagacaatcagcccacccccagcccccgcccctgcygctgcgcctctaccctgtggaccaacagagaccatccccagcttcctgctcaccagggcagggcgagaccaggccatctgtgagctgcaagaagaggtgt

SEQ ID NO: 5637 - DNA, 201 bp, Homo sapiens
aggggcacaaacggatttctgaacagccccttcccaacaagacaatcagcccacccccagcccccgcccctgccgctgcgcctctaccctgtggaccaacrgagaccatccccagcttcctgctcaccagggcagggcgagaccaggccatctgtgagctgcaagaagaggtgtcccggcttcgtctgcggctggaagaca

SEQ ID NO: 5638 - DNA, 201 bp, Homo sapiens
agatggtatctatgaagccaccaggtttccaggcatccctggctagagacgggcacatgtcaggcctgggcaaggctgaggcagcccctccaggccctggygtgccaccccaccctccaggcaccaagtccgcagcatcccaccaaagtagtatgaccagcctggagggaagcggcatctctgagcgccttccacagaagc

SEQ ID NO: 5639 - DNA, 201 bp, Homo sapiens
ccccaggaccaagtcaagggcttccagcggctgaaggctgcccacgcggccctagaggaggagtacctgaaggcttgtcgggagcaacaccctgcccagcygcttgccggctccaaggggacgcctggaagatttgatcctcgcagggagctggaggcagagatataccgtctgggaagctgcctggaagagctgaaggaa

SEQ ID NO: 5640 - DNA, 201 bp, Homo sapiens; identical to SEQ ID NO: 5631

SEQ ID NO: 5641 - DNA, 201 bp, Homo sapiens; identical to SEQ ID NO: 5617

SEQ ID NO: 5642 - DNA, 201 bp, Homo sapiens; identical to SEQ ID NO: 5619

SEQ ID NO: 5643 - DNA, 201 bp, Homo sapiens; identical to SEQ ID NO: 5620

SEQ ID NO: 5644 - DNA, 201 bp, Homo sapiens; identical to SEQ ID NO: 5621

SEQ ID NO: 5645 - DNA, 201 bp, Homo sapiens; identical to SEQ ID NO: 5623

SEQ ID NO: 5646 - DNA, 201 bp, Homo sapiens; identical to SEQ ID NO: 5625

SEQ ID NO: 5647 - DNA, 201 bp, Homo sapiens; identical to SEQ ID NO: 5624

SEQ ID NO: 5648 - DNA, 201 bp, Homo sapiens; identical to SEQ ID NO: 5636

SEQ ID NO: 5649 - DNA, 201 bp, Homo sapiens; identical to SEQ ID NO: 5637

SEQ ID NO: 5650 - DNA, 201 bp, Homo sapiens; identical to SEQ ID NO: 5638

SEQ ID NO: 5651 - DNA, 201 bp, Homo sapiens; identical to SEQ ID NO: 5627

SEQ ID NO: 5652 - DNA, 201 bp, Homo sapiens; identical to SEQ ID NO: 5626

SEQ ID NO: 5653 - DNA, 201 bp, Homo sapiens; identical to SEQ ID NO: 5628

SEQ ID NO: 5654 - DNA, 201 bp, Homo sapiens; identical to SEQ ID NO: 5629

SEQ ID NO: 5655 - DNA, 201 bp, Homo sapiens; identical to SEQ ID NO: 5630

SEQ ID NO: 5656 - DNA, 201 bp, Homo sapiens; identical to SEQ ID NO: 5617

SEQ ID NO: 5657 - DNA, 201 bp, Homo sapiens; identical to SEQ ID NO: 5618

SEQ ID NO: 5658 - DNA, 201 bp, Homo sapiens; identical to SEQ ID NO: 5619

SEQ ID NO: 5659 - DNA, 201 bp, Homo sapiens; identical to SEQ ID NO: 5620

SEQ ID NO: 5660 - DNA, 201 bp, Homo sapiens; identical to SEQ ID NO: 5621

SEQ ID NO: 5661 - DNA, 201 bp, Homo sapiens; identical to SEQ ID NO: 5622

SEQ ID NO: 5662 - DNA, 201 bp, Homo sapiens
atgggcatcaggattccgagtcaggagagacttcgggagaagaggctgaagcagaggatgtggacagcccagcaagttcccatgagcctcttgcctggctyccccagcagggccgtcagctggacatgactgaagaggagccagatgggaccctcggaagtctggaggttgaggaggctggagagagctcctcaaggttgg

SEQ ID NO: 5663 - DNA, 201 bp, Homo sapiens; identical to SEQ ID NO: 5623

SEQ ID NO: 5664 - DNA, 201 bp, Homo sapiens; identical to SEQ ID NO: 5624

SEQ ID NO: 5665 - DNA, 201 bp, Homo sapiens; identical to SEQ ID NO: 5625

SEQ ID NO: 5666 - DNA, 201 bp, Homo sapiens
cagttttcccttccacaaaatgaggaggggcaactgaagacggaggtgcccaaggtcagaaggaagcaccacacagagggcacaggcaggatggccgatgstgacaggaaccagcggtgactctggggcccctggcagcagctctgtctcctgaagatgaagtggcccaggtgaagcccaggccagccccaatggccagct

SEQ ID NO: 5667 - DNA, 201 bp, Homo sapiens; identical to SEQ ID NO: 5626

SEQ ID NO: 5668 - DNA, 201 bp, Homo sapiens; identical to SEQ ID NO: 5627

SEQ ID NO: 5669 - DNA, 201 bp, Homo sapiens; identical to SEQ ID NO: 5628

SEQ ID NO: 5670 - DNA, 201 bp, Homo sapiens; identical to SEQ ID NO: 5629

SEQ ID NO: 5671 - DNA, 201 bp, Homo sapiens; identical to SEQ ID NO: 5630

SEQ ID NO: 5672 - DNA, 201 bp, Homo sapiens
cagagggccccagccaccacctcctaagcccagatggcagaactggaggcagtgttgctcgggcaacccccatggaattccaggactcctcagctcccccrgcccagagtccgcagcatgccacagatagatggaggagagaaacgaccagattcttctgccctcagcccaaggaacacatctggaagcagacaaagacgt

SEQ ID NO: 5673 - DNA, 201 bp, Homo sapiens; identical to SEQ ID NO: 5631

SEQ ID NO: 5674 - DNA, 201 bp, Homo sapiens
gcagaactggaggcagtgttgctcgggcaacccccatggaattccaggactcctcagctcccccagcccagagtccgcagcatgccacagatagatggagragagaaacgaccagattcttctgccctcagcccaaggaacacatctggaagcagacaaagacgtcacctaagccactcccttcccgattcattggctcca

SEQ ID NO: 5675 - DNA, 201 bp, Homo sapiens
ccaagtacgctgaggccgagaacaccattgaccagctacgcctcggggccaaggtgaacctgttctctgacccaccccagcccaaccacagcatccacacrggaatggtgccccaggggaccaaggtcttgtccttcaccatcccacagccccgctctgcagagtggtggccgggcccggccgaggacccccaggcctctg

SEQ ID NO: 5676 - DNA, 201 bp, Homo sapiens; identical to SEQ ID NO: 5633

SEQ ID NO: 5677 - DNA, 201 bp, Homo sapiens
ggtgaacctgttctctgacccaccccagcccaaccacagcatccacacgggaatggtgccccaggggaccaaggtcttgtccttcaccatcccacagcccygctctgcagagtggtggccgggcccggccgaggacccccaggcctctgcggcctcagggtggccatcagctcgaggagacttgagcccctcctcgcttac

SEQ ID NO: 5678 - DNA, 201 bp, Homo sapiens
gtggccgggcccggccgaggacccccaggcctctgcggcctcagggtggccatcagctcgaggagacttgagcccctcctcgcttaccagcatgcccaccstggggtggcttccggagaaccgggacatctctgaggaccagtcctcagcagagcagacccaggcactggcttctcaggccagccagttcctggccaaggt

SEQ ID NO: 5679 - DNA, 201 bp, Homo sapiens; identical to SEQ ID NO: 5636

SEQ ID NO: 5680 - DNA, 201 bp, Homo sapiens; identical to SEQ ID NO: 5637

SEQ ID NO: 5681 - DNA, 201 bp, Homo sapiens; identical to SEQ ID NO: 5638

SEQ ID NO: 5682 - DNA, 201 bp, Homo sapiens; identical to SEQ ID NO: 5639

SEQ ID NO: 5683 - DNA, 201 bp, Homo sapiens
ggaggtgcccaaggtcagaaggaagcaccacacagagggcacaggcaggatggccgatgctgacaggaaccagcggtgactctggggcccctggcagcagmtctgtctcctgaagatgaagtggcccaggtgaagcccaggccagccccaatggccagctcggagactgagatccgctgggctgagcctggcctggggaag

SEQ ID NO: 5684 - DNA, 201 bp, Homo sapiens; identical to SEQ ID NO: 5624

SEQ ID NO: 5685 - DNA, 201 bp, Homo sapiens; identical to SEQ ID NO: 5638

SEQ ID NO: 5686 - DNA, 201 bp, Homo sapiens
agatggcggttcctggctcagagtttgaggggcacaaacggatttctgaacagccctttcccaacaagacaatcagcccacccccagcccccgcccctgcygctgcgcctctaccctgtggaccaacagagaccatccccagcttcctgctcaccagggcagggcgagaccaggccatctgtgagctgcaagaagaggtgt

SEQ ID NO: 5687 - DNA, 201 bp, Homo sapiens
aggggcacaaacggatttctgaacagccctttcccaacaagacaatcagcccacccccagcccccgcccctgccgctgcgcctctaccctgtggaccaacrgagaccatccccagcttcctgctcaccagggcagggcgagaccaggccatctgtgagctgcaagaagaggtgtcccggcttcgtctgcggctggaagaca

SEQ ID NO: 5688 - DNA, 201 bp, Homo sapiens; identical to SEQ ID NO: 5617

SEQ ID NO: 5689 - DNA, 201 bp, Homo sapiens; identical to SEQ ID NO: 5625

SEQ ID NO: 5690 - DNA, 201 bp, Homo sapiens; identical to SEQ ID NO: 5628

SEQ ID NO: 5691 - DNA, 201 bp, Homo sapiens; identical to SEQ ID NO: 5629

SEQ ID NO: 5692 - DNA, 201 bp, Homo sapiens; identical to SEQ ID NO: 5631

SEQ ID NO: 5693 - DNA, 201 bp, Homo sapiens; identical to SEQ ID NO: 5626

SEQ ID NO: 5694 - DNA, 201 bp, Homo sapiens
gagaaggccaccacgaggagaaaagcatcttcaactcccagccccaagcagaggagcaagcaggcggggtcgtcgccacgcccaccccccggactgtggtrtctggcaacagcgcccccagcaccagcccctccagcctttgcctacatctcctcggttcccatcatgccttatccacctgccgctgtgtactatgcgcct

SEQ ID NO: 5695 - DNA, 201 bp, Homo sapiens; identical to SEQ ID NO: 5623

SEQ ID NO: 5696 - DNA, 201 bp, Homo sapiens; identical to SEQ ID NO: 5627

SEQ ID NO: 5697 - DNA, 201 bp, Homo sapiens
cagccagagaactagagcagaaccgaggcaatcaccatgggactgcggaagagaaatcccagccagtccagggccaggcctccaccatcattgggaatgghgatttgctgctgcagaaaccaaacagaccccagtccagccctgaagacggccaagtagccacagtgtcatccagcccagaaaccaagaaggatcatccga

SEQ ID NO: 5698 - DNA, 201 bp, Homo sapiens
tcgagctgtgagattttaccctcccagcccaggagaactaagagcttcctaaattactatgcagatctggaaacctcagccagagaactagagcagaaccraggcaatcaccatgggactgcggaagagaaatcccagccagtccagggccaggcctccaccatcattgggaatggcgatttgctgctgcagaaaccaaac

SEQ ID NO: 5699 - DNA, 201 bp, Homo sapiens
ttctgagaagttagagggtaaagagccccacccacaggattcctcgagctgtgagattttaccctcccagcccaggagaactaagagcttcctaaattacyatgcagatctggaaacctcagccagagaactagagcagaaccgaggcaatcaccatgggactgcggaagagaaatcccagccagtccagggccaggcctc

SEQ ID NO: 5700 - DNA, 201 bp, Homo sapiens
tcaagatcaagaattctgagctagctttaagtagcaaactgatttatatgtgcaattataggatgcattaagatgaatgatagcctttacatattgaaaaytttgcagacgttttgttttgaaaatggcattgtatagtaaatgcaaattaattttgtaaaattatgttaaagagtatgttcagacactttctgccatggc

SEQ ID NO: 5701 - DNA, 201 bp, Homo sapiens
taccatatttttaattaacctgttaaatacagcttaaaatatttttattttatttattctatttttactgaaatatactgcattattgtgttaatgtattmtctttcctggatattatctcccagtgtatccagatctaagtaatctcagtgaactatacattgcctaaaaagtggttttgtaatgatttgtagtcacatt

SEQ ID NO: 5702 - DNA, 201 bp, Homo sapiens
ccaccatcattgggaatggcgatttgctgctgcagaaaccaaacagaccccagtccagccctgaagacggccaagtagccacagtgtcatccagcccagaraccaagaaggatcatccgaaaacaggggccaaaaccgactgtgcactgcaccggatccagaacctggcaccgagcgatgaggagtccagctggacaacgt

SEQ ID NO: 5703 - DNA, 201 bp, Homo sapiens
gatgatgattcttgtagtatcaacagtgacccagaagccaagtgttttgctgtgcgttctctgggatgggtagagatggcagaagaggacctcgcccccgstaaaagtagtgttgcggtcaacaactgcatcaggcaactttcctactgcaaaaatgacatccgagacacagtcgggatttggggagaggggaaagacatg

SEQ ID NO: 5704 - DNA, 201 bp, Homo sapiens
agaggtaaacgttctgctggaattctgcatccagctctatccccctctgatgctttttgcccagaaagctgtctgtccatcatgtattgtccatggcaacaaattacattaggttgaacctttccttgattttatgtatttaatattagaatttgttggactcaactagatatattttttaatttatattttttccatttt

SEQ ID NO: 5705 - DNA, 201 bp, Homo sapiens
tgcagctccttacaggaaagggccaatgtgaacctcgatgtccctttgcaagtagattttccaacaccaaagactgagctggtccagaagttccacgtgcrgtacttgggcatgttacctgtagacaaaccagtcggaatggatattttgaacagtgccatagaaaatcttatgacctcatccaacaaggaggactggctg

SEQ ID NO: 5706 - DNA, 201 bp, Homo sapiens
ctaataagccccttcgctctctagttggccaggcttaacctaatacacatctaacgtgtgtgccacacggccagtagaaagtttaacttcagcttcagggsaaagatacccactcacaccgtgtcaacgcaagcagtagttcctggcctccagagcagcttacttcccctgaaagaacgctttgttttcctttatgccctt

SEQ ID NO: 5707 - DNA, 157 bp, Homo sapiens
caaagcctggagaagtggaatctcgtcagcgccgctccctgcgcgggactcgcggarcggcactgagcatgctcagttgccggagcccgttctggtctcaagtaggaagctagtgcgctgtaaccgcatctgatctgggcgctccgggaagggcgag

SEQ ID NO: 5708 - DNA, 201 bp, Homo sapiens
ctcatacatctgctccttggcaacatcaaggggaacgactagccaacatgcctatggctaaaaactttcctttgcagactaaagcactgcttggtgcttcrtttttctacccttcacaacatgtgtgatttcatctaagagatatatacatgtacacatgccctttgtttccacctggatacaagatcactcatagctaat

SEQ ID NO: 5709 - DNA, 185 bp, Homo sapiens
caaagcctggagaagtggaatctcgtcagcgccgctccctgcgcgggactcgcggaacggcactgagcatgctcagttgccggarcccgttctggtctcaagtaggaagctagtgcgctgtaaccgcatctgatctgggcgctccgggaagggcgagactggagcagagccgctgggcgccggag

SEQ ID NO: 5710 - DNA, 201 bp, Homo sapiens; identical to SEQ ID NO: 5702

SEQ ID NO: 5711 - DNA, 201 bp, Homo sapiens; identical to SEQ ID NO: 5697

SEQ ID NO: 5712 - DNA, 201 bp, Homo sapiens; identical to SEQ ID NO: 5698

SEQ ID NO: 5713 - DNA, 201 bp, Homo sapiens; identical to SEQ ID NO: 5699

SEQ ID NO: 5714 - DNA, 201 bp, Homo sapiens; identical to SEQ ID NO: 5704

SEQ ID NO: 5715 - DNA, 201 bp, Homo sapiens; identical to SEQ ID NO: 5705

SEQ ID NO: 5716 - DNA, 201 bp, Homo sapiens; identical to SEQ ID NO: 5703

SEQ ID NO: 5717 - DNA, 201 bp, Homo sapiens
ttcagatgtagaaggcctttttgacagccccccaggttcagatgatgcaaagcttattgatatattttatcccggagatcagcagtctgtgacatttggamccaagtctagagtgggaatgggtggcatggaagccaaggtgaaagcagccctctgggctttgcaaggtggcacttctgttgttattgccaatggaaccca

SEQ ID NO: 5718 - DNA, 201 bp, Homo sapiens
gtcatcacagacattgtggaggggaagaaagttggtaccttcttttcagaagtaaagcctgcaggccctactgttgagcagcagggagaaatggcgcgatmtggaggaaggatgttggccaccttggaacctgagcagagagcagaaattatccatcatctggctgatctgttgacggaccagcgtgatgagatcctgtta

SEQ ID NO: 5719 - DNA, 201 bp, Homo sapiens
tgcttctgggctccgtttggcaatagcagtcttggctgatgtgcacagtctggctcccagctcaccctttttttttaaagtaagaaaatagttgctaccgrtagggactttgccaagtccaattatcttctaggattgaaaggtgcattttccccataaaaaaggcgaggaaaacccatggctgctttgtgtcacctcagt

SEQ ID NO: 5720 - DNA, 201 bp, Homo sapiens
gctgtgttccccgtgatgcagctggaacccaagctgcagcaggagatgcaagtttcaggatgttccccactgagctggaggaatatctacagcagtgatgyttgaaatttttgtatgaattattttgtcgtcctacccttttcctccaaaacaaaaattagaggattattttaatactttggattcttcccccttttttga

SEQ ID NO: 5721 - DNA, 201 bp, Homo sapiens
gtacccctcagtcgtacacatggcaagtccttcgcccaccgcagtgagctgaagcatgccaagagaatcgtggtgaagctcggcagtgccgtggtgacccraggggatgaatgtggcctggccctggggcgcttggcatctattgttgagcaggtatcagtgctgcagaatcagggcagagagatgatgctggtgaccagt

SEQ ID NO: 5722 - DNA, 201 bp, Homo sapiens
ggacaccattatttgaccagatcattgatatgctgagagtggaacaggtaaaaattcatgcaggccccaaatttgcctcctatctgaccttcagcccctcygaagtgaagtcactccgaactgagtatggggacctggaattatgcattgaagtagtggacaacgttcaggatgccattgaccacatccacaagtatggca

SEQ ID NO: 5723 - DNA, 201 bp, Homo sapiens
tcagatgtagaaggcctttttgacagccccccaggttcagatgatgcaaagcttattgatatattttatcccggagatcagcagtctgtgacatttggaaycaagtctagagtgggaatgggtggcatggaagccaaggtgaaagcagccctctgggctttgcaaggtggcacttctgttgttattgccaatggaacccac

SEQ ID NO: 5724 - DNA, 201 bp, Homo sapiens
tttgtgtcacctcagtgacttacagtcccccttggcatttagttggtactagagccagtcatccttaacaaatcttttcacattttatttctttcacatgyagtcatcttcaaaaaggaaagatttggaattttagaaaaggggcaactcttctttttagcattctcatcagaaatggggtaaattaataagcattccaga

SEQ ID NO: 5725 - DNA, 201 bp, Homo sapiens
ttatctcaggagagagcccgctcttgtctcccagttcctggtagggtctgcctgttggaaagtgtacctggatgcttctgggctccgtttggcaatagcartcttggctgatgtgcacagtctggctcccagctcaccctttttttttaaagtaagaaaatagttgctaccgatagggactttgccaagtccaattatctt

SEQ ID NO: 5726 - DNA, 201 bp, Homo sapiens; identical to SEQ ID NO: 5717

SEQ ID NO: 5727 - DNA, 201 bp, Homo sapiens; identical to SEQ ID NO: 5718

SEQ ID NO: 5728 - DNA, 201 bp, Homo sapiens; identical to SEQ ID NO: 5719

SEQ ID NO: 5729 - DNA, 201 bp, Homo sapiens; identical to SEQ ID NO: 5720

SEQ ID NO: 5730 - DNA, 201 bp, Homo sapiens; identical to SEQ ID NO: 5721

SEQ ID NO: 5731 - DNA, 201 bp, Homo sapiens; identical to SEQ ID NO: 5722

SEQ ID NO: 5732 - DNA, 201 bp, Homo sapiens; identical to SEQ ID NO: 5723

SEQ ID NO: 5733 - DNA, 201 bp, Homo sapiens; identical to SEQ ID NO: 5724

SEQ ID NO: 5734 - DNA, 201 bp, Homo sapiens; identical to SEQ ID NO: 5725

SEQ ID NO: 5735 - DNA, 201 bp, Homo sapiens; identical to SEQ ID NO: 5717

SEQ ID NO: 5736 - DNA, 201 bp, Homo sapiens; identical to SEQ ID NO: 5718

SEQ ID NO: 5737 - DNA, 201 bp, Homo sapiens; identical to SEQ ID NO: 5719

SEQ ID NO: 5738 - DNA, 201 bp, Homo sapiens; identical to SEQ ID NO: 5720

SEQ ID NO: 5739 - DNA, 201 bp, Homo sapiens; identical to SEQ ID NO: 5721

SEQ ID NO: 5740 - DNA, 201 bp, Homo sapiens; identical to SEQ ID NO: 5722

SEQ ID NO: 5741 - DNA, 201 bp, Homo sapiens; identical to SEQ ID NO: 5723

SEQ ID NO: 5742 - DNA, 201 bp, Homo sapiens
tttgtgtcacctcagtgacttacagtcccccttggcatttagttggtactagagccagtcatccttaacaaatcttttcacattttatttctttcacatgyagtcatcttcaaaaaggaaagatttggaattttagaaaaggggcaactcttctttttagcattctcatcagaaagtcacaaaaatcgatggaatcatttc

SEQ ID NO: 5743 - DNA, 201 bp, Homo sapiens; identical to SEQ ID NO: 5725

SEQ ID NO: 5744 - DNA, 201 bp, Homo sapiens
ccttcacagacaccgaggaccctgccaagttcaagatgaagtactggggcgtagcctcctttctccagaaaggaaatgatgaccactggatcgtcgacacrgactacgacacgtatgccgtgcagtactcctgccgcctcctgaacctcgatggcacctgtgctgacagctactccttcgtgttttcccgggaccccaacg

SEQ ID NO: 5745 - DNA, 201 bp, Homo sapiens
agcttccgagtcaaggagaacttcgacaaggctcgcttctctgggacctggtacgccatggccaagaaggaccccgagggcctctttctgcaggacaacawcgtcgcggagttctccgtggacgagaccggccagatgagcgccacagccaagggccgagtccgtcttttgaataactgggacgtgtgcgcagacatggtg

SEQ ID NO: 5746 - DNA, 201 bp, Homo sapiens; identical to SEQ ID NO: 5744

SEQ ID NO: 5747 - DNA, 201 bp, Homo sapiens; identical to SEQ ID NO: 5745

SEQ ID NO: 5748 - DNA, 201 bp, Homo sapiens; identical to SEQ ID NO: 5744

SEQ ID NO: 5749 - DNA, 201 bp, Homo sapiens; identical to SEQ ID NO: 5745

SEQ ID NO: 5750 - DNA, 201 bp, Homo sapiens; identical to SEQ ID NO: 5744

SEQ ID NO: 5751 - DNA, 201 bp, Homo sapiens; identical to SEQ ID NO: 5745

SEQ ID NO: 5752 - DNA, 201 bp, Homo sapiens
gaatcaacagagcaggtgagaagggccaaacacataatagtgcatgaagactttaacacactaagttatgactctgacattgccctaatacaactaagctytcctctggagtacaactcggtggtgaggccagtatgtctcccacacagcgcagagcctctattttcctcggagatctgtgctgtgaccggatggggaagc

SEQ ID NO: 5753 - DNA, 201 bp, Homo sapiens
ggaacttcccatcatggatgacagagcgtgtaatactgtgctcaagagcatgaacctccctcccctgggaaggaccatgctgtgtgctggcttccctgatkggggaatggacgcctgccagggggactctggaggaccactggtttgtagaagaggtggtggaatctggattcttgctgggataacttcctgggtagctgg

SEQ ID NO: 5754 - DNA, 201 bp, Homo sapiens
tgaagcagagctagaaaagcctagaggcttttttcccacaccacggtatctactggattatagaggaagactggaatgttcttgggtgctcagagtttcascaagcagtatggcaaaatttaccattgagtatctgtcactcctggggtctcctgtgtgtcaagactcagttctaattatttatgaagaaagacacagtaa

SEQ ID NO: 5755 - DNA, 201 bp, Homo sapiens
cacaggtttggatcggggccaacccctctcaaaagtgggctcaaggtatataacaaaggccctgagttctgtccaagaagtgaatggaagccagagaggaragggtaaggtctgtggaaaaatattgccttcaccattgctggcagagaccagtgaggccatggttccatttgtttctgatacagaagacagtggcagtgg

SEQ ID NO: 5756 - DNA, 201 bp, Homo sapiens
cttcaaggccagatttaccattttgccctcagagtctttaaacaaatttgaaccaaagttacctccccaaaacaatcctgtatctaccgtaaaagctattstgcatgatgtctgtggcatccctccatttagtccccagtggctttccagaagaatcgcaggaggggaagaagcctgcccccactgttggccatggcaggt

SEQ ID NO: 5757 - DNA, 201 bp, Homo sapiens
tataactgtgacttctggggagtacagcctctttcagaaggataagcaagaacagaatattcctgtctcaaaaattattacccatcctgaatacaacagcygtgaatatatgagtcctgatattgcactgctgtatctaaaacacaaagtcaagtttggaaatgctgttcagccaatctgtcttcctgacagcgatgataa

SEQ ID NO: 5758 - DNA, 201 bp, Homo sapiens
caaaagtgggctcaaggtatataacaaaggccctgagttctgtccaagaagtgaatggaagccagagaggagagggtaaggtctgtggaaaaatattgccytcaccattgctggcagagaccagtgaggccatggttccatttgtttctgatacagaagacagtggcagtggctttgagcttaccgttactgctgtacaga

SEQ ID NO: 5759 - DNA, 201 bp, Homo sapiens
cagaagtcagaagcagggtcaggttgtgggagtctggctatattggtagaagaagggacaaatcactctgccaagtatcctgatttgtatcccagtaacayaaggtgtcattggttcatttgtgctccagagaagcacattataaagttgacatttgaggactttgctgtcaaatttagtccaaactgtatttatgatgct

SEQ ID NO: 5760 - DNA, 201 bp, Homo sapiens
tctgacattgccctaatacaactaagctctcctctggagtacaactcggtggtgaggccagtatgtctcccacacagcgcagagcctctattttcctcggrgatctgtgctgtgaccggatggggaagcatcagtgcagagctacatctgaacttaaatacatttctaacaacactttctgcttacttcatcatcgagctc

SEQ ID NO: 5761 - DNA, 201 bp, Homo sapiens
tgatgtctgtggcatccctccatttagtccccagtggctttccagaagaatcgcaggaggggaagaagcctgcccccactgttggccatggcaggtgggtytgaggtttctaggcgattaccaatgtggaggtgccatcatcaacccagtgtggattctgaccgcagcccactgtgtgcaattgaagaataatccactctc

SEQ ID NO: 5762 - DNA, 201 bp, Homo sapiens
tttgtggaatgttgaccatcacttcaatattcagttctagtaacatgacggtgatatactttaaaagtgatggtaaaaatcgtttacaaggcttcaaggcyagatttaccattttgccctcagagtctttaaacaaatttgaaccaaagttacctccccaaaacaatcctgtatctaccgtaaaagctattctgcatgatg

SEQ ID NO: 5763 - DNA, 201 bp, Homo sapiens
agtgcatgtgttagaaagagaggtctgtgaacacacttactattctgcccatccaggagggatcacagagaagatgatctgtgctggctttgcagcatctrgagagaaagatttctgccagggagactctggtgggccactagtatgtagacatgaaaatggtccctttgtcctctatggcattgtcagctggggagctgg

SEQ ID NO: 5764 - DNA, 201 bp, Homo sapiens
gtactcacattttttgaaatagctcgtgtgtatgaaggaatgttattatttttaatttaaatatatgtaaaaatacttaccagtaaatgtgtattttaaaraactatttaaaacacaatgttatatttcttataaataccagttactttcgttcattaattaatgaaaataaatctgtgaagtacctaatttaagtactca

SEQ ID NO: 5765 - DNA, 201 bp, Homo sapiens
gatgaaaatgagcttcctcacgcagttcactttctaaatgaatcaggagtccttcttcattttcaagacccagcactgcagttaagtgacttgtactttgwggaacccaagtggctttgtaaaatcatggcacagattttgacagtgaaagtggaaggttgtccaaaacaccctaagggcattatttcgcgtagagatgtg

SEQ ID NO: 5766 - DNA, 201 bp, Homo sapiens
tgtcaaagtcctcatatctaggaaagacacagaaactctctttgtcacagaaactctctgtgtctttcctagacataatagagttgtttttcaactctatstttgaatgtggataccctgaattttgtataattagtgtaaatacagtgttcagtccttcaagtgatatttttatttttttattcataccactagctactt

SEQ ID NO: 5767 - DNA, 201 bp, Homo sapiens
agttaagtgacttgtactttgtggaacccaagtggctttgtaaaatcatggcacagattttgacagtgaaagtggaaggttgtccaaaacaccctaagggmattatttcgcgtagagatgtggaaaaatttctttcaaaaaaaaggaaatttccaaagaactacatgtcacagtattttaagctcctagaaaaattccaga

SEQ ID NO: 5768 - DNA, 201 bp, Homo sapiens
gtaaaatcatggcacagattttgacagtgaaagtggaaggttgtccaaaacaccctaagggcattatttcgcgtagagatgtggaaaaatttctttcaaaraaaaggaaatttccaaagaactacatgtcacagtattttaagctcctagaaaaattccagattgctttgccaataggagaagaatatttgctggttccaa

SEQ ID NO: 5769 - DNA, 201 bp, Homo sapiens
agggtttgaagtttccaaatgagtttgatgaattagaaatacaaggaaaattacctgatccagttaaagaatatggttgtgccccatggcctatggttgaraaattaattaaacagtgtttgaaagaaaatcctcaagaaaggcctacttctgcccaggtctttgacattttgaattcagctgaattagtctgtctgacga

SEQ ID NO: 5770 - DNA, 201 bp, Homo sapiens
gaaagtggaaggttgtccaaaacaccctaagggcattatttcgcgtagagatgtggaaaaatttctttcaaaaaaaaggaaatttccaaagaactacatgwcacagtattttaagctcctagaaaaattccagattgctttgccaataggagaagaatatttgctggttccaagcagtttgtctgaccacaggcctgtgat

SEQ ID NO: 5771 - DNA, 201 bp, Homo sapiens
ccaacatcataacagtggtggtagacactgctctctatattgctaagcaaaatagccctgttgtggaagtgtgggataagaaaactgaaaaactctgtggrctaatagactgcgtgcactttttaagggaggtaatggtaaaagaaaacaaggaatcaaaacacaaaatgtcttattctgggagagtgaaaaccctctgcc

SEQ ID NO: 5772 - DNA, 201 bp, Homo sapiens
aagtacctaatttaagtactcatactaaaatttataaggccgataattttttgttttcttgtctgtaatggaggtaaactttattttaaattctgtgcttmagacaggactattgcttgtcgatttttctagaaatctgcacggtataatgaaaatattaagacagtttcccatgtaatgtattccttcttagattgcatc

SEQ ID NO: 5773 - DNA, 201 bp, Homo sapiens
gtgaaagtggaaggttgtccaaaacaccctaagggcattatttcgcgtagagatgtggaaaaatttctttcaaaaaaaaggaaatttccaaagaactacaygtcacagtattttaagctcctagaaaaattccagattgctttgccaataggagaagaatatttgctggttccaagcagtttgtctgaccacaggcctgtg

SEQ ID NO: 5774 - DNA, 201 bp, Homo sapiens
tgtcatttataaccaacaggctgatgtttattcatttggtttactactctatgacattttgacaactggaggtagaatagtagagggtttgaagtttccaratgagtttgatgaattagaaatacaaggaaaattacctgatccagttaaagaatatggttgtgccccatggcctatggttgagaaattaattaaacagtg

SEQ ID NO: 5775 - DNA, 201 bp, Homo sapiens
catactaaaatttataaggccgataattttttgttttcttgtctgtaatggaggtaaactttattttaaattctgtgcttaagacaggactattgcttgtygatttttctagaaatctgcacggtataatgaaaatattaagacagtttcccatgtaatgtattccttcttagattgcatcgaaatgcactatcatatatg

SEQ ID NO: 5776 - DNA, 201 bp, Homo sapiens
tatattgctaagcaaaatagccctgttgtggaagtgtgggataagaaaactgaaaaactctgtggactaatagactgcgtgcactttttaagggaggtaayggtaaaagaaaacaaggaatcaaaacacaaaatgtcttattctgggagagtgaaaaccctctgccttcagaagaacactgctctttggataggaactgga

SEQ ID NO: 5777 - DNA, 201 bp, Homo sapiens
ctctcatggaagaatggtttcctgggttgctggagattgatatttgtggtgaaggagaaactctgttgaagaaatgggcattatatagttttaatgatggygaagaacatcaaaaaatcttacttgatgacttgatgaagaaagcagaggaaggagatctcttagtaaatccagatcaaccaaggctcaccattccaatat

SEQ ID NO: 5778 - DNA, 171 bp, Homo sapiens
ctatgctttaacttgttatgtaattaacaaaaaaatcatatataatagagctctttgttccagtgttatctctttcattgttactttgtatttgcaatttwttttaccaaagacaaattaaaaaaatgaataccatatttaaatggaataataaaggttttttaaaaactt

SEQ ID NO: 5779 - DNA, 201 bp, Homo sapiens
caaagtgccacagttggcatagatgtgaaagactggcctatccaaataagagacaaaagaaagagagatctcgtcctaaatgtgtgggattttgcaggtcrtgaggaattctatagtactcatccccattttatgacgcagcgagcattgtaccttgctgtctatgacctcagcaagggacaggctgaagttgatgccatg

SEQ ID NO: 5780 - DNA, 201 bp, Homo sapiens
ccataatcagatcagcatcttggacttgagtgaaaaagcatatttatggtctagagtagagaaactgcatctttctcacaataaactgaaagagattcctsctgagattggctgtcttgaaaatctgacatctctggatgtcagttacaacttggaactaagatcctttcccaatgaaatggggaaattaagcaaaatatg

SEQ ID NO: 5781 - DNA, 201 bp, Homo sapiens
gcatggagctgtttttattcctgacctccattttacagaactttaacctgaaatctctggttgacccaaagaaccttgacaccactccagttgtcaatggwtttgcctctgtgccgcccttctaccagctgtgcttcattcctgtctgaagaagagcagatggcctggctgctgctgtgcagtccctgcagctctctttcc

SEQ ID NO: 5782 - DNA, 201 bp, Homo sapiens
ttgaacgtgtgattggcagaaaccggagcccctgcatgcaagacaggagccacatgccctacacagatgctgtggtgcacgaggtccagagatacattgascttctccccaccagcctgccccatgcagtgacctgtgacattaaattcagaaactatctcattcccaagggcacaaccatattaatttccctgacttctg

SEQ ID NO: 5783 - DNA, 201 bp, Homo sapiens
ggaaagaaatggaaggagatccggcgtttctccctcatgacgctgcggaattttgggatggggaagaggagcattgaggaccgtgttcaagaggaagcccrctgccttgtggaggagttgagaaaaaccaaggcctcaccctgtgatcccactttcatcctgggctgtgctccctgcaatgtgatctgctccattattttc

SEQ ID NO: 5784 - DNA, 201 bp, Homo sapiens
accctcatcactttctggatgaaggtggcaattttaagaaaagtaaatacttcatgcctttctcagcaggaaaacggatttgtgtgggagaagccctggcyggcatggagctgtttttattcctgacctccattttacagaactttaacctgaaatctctggttgacccaaagaaccttgacaccactccagttgtcaatg

SEQ ID NO: 5785 - DNA, 201 bp, Homo sapiens
tggaattgttttcagcaatggaaagaaatggaaggagatccggcgtttctccctcatgacgctgcggaattttgggatggggaagaggagcattgaggacygtgttcaagaggaagcccgctgccttgtggaggagttgagaaaaaccaaggcctcaccctgtgatcccactttcatcctgggctgtgctccctgcaatgt

SEQ ID NO: 5786 - DNA, 201 bp, Homo sapiens
agagattgaacgtgtgattggcagaaaccggagcccctgcatgcaagacaggagccacatgccctacacagatgctgtggtgcacgaggtccagagatacmttgaccttctccccaccagcctgccccatgcagtgacctgtgacattaaattcagaaactatctcattcccaagggcacaaccatattaatttccctgac

SEQ ID NO: 5787 - DNA, 201 bp, Homo sapiens
ggagaggagttttctggaagaggcattttcccactggctgaaagagctaacagaggatttggaattgttttcagcaatggaaagaaatggaaggagatccrgcgtttctccctcatgacgctgcggaattttgggatggggaagaggagcattgaggaccgtgttcaagaggaagcccgctgccttgtggaggagttgaga

SEQ ID NO: 5788 - DNA, 201 bp, Homo sapiens
gaagagattgaacgtgtgattggcagaaaccggagcccctgcatgcaagacaggagccacatgccctacacagatgctgtggtgcacgaggtccagagatrcattgaccttctccccaccagcctgccccatgcagtgacctgtgacattaaattcagaaactatctcattcccaagggcacaaccatattaatttccctg

SEQ ID NO: 5789 - DNA, 201 bp, Homo sapiens
aatttttctcctatcattgattacttcccgggaactcacaacaaattacttaaaaacgttgcttttatgaaaagttatattttggaaaaagtaaaagaacrccaagaatcaatggacatgaacaaccctcaggactttattgattgcttcctgatgaaaatggagaaggaaaagcacaaccaaccatctgaatttactatt

SEQ ID NO: 5790 - DNA, 201 bp, Homo sapiens
ctgcaatgtgatctgctccattattttccataaacgttttgattataaagatcagcaatttcttaacttaatggaaaagttgaatgaaaacatcaagattktgagcagcccctggatccagatctgcaataatttttctcctatcattgattacttcccgggaactcacaacaaattacttaaaaacgttgcttttatgaa

SEQ ID NO: 5791 - DNA, 201 bp, Homo sapiens
ggaaagaaatggaaggagatccggcgtttctccctcatgacgctgcggaattttgggatggggaagaggagcattgaggaccgtgttcaagaggaagcccrctgccttgtggaggagttgagaaaaaccaagggtgggtgaccctactccatatcactgaccttactggactactatcttctctactgacattcttggaaa

SEQ ID NO: 5792 - DNA, 201 bp, Homo sapiens
ctgagagccaagggaatttgcacatatttgtgctgtgtgtgtacaggcatgattgtgcgtacagtgtgggtataaaaggttcatttaatcccatgttctcytgaactttgcttttttgctttcaaataagaaatgatgaatatagattttgagttcattttttgaaagagttaaagagcagtgtttttcccattacctatt

SEQ ID NO: 5793 - DNA, 201 bp, Homo sapiens
tggaattgttttcagcaatggaaagaaatggaaggagatccggcgtttctccctcatgacgctgcggaattttgggatggggaagaggagcattgaggacygtgttcaagaggaagcccgctgccttgtggaggagttgagaaaaaccaagggtgggtgaccctactccatatcactgaccttactggactactatcttct

SEQ ID NO: 5794 - DNA, 201 bp, Homo sapiens
atgagtcctggttgttagctcatgtgaagcgggggtttgaagctgagagccaagggaatttgcacatatttgtgctgtgtgtgtacaggcatgattgtgcrtacagtgtgggtataaaaggttcatttaatcccatgttctcctgaactttgcttttttgctttcaaataagaaatgatgaatatagattttgagttcatt

SEQ ID NO: 5795 - DNA, 201 bp, Homo sapiens; identical to SEQ ID NO: 5787

SEQ ID NO: 5796 - DNA, 201 bp, Homo sapiens
cctgaagcatagtccaggagcagagttagccagaaatgcctcctgctgccccagccttagagagctcccatctcaatcattgagcctgaaggcttcaagcycaagaatgcaacaagacccccagcctacatttctcagctcccctggagccagctgatcctgtaacgctgctggaggtcagtctgagctaccaagactgtc

SEQ ID NO: 5797 - DNA, 201 bp, Homo sapiens
ttgcccccattagccagacgccaccatccttctcaccaccacctccgctggtccctcctgccccggaggacctccgcagagtctcggagcctgacctcacrggagctgtttcgagtaccgattccagtcctctactaaatgaagtttcttcttcccttattggaactgattcccaagcctttccatcagttagcaagcctt

SEQ ID NO: 5798 - DNA, 201 bp, Homo sapiens
gcgcctctggctcctttgcccccattagccagacgccaccatccttctcaccaccacctccgctggtccctcctgccccggaggacctccgcagagtctcrgagcctgacctcacgggagctgtttcgagtaccgattccagtcctctactaaatgaagtttcttcttcccttattggaactgattcccaagcctttccat

SEQ ID NO: 5799 - DNA, 201 bp, Homo sapiens
gccgaccctttacgcgcacgctctatttctgctgttaaaatcattcctgtgaagacagtgaaaaacgcctcaggcctagttctccctacagacatggatcytacaaaaatctgcactgggaagggagcggtgactctccgggcctcgtcttcctacagggaaaccccaagcagtagccctgcgagccctcaggaaacccgg

SEQ ID NO: 5800 - DNA, 201 bp, Homo sapiens
gctcttcctcactgaagtcaagctcagaaagaaatgactgggaacccccagataagaaagtagacacaagaaaatatcgtgcagagcccaagagcatttaygaatatcagcctggcaagtcttccgttctgaccaacgaaaagatgagtcgggatataagcccagaagagatagatttaaagaatgaaccttggtataaat

SEQ ID NO: 5801 - DNA, 201 bp, Homo sapiens
agaatgatgatgagttggaactccgcgatggagatatcgttgatgtcatggaaaaatgtgacgatggatggtttgttggtacttcaagaaggacaaagcartttggtacttttccaggcaactatgtaaaacctttgtatctataagaagactgaaaaccatggagattatttttattggaggaggaagcatcattcatga

SEQ ID NO: 5802 - DNA, 201 bp, Homo sapiens
ccacagaatgatgatgagttggaactccgcgatggagatatcgttgatgtcatggaaaaatgtgacgatggatggtttgttggtacttcaagaaggacaargcagtttggtacttttccaggcaactatgtaaaacctttgtatctataagaagactgaaaaccatggagattatttttattggaggaggaagcatcattc

SEQ ID NO: 5803 - DNA, 201 bp, Homo sapiens
aacagagatgatgattcagatctgtactctcccagatactcattttctgaagacacaaaatctcccctttctgtgcctcgctcaaaaagtgagatgagctrcattgatggtgagaaggtagtcaagaggtcggccacactacccctcccagcccgctcttcctcactgaagtcaagctcagaaagaaatgactgggaaccc

SEQ ID NO: 5804 - DNA, 201 bp, Homo sapiens
gcttgtgtttttctgggacagtttagaattgggaggcctattctcatagaacaccaaaaatgatgttcagtgattcatttaacatacaccaatgtactctrgctgctggggggacaaccataagcaagacatgcccagggtttgccgtggctccagatctactccctgtaggagttcaaggatcacacaaacggtagtaac

SEQ ID NO: 5805 - DNA, 201 bp, Homo sapiens
gccctactccggaaatttcttcagagactcctggatatatatattcttccaacttccatgcagtgaagagggaatcagacggggctcctggggatctcacyagcttggagaatgagagacaaatttataaaagtgtcttggaaggtggtgacatccctcttcagggcctgagtgggctcaagcgaccatccagctctgctt

SEQ ID NO: 5806 - DNA, 201 bp, Homo sapiens
caatttgcccgtctttaataaaatcttgtgttaaaatttgcatcacgtcgccttcctatgtatgacgaaacaagaaacagagatttccaattgctcttttktcttcagacatttagtaatataaagtacctatttttatgctgaaatgtttatacaggtttattaatagcaagtgcaactaactggcggcatgccttgcaa

SEQ ID NO: 5807 - DNA, 201 bp, Homo sapiens
ccccaccacagccagccagcccgcgcctctggctcctttgcccccattagccagacgccaccatccttctcaccaccacctccgctggtccctcctgcccyggaggacctccgcagagtctcggagcctgacctcacgggagctgtttcgagtaccgattccagtcctctactaaatgaagtttcttcttcccttattgga

SEQ ID NO: 5808 - DNA, 201 bp, Homo sapiens
tggggaggaaaggtaactctgatctcagttacagtttttttttcctttttaatttcattattttgggtttttggtttttgcagtcctatttatctgcagtygtattaagtcctattgctagaataggttactacaaaaaaggttatattctgaaagaaaaataactgacattatatataaccaattaatttaaagtattgc

SEQ ID NO: 5809 - DNA, 201 bp, Homo sapiens
ggtagaaggagacttcctgaatttccttaaaacccagtaagagtaagacctgttgttttggaaggtctgctccaccatctaagagcactgttttttttttkttgttgttgttgttgttttacggtctctgagggaatatagtaaaaatgcatatgcacgtgcaatttgcacggcagcatttcaccgattgtggactgtatt

SEQ ID NO: 5810 - DNA, 201 bp, Homo sapiens
cacaaacggtagtaaccagggttgtgaatctgagtacaccctggcaaggcttctcttcagactgaagcagcaattctgccactaccagcagcaaccaggabgtctgttctttgtgggggccagatcagaagagagaggcccctgtgacgcccgggctgcttggtcacaactctgtccaattcaaggatgtttatcggcctc

SEQ ID NO: 5811 - DNA, 201 bp, Homo sapiens
cagtaaaagaaaaaaaaaataatgtgcttaagaagtgggactgtaaatatgtatatttaactttgtatagcccatgtacctaccttgtatagaaaaataaytttaaaaatttgaatggaagggggtaaaggaggtcatgaagtttttttgcatttttatttaaatgaaggaattccaaataactcacctacagatttttag

SEQ ID NO: 5812 - DNA, 201 bp, Homo sapiens
cagaagtgtgcatcccaaccttccttctgacaagtcccagaggtggccccaccacagccagccagcccgcgcctctggctcctttgcccccattagccagrcgccaccatccttctcaccaccacctccgctggtccctcctgccccggaggacctccgcagagtctcggagcctgacctcacgggagctgtttcgagtac

SEQ ID NO: 5813 - DNA, 201 bp, Homo sapiens
gggtagaaggagacttcctgaatttccttaaaacccagtaagagtaagacctgttgttttggaaggtctgctccaccatctaagagcactgtttttttttktttgttgttgttgttgttttacggtctctgagggaatatagtaaaaatgcatatgcacgtgcaatttgcacggcagcatttcaccgattgtggactgtat

SEQ ID NO: 5814 - DNA, 201 bp, Homo sapiens
ttaaacagatccacaaactgaacagagatgatgattcagatctgtactctcccagatactcattttctgaagacacaaaatctcccctttctgtgcctcgstcaaaaagtgagatgagctacattgatggtgagaaggtagtcaagaggtcggccacactacccctcccagcccgctcttcctcactgaagtcaagctcag

SEQ ID NO: 5815 - DNA, 201 bp, Homo sapiens
ggaattccaaataactcacctacagatttttagcacaaaaatagccattgtaaagtgttaaaatttacgataagtattctattggggaggaaaggtaactmtgatctcagttacagtttttttttcctttttaatttcattattttgggtttttggtttttgcagtcctatttatctgcagtcgtattaagtcctattgct

SEQ ID NO: 5816 - DNA, 201 bp, Homo sapiens
tagtcaagaggtcggccacactacccctcccagcccgctcttcctcactgaagtcaagctcagaaagaaatgactgggaacccccagataagaaagtagayacaagaaaatatcgtgcagagcccaagagcatttacgaatatcagcctggcaagtcttccgttctgaccaacgaaaagatgagtcgggatataagcccag

SEQ ID NO: 5817 - DNA, 201 bp, Homo sapiens
ttcctttttaatttcattattttgggtttttggtttttgcagtcctatttatctgcagtcgtattaagtcctattgctagaataggttactacaaaaaagrttatattctgaaagaaaaataactgacattatatataaccaattaatttaaagtattgccatttaaattacacactgagagcatgtcctatgcagacata

SEQ ID NO: 5818 - DNA, 201 bp, Homo sapiens
gcctcacgcatttgtatatctccagaaattcaggtatgcctcaccaatttgcccgtctttaataaaatcttgtgttaaaatttgcatcacgtcgccttccyatgtatgacgaaacaagaaacagagatttccaattgctcttttgtcttcagacatttagtaatataaagtacctatttttatgctgaaatgtttatacag

SEQ ID NO: 5819 - DNA, 201 bp, Homo sapiens
ctgattacttggaatccacggaagaatttattcgaagacgtcatgatgataaagagatgagacctgccagagccaaatttgactttaaagctcagacactraaggagcttcctctgcagaagggagatattgtttacatttataagcaaattgatcagaactggtatgaaggagaacaccacggccgggtgggaatcttcc

SEQ ID NO: 5820 - DNA, 201 bp, Homo sapiens
aagtgggactgtaaatatgtatatttaactttgtatagcccatgtacctaccttgtatagaaaaataattttaaaaatttgaatggaagggggtaaaggargtcatgaagtttttttgcatttttatttaaatgaaggaattccaaataactcacctacagatttttagcacaaaaatagccattgtaaagtgttaaaatt

SEQ ID NO: 5821 - DNA, 201 bp, Homo sapiens; identical to SEQ ID NO: 5796

SEQ ID NO: 5822 - DNA, 201 bp, Homo sapiens; identical to SEQ ID NO: 5797

SEQ ID NO: 5823 - DNA, 201 bp, Homo sapiens; identical to SEQ ID NO: 5798

SEQ ID NO: 5824 - DNA, 201 bp, Homo sapiens; identical to SEQ ID NO: 5799

SEQ ID NO: 5825 - DNA, 201 bp, Homo sapiens
gtacaaattccctgaacttcctgaaatccagcaaacttccgaagagacaaagtcttgctctgtcatgtcacccaggctggagtgcagtggtacagtcatakctcactgcagcctcaaactcctagactcaagcaatcctcccacctcagcctcccaagtagctgggactgcagatgatgattcagatctgtactctcccag

SEQ ID NO: 5826 - DNA, 201 bp, Homo sapiens; identical to SEQ ID NO: 5800

SEQ ID NO: 5827 - DNA, 201 bp, Homo sapiens; identical to SEQ ID NO: 5801

SEQ ID NO: 5828 - DNA, 201 bp, Homo sapiens; identical to SEQ ID NO: 5802

SEQ ID NO: 5829 - DNA, 201 bp, Homo sapiens
actgcagatgatgattcagatctgtactctcccagatactcattttctgaagacacaaaatctcccctttctgtgcctcgctcaaaaagtgagatgagctrcattgatggtgagaaggtagtcaagaggtcggccacactacccctcccagcccgctcttcctcactgaagtcaagctcagaaagaaatgactgggaaccc

SEQ ID NO: 5830 - DNA, 201 bp, Homo sapiens; identical to SEQ ID NO: 5804

SEQ ID NO: 5831 - DNA, 201 bp, Homo sapiens; identical to SEQ ID NO: 5805

SEQ ID NO: 5832 - DNA, 201 bp, Homo sapiens; identical to SEQ ID NO: 5806

SEQ ID NO: 5833 - DNA, 201 bp, Homo sapiens; identical to SEQ ID NO: 5807

SEQ ID NO: 5834 - DNA, 201 bp, Homo sapiens; identical to SEQ ID NO: 5808

SEQ ID NO: 5835 - DNA, 201 bp, Homo sapiens; identical to SEQ ID NO: 5809

SEQ ID NO: 5836 - DNA, 201 bp, Homo sapiens; identical to SEQ ID NO: 5810

SEQ ID NO: 5837 - DNA, 201 bp, Homo sapiens; identical to SEQ ID NO: 5811

SEQ ID NO: 5838 - DNA, 201 bp, Homo sapiens
cttcccgactctagatgatttcattccccctcatctgcagaggtggccccaccacagccagccagcccgcgcctctggctcctttgcccccattagccagrcgccaccatccttctcaccaccacctccgctggtccctcctgccccggaggacctccgcagagtctcggagcctgacctcacgggagctgtttcgagtac

SEQ ID NO: 5839 - DNA, 201 bp, Homo sapiens; identical to SEQ ID NO: 5813

SEQ ID NO: 5840 - DNA, 201 bp, Homo sapiens
cagcctcccaagtagctgggactgcagatgatgattcagatctgtactctcccagatactcattttctgaagacacaaaatctcccctttctgtgcctcgstcaaaaagtgagatgagctacattgatggtgagaaggtagtcaagaggtcggccacactacccctcccagcccgctcttcctcactgaagtcaagctcag

SEQ ID NO: 5841 - DNA, 201 bp, Homo sapiens; identical to SEQ ID NO: 5815

SEQ ID NO: 5842 - DNA, 201 bp, Homo sapiens; identical to SEQ ID NO: 5816

SEQ ID NO: 5843 - DNA, 201 bp, Homo sapiens; identical to SEQ ID NO: 5817

SEQ ID NO: 5844 - DNA, 201 bp, Homo sapiens; identical to SEQ ID NO: 5818

SEQ ID NO: 5845 - DNA, 201 bp, Homo sapiens; identical to SEQ ID NO: 5819

SEQ ID NO: 5846 - DNA, 201 bp, Homo sapiens; identical to SEQ ID NO: 5820

SEQ ID NO: 5847 - DNA, 201 bp, Homo sapiens; identical to SEQ ID NO: 5796

SEQ ID NO: 5848 - DNA, 201 bp, Homo sapiens; identical to SEQ ID NO: 5799

SEQ ID NO: 5849 - DNA, 201 bp, Homo sapiens
gctcttcctcactgaagtcaagctcagaaagaaatgactgggaacccccagataagaaagtagacacaagaaaatatcgtgcagagcccaagagcatttaygaatatcagcctggcaagtcttccgttctgaccaacgaaaagatgagctcagccatcagccctactccggaaatttcttcagagactcctggatatatat

SEQ ID NO: 5850 - DNA, 201 bp, Homo sapiens; identical to SEQ ID NO: 5801

SEQ ID NO: 5851 - DNA, 201 bp, Homo sapiens; identical to SEQ ID NO: 5802

SEQ ID NO: 5852 - DNA, 201 bp, Homo sapiens; identical to SEQ ID NO: 5803

SEQ ID NO: 5853 - DNA, 201 bp, Homo sapiens; identical to SEQ ID NO: 5804

SEQ ID NO: 5854 - DNA, 201 bp, Homo sapiens; identical to SEQ ID NO: 5805

SEQ ID NO: 5855 - DNA, 201 bp, Homo sapiens; identical to SEQ ID NO: 5806

SEQ ID NO: 5856 - DNA, 201 bp, Homo sapiens; identical to SEQ ID NO: 5808

SEQ ID NO: 5857 - DNA, 201 bp, Homo sapiens; identical to SEQ ID NO: 5809

SEQ ID NO: 5858 - DNA, 201 bp, Homo sapiens; identical to SEQ ID NO: 5810

SEQ ID NO: 5859 - DNA, 201 bp, Homo sapiens; identical to SEQ ID NO: 5811

SEQ ID NO: 5860 - DNA, 201 bp, Homo sapiens; identical to SEQ ID NO: 5813

SEQ ID NO: 5861 - DNA, 201 bp, Homo sapiens; identical to SEQ ID NO: 5814

SEQ ID NO: 5862 - DNA, 201 bp, Homo sapiens; identical to SEQ ID NO: 5815

SEQ ID NO: 5863 - DNA, 201 bp, Homo sapiens
tagtcaagaggtcggccacactacccctcccagcccgctcttcctcactgaagtcaagctcagaaagaaatgactgggaacccccagataagaaagtagayacaagaaaatatcgtgcagagcccaagagcatttacgaatatcagcctggcaagtcttccgttctgaccaacgaaaagatgagctcagccatcagcccta

SEQ ID NO: 5864 - DNA, 201 bp, Homo sapiens; identical to SEQ ID NO: 5817

SEQ ID NO: 5865 - DNA, 201 bp, Homo sapiens; identical to SEQ ID NO: 5818

SEQ ID NO: 5866 - DNA, 201 bp, Homo sapiens; identical to SEQ ID NO: 5819

SEQ ID NO: 5867 - DNA, 201 bp, Homo sapiens; identical to SEQ ID NO: 5820

SEQ ID NO: 5868 - DNA, 201 bp, Homo sapiens
tctgtttgttttgcttggcaattaatcatggctcgtagtggctgcacttctttaaaaacaaagcccccatgtcatttagactaaccaccaaactgtgtttygaaagaaaaattggccgtttagctcaactgagaaatgtgttcatttgaactcttgaaccccttgctgtttgcaccaatccccaacataccccatggtttt

SEQ ID NO: 5869 - DNA, 201 bp, Homo sapiens
gcctggcattgtccaggggtgagctgggccccagccaggagggctcggaacacatccccaagcacaccgtctcttcccgcatcaccgcttttgagcagctrattcagcggtcccgttccatgccatccctggacctgtccggaaggctgagcaagtctcccacacctgtgctgtcccggggcagcctgacctcagcccgct

SEQ ID NO: 5870 - DNA, 201 bp, Homo sapiens
ggtctgtcctttgttttctgtttgttttgcttggcaattaatcatggctcgtagtggctgcacttctttaaaaacaaagcccccatgtcatttagactaaycaccaaactgtgtttcgaaagaaaaattggccgtttagctcaactgagaaatgtgttcatttgaactcttgaaccccttgctgtttgcaccaatccccaa

SEQ ID NO: 5871 - DNA, 201 bp, Homo sapiens
agttcacaaataaatccaaaaaatggggtggggggtggaatttttttttccttcagaattcgaccattgatcattaatcaagaatgacttcaaaattttgmtatttataatagatgaaaggtgaactcttttcgcaagctggtttccagcgaaatctttgcctgttttaactctactttgttgttttaaagattcagaatc

SEQ ID NO: 5872 - DNA, 201 bp, Homo sapiens
ctgtccggaaggctgagcaagtctcccacacctgtgctgtcccggggcagcctgacctcagcccgctcggccgagtccctacttgagtcaaccaagctccrtcccaaggagatggatgggatgaactccagtggggtctatgcttccccaacatgtagcaatatggcacaccatgccttgagcttcaggggccttgtgcct

SEQ ID NO: 5873 - DNA, 201 bp, Homo sapiens
ccccaaacatcgcctcaacaagtgcaagggcacctgcccggcctcatacacccgcttcaccaccatccggaagcatgagcagcagcagacctctagacagyctgagtggcgcctggatgccagaggggacaagagcaccctcctcaggaacatctacctaatgagcccccttcctttccggctgaaaaagcccctccacca

SEQ ID NO: 5874 - DNA, 201 bp, Homo sapiens
acactttacaaagaaagttctctcattttgctcaccttttgccttttgagtagttttctttgcattaaactagttcacaaataaatccaaaaaatggggtggggggtggaatttttttttccttcagaattcgaccattgatcattaatcaagaatgacttcaaaattttgatatttataatagatgaaaggtgaactctt

SEQ ID NO: 5875 - DNA, 201 bp, Homo sapiens
taggccctgtgtgtaagcacaagaagcccctgtcagctgcgaaggcctgcatttcggaaatccttccatccaaattcaaacccaggctctctgctcccagygctcttttgcaggaacagaagagtatcctcttgccctcagagaaggctcaaagctgtgagaacctttgtgtttctggttctttaaatgattccaaaagag

SEQ ID NO: 5876 - DNA, 201 bp, Homo sapiens
gcatcaccgcttttgagcagctgattcagcggtcccgttccatgccatccctggacctgtccggaaggctgagcaagtctcccacacctgtgctgtcccgkggcagcctgacctcagcccgctcggccgagtccctacttgagtcaaccaagctccatcccaaggagatggatgggatgaactccagtggggtctatgctt

SEQ ID NO: 5877 - DNA, 156 bp, Homo sapiens
aagacgtcatgatgataaagaggtaaatcccatcttttaaatccattagtttttgcttggaaaaatgtatgaagcaagtacagattcttgacatctatcaragaggtgacatgatctagcaattagaggcaaaaattgaggctttcacaagtgatt

SEQ ID NO: 5878 - DNA, 201 bp, Homo sapiens
atgtgtgtgagtgtgtgccttgtccctataaggtcctgcacgcctctttgtagggacactttacaaagaaagttctctcattttgctcaccttttgccttytgagtagttttctttgcattaaactagttcacaaataaatccaaaaaatggggtggggggtggaatttttttttccttcagaattcgaccattgatcatt

SEQ ID NO: 5879 - DNA, 201 bp, Homo sapiens; identical to SEQ ID NO: 5803

SEQ ID NO: 5880 - DNA, 201 bp, Homo sapiens; identical to SEQ ID NO: 5814

SEQ ID NO: 5881 - DNA, 201 bp, Homo sapiens
tagtcaagaggtcggccacactacccctcccagcccgctcttcctcactgaagtcaagctcagaaagaaatgactgggaacccccagataagaaagtagayacaagaaaatatcgtgcagagcccaagagcatttacgaatatcagcctggcaagtcttccgttctgaccaacgaaaagatgtatatattcttccaacttc

SEQ ID NO: 5882 - DNA, 201 bp, Homo sapiens
gcctggcaagtcttccgttctgaccaacgaaaagatgtatatattcttccaacttccatgcagtgaagagggaatcagacggggctcctggggatctcacyagcttggagaatgagagacaaatttataaaagtgtcttggaaggtggtgacatccctcttcagggcctgagtgggctcaagcgaccatccagctctgctt

SEQ ID NO: 5883 - DNA, 176 bp, Homo sapiens
aatgtgatggtggttccaaagctgtgatgaatggcttggcacctggcagcaatgggcaagacaaagacatggatcytacaaaaatctgcactgggaagggagcggtgactctccgggcctcgtcttcctacagggaaaccccaagcagtagccctgcgagccctcaggaaacccgg

SEQ ID NO: 5884 - DNA, 201 bp, Homo sapiens
gctcttcctcactgaagtcaagctcagaaagaaatgactgggaacccccagataagaaagtagacacaagaaaatatcgtgcagagcccaagagcatttaygaatatcagcctggcaagtcttccgttctgaccaacgaaaagatgtatatattcttccaacttccatgcagtgaagagggaatcagacggggctcctggg

SEQ ID NO: 5885 - DNA, 201 bp, Homo sapiens; identical to SEQ ID NO: 5796

SEQ ID NO: 5886 - DNA, 201 bp, Homo sapiens; identical to SEQ ID NO: 5797

SEQ ID NO: 5887 - DNA, 201 bp, Homo sapiens; identical to SEQ ID NO: 5798

SEQ ID NO: 5888 - DNA, 201 bp, Homo sapiens
tgtcctgccaccaccatgagttctgaatgtgatggtggttccaaagctgtgatgaatggcttggcacctggcagcaatgggcaagacaaagacatggatcytacaaaaatctgcactgggaagggagcggtgactctccgggcctcgtcttcctacagggaaaccccaagcagtagccctgcgagccctcaggaaacccgg

SEQ ID NO: 5889 - DNA, 201 bp, Homo sapiens; identical to SEQ ID NO: 5849

SEQ ID NO: 5890 - DNA, 201 bp, Homo sapiens; identical to SEQ ID NO: 5801

SEQ ID NO: 5891 - DNA, 201 bp, Homo sapiens; identical to SEQ ID NO: 5802

SEQ ID NO: 5892 - DNA, 201 bp, Homo sapiens; identical to SEQ ID NO: 5803

SEQ ID NO: 5893 - DNA, 201 bp, Homo sapiens; identical to SEQ ID NO: 5804

SEQ ID NO: 5894 - DNA, 201 bp, Homo sapiens; identical to SEQ ID NO: 5805

SEQ ID NO: 5895 - DNA, 201 bp, Homo sapiens; identical to SEQ ID NO: 5806

SEQ ID NO: 5896 - DNA, 201 bp, Homo sapiens; identical to SEQ ID NO: 5807

SEQ ID NO: 5897 - DNA, 201 bp, Homo sapiens; identical to SEQ ID NO: 5808

SEQ ID NO: 5898 - DNA, 201 bp, Homo sapiens; identical to SEQ ID NO: 5809

SEQ ID NO: 5899 - DNA, 201 bp, Homo sapiens; identical to SEQ ID NO: 5810

SEQ ID NO: 5900 - DNA, 201 bp, Homo sapiens; identical to SEQ ID NO: 5811

SEQ ID NO: 5901 - DNA, 201 bp, Homo sapiens; identical to SEQ ID NO: 5838

SEQ ID NO: 5902 - DNA, 201 bp, Homo sapiens; identical to SEQ ID NO: 5813

SEQ ID NO: 5903 - DNA, 201 bp, Homo sapiens; identical to SEQ ID NO: 5814

SEQ ID NO: 5904 - DNA, 201 bp, Homo sapiens; identical to SEQ ID NO: 5815

SEQ ID NO: 5905 - DNA, 201 bp, Homo sapiens; identical to SEQ ID NO: 5863

SEQ ID NO: 5906 - DNA, 201 bp, Homo sapiens; identical to SEQ ID NO: 5817

SEQ ID NO: 5907 - DNA, 201 bp, Homo sapiens; identical to SEQ ID NO: 5818

SEQ ID NO: 5908 - DNA, 201 bp, Homo sapiens; identical to SEQ ID NO: 5819

SEQ ID NO: 5909 - DNA, 201 bp, Homo sapiens; identical to SEQ ID NO: 5820

SEQ ID NO: 5910 - DNA, 201 bp, Homo sapiens
ccccaccacagccagccagcccgcgcctctggctcctttgcccccattagccagacgccaccatccttctcaccaccacctccgctggtccctcctgcccyggaggacctccgcagagtctcggagcctgacctcacgggagctgtttcgagtaccgtaagcttgctggactcccctcctcgcggcttttctgaatgtctc

SEQ ID NO: 5911 - DNA, 201 bp, Homo sapiens
ttgcccccattagccagacgccaccatccttctcaccaccacctccgctggtccctcctgccccggaggacctccgcagagtctcggagcctgacctcacrggagctgtttcgagtaccgtaagcttgctggactcccctcctcgcggcttttctgaatgtctcctcccagcagtcacattccctttctcactgaagcact

SEQ ID NO: 5912 - DNA, 201 bp, Homo sapiens
ctgtttcgagtaccgtaagcttgctggactcccctcctcgcggcttttctgaatgtctcctcccagcagtcacattccctttctcactgaagcactgagcyctgaggacagcactggctgccgctgtgcctgtgtgatgactggagccgtgtcccctgtcactagcgtgcatgcttcccgtgtgtcttccctgggtctctc

SEQ ID NO: 5913 - DNA, 201 bp, Homo sapiens
ccgctggtccctcctgccccggaggacctccgcagagtctcggagcctgacctcacgggagctgtttcgagtaccgtaagcttgctggactcccctcctcrcggcttttctgaatgtctcctcccagcagtcacattccctttctcactgaagcactgagctctgaggacagcactggctgccgctgtgcctgtgtgatga

SEQ ID NO: 5914 - DNA, 201 bp, Homo sapiens
gcgcctctggctcctttgcccccattagccagacgccaccatccttctcaccaccacctccgctggtccctcctgccccggaggacctccgcagagtctcrgagcctgacctcacgggagctgtttcgagtaccgtaagcttgctggactcccctcctcgcggcttttctgaatgtctcctcccagcagtcacattccctt

SEQ ID NO: 5915 - DNA, 201 bp, Homo sapiens; identical to SEQ ID NO: 5888

SEQ ID NO: 5916 - DNA, 201 bp, Homo sapiens; identical to SEQ ID NO: 5838

SEQ ID NO: 5917 - DNA, 201 bp, Homo sapiens; identical to SEQ ID NO: 5868

SEQ ID NO: 5918 - DNA, 201 bp, Homo sapiens; identical to SEQ ID NO: 5869

SEQ ID NO: 5919 - DNA, 201 bp, Homo sapiens; identical to SEQ ID NO: 5870

SEQ ID NO: 5920 - DNA, 201 bp, Homo sapiens; identical to SEQ ID NO: 5871

SEQ ID NO: 5921 - DNA, 201 bp, Homo sapiens; identical to SEQ ID NO: 5872

SEQ ID NO: 5922 - DNA, 201 bp, Homo sapiens; identical to SEQ ID NO: 5873

SEQ ID NO: 5923 - DNA, 201 bp, Homo sapiens; identical to SEQ ID NO: 5875

SEQ ID NO: 5924 - DNA, 201 bp, Homo sapiens; identical to SEQ ID NO: 5876

SEQ ID NO: 5925 - DNA, 201 bp, Homo sapiens; identical to SEQ ID NO: 5874

SEQ ID NO: 5926 - DNA, 201 bp, Homo sapiens; identical to SEQ ID NO: 5878

SEQ ID NO: 5927 - DNA, 201 bp, Homo sapiens; identical to SEQ ID NO: 5803

SEQ ID NO: 5928 - DNA, 201 bp, Homo sapiens; identical to SEQ ID NO: 5814

SEQ ID NO: 5929 - DNA, 201 bp, Homo sapiens; identical to SEQ ID NO: 5881

SEQ ID NO: 5930 - DNA, 201 bp, Homo sapiens; identical to SEQ ID NO: 5882

SEQ ID NO: 5931 - DNA, 201 bp, Homo sapiens; identical to SEQ ID NO: 5888

SEQ ID NO: 5932 - DNA, 201 bp, Homo sapiens; identical to SEQ ID NO: 5884

SEQ ID NO: 5933 - DNA, 201 bp, Homo sapiens; identical to SEQ ID NO: 5796

SEQ ID NO: 5934 - DNA, 201 bp, Homo sapiens; identical to SEQ ID NO: 5888

SEQ ID NO: 5935 - DNA, 201 bp, Homo sapiens; identical to SEQ ID NO: 5849

SEQ ID NO: 5936 - DNA, 201 bp, Homo sapiens; identical to SEQ ID NO: 5801

SEQ ID NO: 5937 - DNA, 201 bp, Homo sapiens; identical to SEQ ID NO: 5802

SEQ ID NO: 5938 - DNA, 201 bp, Homo sapiens; identical to SEQ ID NO: 5803

SEQ ID NO: 5939 - DNA, 201 bp, Homo sapiens; identical to SEQ ID NO: 5804

SEQ ID NO: 5940 - DNA, 201 bp, Homo sapiens; identical to SEQ ID NO: 5805

SEQ ID NO: 5941 - DNA, 201 bp, Homo sapiens; identical to SEQ ID NO: 5806

SEQ ID NO: 5942 - DNA, 201 bp, Homo sapiens; identical to SEQ ID NO: 5808

SEQ ID NO: 5943 - DNA, 201 bp, Homo sapiens; identical to SEQ ID NO: 5809

SEQ ID NO: 5944 - DNA, 201 bp, Homo sapiens; identical to SEQ ID NO: 5810

SEQ ID NO: 5945 - DNA, 201 bp, Homo sapiens; identical to SEQ ID NO: 5811

SEQ ID NO: 5946 - DNA, 201 bp, Homo sapiens; identical to SEQ ID NO: 5813

SEQ ID NO: 5947 - DNA, 201 bp, Homo sapiens; identical to SEQ ID NO: 5814

SEQ ID NO: 5948 - DNA, 201 bp, Homo sapiens; identical to SEQ ID NO: 5815

SEQ ID NO: 5949 - DNA, 201 bp, Homo sapiens; identical to SEQ ID NO: 5863

SEQ ID NO: 5950 - DNA, 201 bp, Homo sapiens; identical to SEQ ID NO: 5817

SEQ ID NO: 5951 - DNA, 201 bp, Homo sapiens
ggtagggttgtgtacggaacccctggctgtctgcatatatctcagaattaccccaggaccattgtcccaaagtctagagtctttacaggtaggcaaaattygttttcaatgcctgtgcctcagctgctgtcacaaatacccatcttaggatcccatcagcttcccatcccccaccagacagccacagtaccctcactttct

SEQ ID NO: 5952 - DNA, 201 bp, Homo sapiens; identical to SEQ ID NO: 5818

SEQ ID NO: 5953 - DNA, 201 bp, Homo sapiens; identical to SEQ ID NO: 5819

SEQ ID NO: 5954 - DNA, 201 bp, Homo sapiens; identical to SEQ ID NO: 5820

SEQ ID NO: 5955 - DNA, 201 bp, Homo sapiens; identical to SEQ ID NO: 5796

SEQ ID NO: 5956 - DNA, 201 bp, Homo sapiens; identical to SEQ ID NO: 5888

SEQ ID NO: 5957 - DNA, 201 bp, Homo sapiens; identical to SEQ ID NO: 5800

SEQ ID NO: 5958 - DNA, 201 bp, Homo sapiens; identical to SEQ ID NO: 5801

SEQ ID NO: 5959 - DNA, 201 bp, Homo sapiens; identical to SEQ ID NO: 5802

SEQ ID NO: 5960 - DNA, 201 bp, Homo sapiens; identical to SEQ ID NO: 5803

SEQ ID NO: 5961 - DNA, 201 bp, Homo sapiens; identical to SEQ ID NO: 5804

SEQ ID NO: 5962 - DNA, 201 bp, Homo sapiens; identical to SEQ ID NO: 5805

SEQ ID NO: 5963 - DNA, 201 bp, Homo sapiens; identical to SEQ ID NO: 5806

SEQ ID NO: 5964 - DNA, 201 bp, Homo sapiens; identical to SEQ ID NO: 5808

SEQ ID NO: 5965 - DNA, 201 bp, Homo sapiens; identical to SEQ ID NO: 5809

SEQ ID NO: 5966 - DNA, 201 bp, Homo sapiens; identical to SEQ ID NO: 5810

SEQ ID NO: 5967 - DNA, 201 bp, Homo sapiens; identical to SEQ ID NO: 5811

SEQ ID NO: 5968 - DNA, 201 bp, Homo sapiens; identical to SEQ ID NO: 5813

SEQ ID NO: 5969 - DNA, 201 bp, Homo sapiens; identical to SEQ ID NO: 5814

SEQ ID NO: 5970 - DNA, 201 bp, Homo sapiens; identical to SEQ ID NO: 5815

SEQ ID NO: 5971 - DNA, 201 bp, Homo sapiens; identical to SEQ ID NO: 5816

SEQ ID NO: 5972 - DNA, 201 bp, Homo sapiens; identical to SEQ ID NO: 5817

SEQ ID NO: 5973 - DNA, 201 bp, Homo sapiens; identical to SEQ ID NO: 5818

SEQ ID NO: 5974 - DNA, 201 bp, Homo sapiens; identical to SEQ ID NO: 5819

SEQ ID NO: 5975 - DNA, 201 bp, Homo sapiens; identical to SEQ ID NO: 5820

SEQ ID NO: 5976 - DNA, 201 bp, Homo sapiens; identical to SEQ ID NO: 5796

SEQ ID NO: 5977 - DNA, 201 bp, Homo sapiens; identical to SEQ ID NO: 5797

SEQ ID NO: 5978 - DNA, 201 bp, Homo sapiens; identical to SEQ ID NO: 5798

SEQ ID NO: 5979 - DNA, 201 bp, Homo sapiens; identical to SEQ ID NO: 5888

SEQ ID NO: 5980 - DNA, 201 bp, Homo sapiens; identical to SEQ ID NO: 5849

SEQ ID NO: 5981 - DNA, 201 bp, Homo sapiens; identical to SEQ ID NO: 5801

SEQ ID NO: 5982 - DNA, 201 bp, Homo sapiens; identical to SEQ ID NO: 5802

SEQ ID NO: 5983 - DNA, 201 bp, Homo sapiens; identical to SEQ ID NO: 5803

SEQ ID NO: 5984 - DNA, 201 bp, Homo sapiens; identical to SEQ ID NO: 5804

SEQ ID NO: 5985 - DNA, 201 bp, Homo sapiens; identical to SEQ ID NO: 5805

SEQ ID NO: 5986 - DNA, 201 bp, Homo sapiens; identical to SEQ ID NO: 5806

SEQ ID NO: 5987 - DNA, 201 bp, Homo sapiens; identical to SEQ ID NO: 5807

SEQ ID NO: 5988 - DNA, 201 bp, Homo sapiens; identical to SEQ ID NO: 5808

SEQ ID NO: 5989 - DNA, 201 bp, Homo sapiens; identical to SEQ ID NO: 5809

SEQ ID NO: 5990 - DNA, 201 bp, Homo sapiens; identical to SEQ ID NO: 5810

SEQ ID NO: 5991 - DNA, 201 bp, Homo sapiens; identical to SEQ ID NO: 5811

SEQ ID NO: 5992 - DNA, 201 bp, Homo sapiens; identical to SEQ ID NO: 5838

SEQ ID NO: 5993 - DNA, 201 bp, Homo sapiens; identical to SEQ ID NO: 5813

SEQ ID NO: 5994 - DNA, 201 bp, Homo sapiens; identical to SEQ ID NO: 5814

SEQ ID NO: 5995 - DNA, 201 bp, Homo sapiens; identical to SEQ ID NO: 5815

SEQ ID NO: 5996 - DNA, 201 bp, Homo sapiens; identical to SEQ ID NO: 5863

SEQ ID NO: 5997 - DNA, 201 bp, Homo sapiens; identical to SEQ ID NO: 5817

SEQ ID NO: 5998 - DNA, 201 bp, Homo sapiens; identical to SEQ ID NO: 5951

SEQ ID NO: 5999 - DNA, 201 bp, Homo sapiens; identical to SEQ ID NO: 5818

SEQ ID NO: 6000 - DNA, 201 bp, Homo sapiens; identical to SEQ ID NO: 5819

SEQ ID NO: 6001 - DNA, 201 bp, Homo sapiens; identical to SEQ ID NO: 5820

SEQ ID NO: 6002 - DNA, 201 bp, Homo sapiens
tatgggacaatgacaagttttctctggatgactacttgggtttcctagaacttgacttgcgtcacacgatcattcctgcaaaatcaccagagaaatgcagrttggacatgattccggacctcaaagccatgaacccccttaaagccaagacagcctccctctttgagcagaagtccatgaaaggatggtggccatgctacg

SEQ ID NO: 6003 - DNA, 201 bp, Homo sapiens
acaatgaccaagtgggcaaagatgaatttttaggacgaagcattttctctcctgtggtgaaactgaactcagaaatggacatcacacccaaacttctctgrcacccagtaatgaatggagacaaagcctgcggggatgttcttgtaactgcagagctgattctgaggggcaaggatggctccaaccttcccattcttcccc

SEQ ID NO: 6004 - DNA, 164 bp, Homo sapiens
atcctcccttcactgggagagaacttctctcccagggcggtgcgacccggagctccagcgccckagtctccacttcgtttgctgaaacttgctttctaccagctaagaaccatgctgcgagtgattgtggaatctgccagcaatatccctaaaacgaaatttgg

SEQ ID NO: 6005 - DNA, 201 bp, Homo sapiens
ttttgacaatgaccaagtgggcaaagatgaatttttaggacgaagcattttctctcctgtggtgaaactgaactcagaaatggacatcacacccaaacttytctggcacccagtaatgaatggagacaaagcctgcggggatgttcttgtaactgcagagctgattctgaggggcaaggatggctccaaccttcccattct

SEQ ID NO: 6006 - DNA, 201 bp, Homo sapiens
tgtctgatgggggaatttaagattgatgttggatttgtttatgatgaacctggccatgctgtcatgagaaagtggcttcttctcaatgacccggaagatascagttcaggttctaaaggttatatgaaagtcagcatgtttgtcctgggaaccggagatgagcctcctcctgagagacgagatcgtgataatgacagtgat

SEQ ID NO: 6007 - DNA, 201 bp, Homo sapiens
catatctgtttcctccatcggagcaaaaccactgagatcatccattcaaccctgaatcccacgtgggaccaaacaattatattcgatgaagttgaaatctwtggggaaccccaaacagttctacagaatccacccaaagttatcatggaactttttgacaatgaccaagtgggcaaagatgaatttttaggacgaagcatt

SEQ ID NO: 6008 - DNA, 177 bp, Homo sapiens
atcctcccttcactgggagagaacttctctcccagggcggtgcgacccggagctccagcgcccgagtctccacttcktttgctgaaacttgctttctaccagctaagaaccatgctgcgagtgattgtggaatctgccagcaatatccctaaaacgaaatttggcaagccggatcct

SEQ ID NO: 6009 - DNA, 201 bp, Homo sapiens
tggagaaacagaagcacagtgccaccactgtgttcggagcaaacacccccattgtttcctgcaattttgacagagtctacatctaccatctgcgctgctaygtctatcaagccagaaacctcttggctttagataaggatagcttttcagatccatatgctcatatctgtttcctccatcggagcaaaaccactgagatca

SEQ ID NO: 6010 - DNA, 201 bp, Homo sapiens
ccctttttttgatgagttgtttttctacaatgtcaacatgaccccttctgaattgatggatgagatcatcagcatccgggtttataattctcactctctgmgggcagattgtctgatgggggaatttaagattgatgttggatttgtttatgatgaacctggccatgctgtcatgagaaagtggcttcttctcaatgaccc

SEQ ID NO: 6011 - DNA, 201 bp, Homo sapiens
taccgaagatggggatgagaagagcctggagaaacagaagcacagtgccaccactgtgttcggagcaaacacccccattgtttcctgcaattttgacagartctacatctaccatctgcgctgctatgtctatcaagccagaaacctcttggctttagataaggatagcttttcagatccatatgctcatatctgtttcct

SEQ ID NO: 6012 - DNA, 201 bp, Homo sapiens
ttttccccaagagtttggggccaccaggccctcctttcaacatcacaccccggaaagccaagaaatactacctgcgtgtgatcatctggaacaccaaggaygttatcttggacgagaaaagcatcacaggagaggaaatgagtgacatctacgtcaaaggctggattcctggcaatgaagaaaacaaacagaaaacagatg

SEQ ID NO: 6013 - DNA, 201 bp, Homo sapiens
  misc_feature (1)...(201): n = A,T,C or G, or insertion/deletion polymorphism (see Tables 1-2)
accttccagcccaacatttcccagggaaaacttcagatgtgggtggatgttttccccaagagtttggggccaccaggccctcctttcaacatcacaccccngaaagccaagaaatactacctgcgtgtgatcatctggaacaccaaggacgttatcttggacgagaaaagcatcacaggagaggaaatgagtgacatctac

SEQ ID NO: 6014 - DNA, 201 bp, Homo sapiens
agatgttggtgaggccattcagtttgaagtcagcattgggaactatggcaacaagtttgacaccacctgtaagcctttggcatcaacaactcagtacagcygtgctgtatttgatggcaactactattattacttgccttgggcccacaccaagccagttgttaccctgacttcatactgggaggatattagtcatcgcct

SEQ ID NO: 6015 - DNA, 201 bp, Homo sapiens
gaactggggctgcatcatatacagtaaacacaggagaaacagaggtaggctttgttccaacgtttggaccttgttacctgaatctttatggaagccccagrgagtacacgggattcccagacccctatgatgagctgaatactggaaagggggaaggagttgcctacagaggcaggatcttggttgaattagccacttttc

SEQ ID NO: 6016 - DNA, 201 bp, Homo sapiens
gtttggggccaccaggccctcctttcaacatcacaccccggaaagccaagaaatactacctgcgtgtgatcatctggaacaccaaggacgttatcttggaygagaaaagcatcacaggagaggaaatgagtgacatctacgtcaaaggctggattcctggcaatgaagaaaacaaacagaaaacagatgtccattacagat

SEQ ID NO: 6017 - DNA, 201 bp, Homo sapiens
ggaggctcaccaaagtaaagaacagccggcggatgctgtcaaataagccacaggacttccagatccgcgtccgagtgattgagggccgacagttaagtggyaacaacataaggcctgtggtcaaagttcacgtctgtggccagacacaccgaacaagaatcaagagaggaaacaaccctttttttgatgagttgtttttct

SEQ ID NO: 6018 - DNA, 201 bp, Homo sapiens
aagtaggagaaacaattattgatctggaaaaccgattcctttcccgctttgggtcccactgcggcataccagaggagtactgtgtttctggagtcaatacstggcgagatcaactgagaccaacacagctgcttcaaaatgtcgccagattcaaaggcttcccacaacccatcctttccgaagatgggagtagaatcagat

SEQ ID NO: 6019 - DNA, 201 bp, Homo sapiens
cgagatcaactgagaccaacacagctgcttcaaaatgtcgccagattcaaaggcttcccacaacccatcctttccgaagatgggagtagaatcagatatgsaggacgagactacagcttggatgaatttgaagccaacaaaatcctgcaccagcacctcggggcccctgaagagcggcttgctcttcacatcctcaggact

SEQ ID NO: 6020 - DNA, 201 bp, Homo sapiens
ggaggaattgtacatgcccccactggtgatcaaggtcatcgaccacaggcagtttgggcggaagcctgtcgtcggccagtgcaccatcgagcgcctggacygctttcgctgtgacccttatgcagggaaagaggacatcgtcccacagctcaaagcctcccttctgtctgccccaccatgccgggacatcgttatcgaaat

SEQ ID NO: 6021 - DNA, 201 bp, Homo sapiens
caagttgtaccgaggcaagtcggatgaaaatgaagatccttctgtggttggagagtttaagggctcctttcggatctaccctctgccggatgaccccagcrtgccagcccctcccagacagtttcgggaattacctgacagcgtcccacaggaatgcacggttaggatttacattgttcgaggcttagagctccagcccca

SEQ ID NO: 6022 - DNA, 201 bp, Homo sapiens
ccccaccatgccgggacatcgttatcgaaatggaagacaccaaaccattactggcttctaaggaggaagaaatcgtggactggtggagtaaattttatgcytcctcaggggaacatgaaaaatgcggacagtatattcagaaaggctattccaagctcaagatatataattgtgaactagaaaatgtagcagaatttgagg

SEQ ID NO: 6023 - DNA, 201 bp, Homo sapiens
acaaagcctgcggggatgttcttgtaactgcagagctgattctgaggggcaaggatggctccaaccttcccattcttccccctcaaagggcgccaaatctrtacatggtcccccaggggatcaggcctgtggtccagctcactgccattgagattctagcttggggcttaagaaatatgaaaaacttccagatggcttcta

SEQ ID NO: 6024 - DNA, 201 bp, Homo sapiens
ggaaccccaaacagttctacagaatccacccaaagttatcatggaactttttgacaatgaccaagtgggcaaagatgaatttttaggacgaagcattttcwctcctgtggtgaaactgaactcagaaatggacatcacacccaaacttctctggcacccagtaatgaatggagacaaagcctgcggggatgttcttgtaac

SEQ ID NO: 6025 - DNA, 201 bp, Homo sapiens
cggggcccctgaagagcggcttgctcttcacatcctcaggactcaggggctggtccctgagcacgtggaaacaaggactttgcacagcaccttccagcccracatttcccagggaaaacttcagatgtgggtggatgttttccccaagagtttggggccaccaggccctcctttcaacatcacaccccggaaagccaagaa

SEQ ID NO: 6026 - DNA, 201 bp, Homo sapiens; identical to SEQ ID NO: 6003

SEQ ID NO: 6027 - DNA, 153 bp, Homo sapiens
actgggagagaacttctctcccagggcggtgcgacccggagctccagcgccckagtctccacttcgtttgctgaaacttgctttctaccagctaagaaccatgctgcgagtgattgtggaatctgccagcaatatccctaaaacgaaatttgg

SEQ ID NO: 6028 - DNA, 201 bp, Homo sapiens; identical to SEQ ID NO: 6002

SEQ ID NO: 6029 - DNA, 201 bp, Homo sapiens; identical to SEQ ID NO: 6005

SEQ ID NO: 6030 - DNA, 201 bp, Homo sapiens; identical to SEQ ID NO: 6006

SEQ ID NO: 6031 - DNA, 201 bp, Homo sapiens; identical to SEQ ID NO: 6007

SEQ ID NO: 6032 - DNA, 166 bp, Homo sapiens
actgggagagaacttctctcccagggcggtgcgacccggagctccagcgcccgagtctccacttcktttgctgaaacttgctttctaccagctaagaaccatgctgcgagtgattgtggaatctgccagcaatatccctaaaacgaaatttggcaagccggatcct

SEQ ID NO: 6033 - DNA, 201 bp, Homo sapiens; identical to SEQ ID NO: 6009

SEQ ID NO: 6034 - DNA, 201 bp, Homo sapiens; identical to SEQ ID NO: 6010

SEQ ID NO: 6035 - DNA, 201 bp, Homo sapiens; identical to SEQ ID NO: 6011

SEQ ID NO: 6036 - DNA, 201 bp, Homo sapiens
tcaggggctggtccctgagcacgtggaaacaaggactttgcacagcaccttccagcccaacattatactacctgcgtgtgatcatctggaacaccaaggaygttatcttggacgagaaaagcatcacaggagaggaaatgagtgacatctacgtcaaaggctggattcctggcaatgaagaaaacaaacagaaaacagatg

SEQ ID NO: 6037 - DNA, 201 bp, Homo sapiens; identical to SEQ ID NO: 6014

SEQ ID NO: 6038 - DNA, 201 bp, Homo sapiens
ctgcctctggtggggaagtggaagtaaacacaggagaaacagaggtaggctttgttccaacgtttggaccttgttacctgaatctttatggaagccccagrgagtacacgggattcccagacccctatgatgagctgaatactggaaagggggaaggagttgcctacagaggcaggatcttggttgaattagccacttttc

SEQ ID NO: 6039 - DNA, 201 bp, Homo sapiens
ccctgagcacgtggaaacaaggactttgcacagcaccttccagcccaacattatactacctgcgtgtgatcatctggaacaccaaggacgttatcttggaygagaaaagcatcacaggagaggaaatgagtgacatctacgtcaaaggctggattcctggcaatgaagaaaacaaacagaaaacagatgtccattacagat

SEQ ID NO: 6040 - DNA, 201 bp, Homo sapiens; identical to SEQ ID NO: 6017

SEQ ID NO: 6041 - DNA, 201 bp, Homo sapiens
tgtttctgtcatttttaagggttccatgagccagatccgaattgaggctggagtgagtgcctgtgagccaggggtggccattctgccctaagttccatgcrgacagccaggctgtgaagctgaatctagctgagattagactacacagacctctgagaccaatttcaactctgagacttgatgattcttccaaacagtcct

SEQ ID NO: 6042 - DNA, 201 bp, Homo sapiens; identical to SEQ ID NO: 6018

SEQ ID NO: 6043 - DNA, 201 bp, Homo sapiens; identical to SEQ ID NO: 6019

SEQ ID NO: 6044 - DNA, 201 bp, Homo sapiens; identical to SEQ ID NO: 6020

SEQ ID NO: 6045 - DNA, 201 bp, Homo sapiens; identical to SEQ ID NO: 6021

SEQ ID NO: 6046 - DNA, 201 bp, Homo sapiens
gcagtatgtcaacagcactcagcaaaatggcttctccagcgacagtgcatctgacagaaaaggaggaagaaatcgtggactggtggagtaaattttatgcytcctcaggggaacatgaaaaatgcggacagtatattcagaaaggctattccaagctcaagatatataattgtgaactagaaaatgtagcagaatttgagg

SEQ ID NO: 6047 - DNA, 201 bp, Homo sapiens; identical to SEQ ID NO: 6023

SEQ ID NO: 6048 - DNA, 201 bp, Homo sapiens; identical to SEQ ID NO: 6024

SEQ ID NO: 6049 - DNA, 201 bp, Homo sapiens
cggggcccctgaagagcggcttgctcttcacatcctcaggactcaggggctggtccctgagcacgtggaaacaaggactttgcacagcaccttccagcccracattatactacctgcgtgtgatcatctggaacaccaaggacgttatcttggacgagaaaagcatcacaggagaggaaatgagtgacatctacgtcaaag

SEQ ID NO: 6050 - DNA, 201 bp, Homo sapiens
aaactacattagaaaaattaaagggagaaattgcacacttaaagacatcagtggatgaaatcacaagtgggaaaggaaagctgactgataaagagagacasagacttttggagaaaattcgagtccttgaggctgagaaggagaagaatgcttatcaactcacagagaaggacaaagaaatacagcgactgagagaccaac

SEQ ID NO: 6051 - DNA, 201 bp, Homo sapiens
tatgtaaaaggacttttagcaaagatctttgagttggaaaagaaaacggaaacagctgctcattcactcccacagcagacaaaaaagcctgaatcagaagrttatcttcaagaagagaagcagaaatgttacaacgatctcttggcaagtgcaaaaaaagatcttgaggttgaacgacaaaccataactcagctgagtttt

SEQ ID NO: 6052 - DNA, 201 bp, Homo sapiens
tacattagaaaaattaaagggagaaattgcacacttaaagacatcagtggatgaaatcacaagtgggaaaggaaagctgactgataaagagagacacagayttttggagaaaattcgagtccttgaggctgagaaggagaagaatgcttatcaactcacagagaaggacaaagaaatacagcgactgagagaccaactgaa

SEQ ID NO: 6053 - DNA, 201 bp, Homo sapiens
ctttgagttggaaaagaaaacggaaacagctgctcattcactcccacagcagacaaaaaagcctgaatcagaaggttatcttcaagaagagaagcagaaaygttacaacgatctcttggcaagtgcaaaaaaagatcttgaggttgaacgacaaaccataactcagctgagttttgaactgagtgaatttcgaagaaaata

SEQ ID NO: 6054 - DNA, 201 bp, Homo sapiens
aattgctgaacttgaaagcaaaaccaatacactccgtttatcacagactgtggctccaaactgcttcaactcatcaataaataatattcatgaaatggaartacagctgaaagatgctctggagaaaaatcagcagtggctcgtgtatgatcagcagcgggaagtctatgtaaaaggacttttagcaaagatctttgagtt

SEQ ID NO: 6055 - DNA, 201 bp, Homo sapiens
tccttgaggctgagaaggagaagaatgcttatcaactcacagagaaggacaaagaaatacagcgactgagagaccaactgaaggccagatatagtactacygcattgcttgaacagctggaagagacaacgagagaaggagaaaggagggagcaggtgttgaaagccttatctgaagagaaagacgtattgaaacaacagt

SEQ ID NO: 6056 - DNA, 201 bp, Homo sapiens
aacagctgctcattcactcccacagcagacaaaaaagcctgaatcagaaggttatcttcaagaagagaagcagaaatgttacaacgatctcttggcaagtscaaaaaaagatcttgaggttgaacgacaaaccataactcagctgagttttgaactgagtgaatttcgaagaaaatatgaagaaacccaaaaagaagttca

SEQ ID NO: 6057 - DNA, 201 bp, Homo sapiens
gaacaaacaagggtagctctgttggaacaacagatgcaggcatgtactttagactttgaaaatgaaaaactcgaccgtcaacatgtgcagcatcaattgcwtgtaattcttaaggagctccgaaaagcaagaaatcaaataacacagttggaatccttgaaacagcttcatgagtttgccatcacagagccattagtcact

SEQ ID NO: 6058 - DNA, 201 bp, Homo sapiens
ggaggagccgaaaaagctgctgaagattcaggaggtggtgatgacaaaaagtccaaaacatgtttaatgttgtaatattatctaactggtctaaacttcaratatcattttacctttgaagaaaaccagaaaacattcaaaagaacttcaacaaatcatcacgtaacaggatcttcagaaaaactaccctgtgactatgaa

SEQ ID NO: 6059 - DNA, 201 bp, Homo sapiens
ataaatgtggtggagaaattcaaagtacctgtagaggttcttaccagatggatgtacactgtgaggaaagggtaccgagctgtcacttaccacaattggcrgcatgggttcaacgtggggcagaccatgtttactttgctgatgacaggaagattaaagaagtactacacagatctcgaagcctttgccatgcttgctgct

SEQ ID NO: 6060 - DNA, 201 bp, Homo sapiens
tgattccgacgcctcctgcagaccactggacactcattagtgggttgccaacatatgttgctgaaaatggatttatctgtaacatgatgaatgcccctgcrgatgaatacttcacatttcagaaaggacctgtagacgaaactggttgggtcattaagaatgttttgtccctgcctattgtcaacaagaaagaagatattg

SEQ ID NO: 6061 - DNA, 201 bp, Homo sapiens
tgtgcttggagctgctgtggaccgtgcaggaggaggggggcaccccagagcagggggttcacagggccctgcagaggctggcccacctgctccaggctgaycgctgcagcatgttcctgtgccggtcccggaacggcatacctgaggtggcctctaggttgctggatgtcacccccacctccaagtttgaggacaacctgg

SEQ ID NO: 6062 - DNA, 201 bp, Homo sapiens
ctgagctgacccaggtggaggagtcagccctgtgcttggagctgctgtggaccgtgcaggaggaggggggcaccccagagcagggggttcacagggccctrcagaggctggcccacctgctccaggctgaccgctgcagcatgttcctgtgccggtcccggaacggcatacctgaggtggcctctaggttgctggatgtca

SEQ ID NO: 6063 - DNA, 201 bp, Homo sapiens
atcccgaagaagccagatccttatgtggtcagccaataaagtatttgaagaactcacagatgttgagcgacagtttcacaaagcgctctacacggttagawcatatctgaactgtgaacgatactccattggactgctggacatgaccaaggagaaggaattctacgatgaatggccaatcaagcttggagaagtagagcc

SEQ ID NO: 6064 - DNA, 201 bp, Homo sapiens
aatttcttggatggtctcttttaaatactgacacctacgataagatgaataagctagaaaacagaaaggacattgctcaggaaatgctcatgaaccaaacsaaagccactcctgaagaaattaagtccattttgaaatttcaagagaagttaaatgttgatgtaattgacgactgtgaagaaaaacaacttgttgcaattt

SEQ ID NO: 6065 - DNA, 201 bp, Homo sapiens
gaaatcttcaagaacagccaggtgccagtccagtccagcatgtccttctctgagctgacccaggtggaggagtcagccctgtgcttggagctgctgtggaycgtgcaggaggaggggggcaccccagagcagggggttcacagggccctgcagaggctggcccacctgctccaggctgaccgctgcagcatgttcctgtgc

SEQ ID NO: 6066 - DNA, 201 bp, Homo sapiens; identical to SEQ ID NO: 6058

SEQ ID NO: 6067 - DNA, 201 bp, Homo sapiens
ataaatgtggtggagaaattcaaagtacctgtagaggttcttaccagatggatgtacactgtgaggaaagggtaccgagctgtcacttaccacaattggcrgcatgggttcaacgtggggcagaccatgtttactttgctgatggtaggaagattaaagaagtactacacagatctcgaagcctttgccatgcttgctgct

SEQ ID NO: 6068 - DNA, 201 bp, Homo sapiens; identical to SEQ ID NO: 6060

SEQ ID NO: 6069 - DNA, 201 bp, Homo sapiens; identical to SEQ ID NO: 6061

SEQ ID NO: 6070 - DNA, 201 bp, Homo sapiens; identical to SEQ ID NO: 6062

SEQ ID NO: 6071 - DNA, 201 bp, Homo sapiens; identical to SEQ ID NO: 6063

SEQ ID NO: 6072 - DNA, 201 bp, Homo sapiens; identical to SEQ ID NO: 6064

SEQ ID NO: 6073 - DNA, 201 bp, Homo sapiens; identical to SEQ ID NO: 6065

SEQ ID NO: 6074 - DNA, 201 bp, Homo sapiens
actgataaccccacgactgatgagaaaactaccaaaaaaatactctgcaaatctccgcaatcagacccagcggacaccccaacaaacacaaagcaacggcycaagagaagcctcaagaaagcagacgtagaggaagaatttttagcattcaggaaactaacaccatcagcaggcaaagccatgcacacgcctaaagcagca

SEQ ID NO: 6075 - DNA, 201 bp, Homo sapiens
agctgagaactcctaagggaaagtctgaagtccctgaagacctggccggcttcatcgagctcttccagacaccaagtcacactaaggaatcaatgactaaygaaaaaactaccaaagtatcctacagagcttcacagccagacctagtggacaccccaacaagctccaagccacagcccaagagaagtctcaggaaagcag

SEQ ID NO: 6076 - DNA, 201 bp, Homo sapiens
gacatgaaaaccaacaaagaggaacacaaattacaagactcggtccctgaaaataagggaatatccctgcgctccagacgccaaaataagactgaggcagracagcaaataactgaggtctttgtattagcagaaagaatagaaataaacagaaatgaaaagaagcccatgaagacctccccagagatggacattcagaat

SEQ ID NO: 6077 - DNA, 201 bp, Homo sapiens
gacaaagaaccagcaggtgaagataaaggcatcaaagcattgaaggaatctgcaaaacagacaccggctccagcagcaagtgtaactggcagcaggagacrgccaagagcacccagggaaagtgcccaagccatagaagacctagctggcttcaaagacccagcagcaggtcacactgaagaatcaatgactgatgacaaa

SEQ ID NO: 6078 - DNA, 201 bp, Homo sapiens
acaaagcaacggcccaagagaagcctcaggaaagcagacgtagaggaagaatttttagcactcaggaaacgaacaccatcagcaggcaaagccatggacasaccaaaaccagcagtaagtgatgagaaaaatatcaacacatttgtggaaactccagtgcagaaactggacctgctaggaaatttacctggcagcaagaga

SEQ ID NO: 6079 - DNA, 201 bp, Homo sapiens
gaaacaaacgccatcagcaggcaaagccatgcacacacccaaaccagcagtaggtgaagagaaagacatcaacacgtttttgggaactccagtgcagaaastggaccagccaggaaatttacctggcagcaatagacggctacaaactcgtaaggaaaaggcccaggctctagaagaactgactggcttcagagagctttt

SEQ ID NO: 6080 - DNA, 201 bp, Homo sapiens
gacaccaggtccctctgaggaatcaatgactgatgagaaaactaccaaaatagcctgcaaatctccaccaccagaatcagtggacactccaacaagcacaragcaatggcctaagagaagtctcaggaaagcagatgtagaggaagaattcttagcactcaggaaactaacaccatcagcagggaaagccatgcttacgcc

SEQ ID NO: 6081 - DNA, 201 bp, Homo sapiens
gaagaactgactggcttcagagagcttttccagacaccatgcactgataaccccacgactgatgagaaaactaccaaaaaaatactctgcaaatctccgcwatcagacccagcggacaccccaacaaacacaaagcaacggcccaagagaagcctcaagaaagcagacgtagaggaagaatttttagcattcaggaaacta

SEQ ID NO: 6082 - DNA, 201 bp, Homo sapiens
gagtcaatgactattgacaaaaacacaaaaattccctgcaaatctcccccaccagaactaacagacactgccacgagcacaaagagatgccccaagacacrtcccaggaaagaagtaaaagaggagctctcagcagttgagaggctcacgcaaacatcagggcaaagcacacacacacacaaagaaccagcaagcggtgat

SEQ ID NO: 6083 - DNA, 201 bp, Homo sapiens
acgtagaagaagaattcttcgcactcaggaaacgaacaccatcagcaggcaaagccatgcacacacccaaaccagcagtaagtggtgagaaaaacatctaygcatttatgggaactccagtgcagaaactggacctgacagagaacttaactggcagcaagagacggctacaaactcctaaggaaaaggcccaggctctag

SEQ ID NO: 6084 - DNA, 201 bp, Homo sapiens
tcaatgactattgacaaaaacacaaaaattccctgcaaatctcccccaccagaactaacagacactgccacgagcacaaagagatgccccaagacacgtcycaggaaagaagtaaaagaggagctctcagcagttgagaggctcacgcaaacatcagggcaaagcacacacacacacaaagaaccagcaagcggtgatgag

SEQ ID NO: 6085 - DNA, 201 bp, Homo sapiens
cagacttgtagatataactcgttcatcttcatttactttccactttgccccctgtcctctctgtgttccccaaatcagagaatagcccgccatcccccagrtcacctgtctggattcctccccattcacccaccttgccaggtgcaggtgaggatggtgcaccagacagggtagctgtcccccaaaatgtgccctgtgcgg

SEQ ID NO: 6086 - DNA, 201 bp, Homo sapiens
tgaaacatcaggtcacactcaggaatcactgactgctggcaaagccactaaaataccctgcgaatctcccccactagaagtggtagacaccacagcaagcmcaaagaggcatctcaggacacgtgtgcagaaggtacaagtaaaagaagagccttcagcagtcaagttcacacaaacatcaggggaaaccacggatgcaga

SEQ ID NO: 6087 - DNA, 201 bp, Homo sapiens
cgtgtgcagaaggtacaagtaaaagaagagccttcagcagtcaagttcacacaaacatcaggggaaaccacggatgcagacaaagaaccagcaggtgaagrtaaaggcatcaaagcattgaaggaatctgcaaaacagacaccggctccagcagcaagtgtaactggcagcaggagacggccaagagcacccagggaaagt

SEQ ID NO: 6088 - DNA, 201 bp, Homo sapiens
ggaacacaaattacaagactcggtccctgaaaataagggaatatccctgcgctccagacgccaaaataagactgaggcagaacagcaaataactgaggtcwttgtattagcagaaagaatagaaataaacagaaatgaaaagaagcccatgaagacctccccagagatggacattcagaatccagatgatggagcccggaa

SEQ ID NO: 6089 - DNA, 201 bp, Homo sapiens
agagccgggcgcccggggacgtagcctgtagggccaccgggtccccgtcagaggcggcggcgggagcagcggggactgcaggccggggtgcagcgaacgckaccccgcgggctgcggcccggtgtgtgcggagcgtggcgggcgcagcttaccgggcggaggtgagcgcggcgccggctcctcctgcggcggactttgggt

SEQ ID NO: 6090 - DNA, 201 bp, Homo sapiens
ataaacagaaatgaaaagaagcccatgaagacctccccagagatggacattcagaatccagatgatggagcccggaaacccatacctagagacaaagtcastgagaacaaaaggtgcttgaggtctgctagacagaatgagagctcccagcctaaggtggcagaggagagcggagggcagaagagtgcgaaggttctcatg

SEQ ID NO: 6091 - DNA, 201 bp, Homo sapiens
gcagaatcagaaagggaaaggagaagcaggaaattcagactccatgtgcctgagatcaagaaagacaaaaagccagcctgcagcaagcactttggagagcraatctgtgcagagagtaacgcggagtgtcaagagatgtgcagaaaatccaaagaaggctgaggacaatgtgtgtgtcaagaaaataagaaccagaagtca

SEQ ID NO: 6092 - DNA, 201 bp, Homo sapiens
ttcttacactaactctgtacctaccatctcctgcctcccttaggcaggcacctccaaccaccacacactccctgctgttttccctgcctggaactttcccwcctgccccaccaagatcatttcatccagtcctgagctcagcttaagggaggcttcttgcctgtgggttccctcacccccatgcctgtcctccaggctggg

SEQ ID NO: 6093 - DNA, 201 bp, Homo sapiens
aacaacattgcaaaattgaaatccatgagcaggaggcaatattacataatttcagttccacaaatccaacacaagtaaatgggtctgttattgatgagccwgtacggctaaaacatggagatgtaataactattattgatcgttccttcaggtatgaaaatgaaagtcttcagagtggaaggaagtcaactgaatttccaa

SEQ ID NO: 6094 - DNA, 201 bp, Homo sapiens
ttacactaactctgtacctaccatctcctgcctcccttaggcaggcacctccaaccaccacacactccctgctgttttccctgcctggaactttccctccwgccccaccaagatcatttcatccagtcctgagctcagcttaagggaggcttcttgcctgtgggttccctcacccccatgcctgtcctccaggctggggca

SEQ ID NO: 6095 - DNA, 201 bp, Homo sapiens
gtcctgcaaaacagcccctgcttccagcagcaaatctcagacagaggttcctaagagaggagggagaaagagtggcaacctgccttcaaagagagtgtctmtcagccgaagtcaacatgatattttacagatgatatgttccaaaagaagaagtggtgcttcggaagcaaatctgattgttgcaaaatcatgggcagatgt

SEQ ID NO: 6096 - DNA, 201 bp, Homo sapiens
tcaagaaagacaaaaagccagcctgcagcaagcactttggagagcgaatctgtgcagagagtaacgcggagtgtcaagagatgtgcagaaaatccaaagarggctgaggacaatgtgtgtgtcaagaaaataagaaccagaagtcatagggacagtgaagatatttgacagaaaaatcgaactgggaaaaatataataaag

SEQ ID NO: 6097 - DNA, 201 bp, Homo sapiens
gcctaaggtggcagaggagagcggagggcagaagagtgcgaaggttctcatgcagaatcagaaagggaaaggagaagcaggaaattcagactccatgtgcytgagatcaagaaagacaaaaagccagcctgcagcaagcactttggagagcgaatctgtgcagagagtaacgcggagtgtcaagagatgtgcagaaaatcc

SEQ ID NO: 6098 - DNA, 201 bp, Homo sapiens
gcatcaaagcgtttaaggaatctgcaaagcagatgctggacccagcaaactatggaactgggatggagaggtggccaagaacacctaaggaagaggcccartcactagaagacctggccggcttcaaagagctcttccagacaccagaccacactgaggaatcaacaactgatgacaaaactaccaaaatagcctgcaaat

SEQ ID NO: 6099 - DNA, 201 bp, Homo sapiens
gataaaggcatcaaagcattgaaggaatctgcaaaacagacaccggctccagcagcaagtgtaactggcagcaggagacggccaagagcacccagggaaartgcccaagccatagaagacctagctggcttcaaagacccagcagcaggtcacactgaagaatcaatgactgatgacaaaaccactaaaataccctgcaaa

SEQ ID NO: 6100 - DNA, 201 bp, Homo sapiens
gctggctttaaagagctcttccagacacgaggtcacactgaggaatcaatgactaacgataaaactgccaaagtagcctgcaaatcttcacaaccagaccyagacaaaaacccagcaagctccaagcgacggctcaagacatccctggggaaagtgggcgtgaaagaagagctcctagcagttggcaagctcacacagaca

SEQ ID NO: 6101 - DNA, 201 bp, Homo sapiens
aaggcatccctggggaaagtaggtgtgaaagaagagctcctagcagtcggcaagttcacacggacgtcaggggagaccacgcacacgcacagagagccagyaggagatggcaagagcatcagaacgtttaaggagtctccaaagcagatcctggacccagcagcccgtgtaactggaatgaagaagtggccaagaacgcct

SEQ ID NO: 6102 - DNA, 201 bp, Homo sapiens
aagcaatgaagagatcaagaacttgggggcagaaatgtgcaccaatgtctgacctgacagacctcaagagcttgcctgatacagaactcatgaaagacacrgcacgtggccagaatctcctccaaacccaagatcatgccaaggcaccaaagagtgagaaaggcaaaatcactaaaatgccctgccagtcattacaaccag

SEQ ID NO: 6103 - DNA, 201 bp, Homo sapiens
aaggcatcaaagcattgaaggaatctgcaaaacagacaccggctccagcagcaagtgtaactggcagcaggagacggccaagagcacccagggaaagtgcycaagccatagaagacctagctggcttcaaagacccagcagcaggtcacactgaagaatcaatgactgatgacaaaaccactaaaataccctgcaaatcat

SEQ ID NO: 6104 - DNA, 201 bp, Homo sapiens
ggaaacgtagcaaaaacgcccaggaacacctacaaaatgacttctctggagacaaaaacttcagatactgagacagagccttcaaaaacagtatccactgyaaacaggtcaggaaggtctacagagttcaggaatatacagaagctacctgtggaaagtaagagtgaagaaacaaatacagaaattgttgagtgcatccta

SEQ ID NO: 6105 - DNA, 201 bp, Homo sapiens
tcacaaccagacccagtggacacaccaacaagctccaagccacagtccaagagaagtctcaggaaagtggacgtagaagaagaattcttcgcactcaggawacgaacaccatcagcaggcaaagccatgcacacacccaaaccagcagtaagtggtgagaaaaacatctacgcatttatgggaactccagtgcagaaactg

SEQ ID NO: 6106 - DNA, 201 bp, Homo sapiens
catttaagcaacctgcaaagcggaagctggacgcagaagatgtaattggcagcaggagacagccaagagcacctaaggaaaaggcccaacccctggaagayctggccagcttccaagagctctctcaaacaccaggccacactgaggaactggcaaatggtgctgctgatagctttacaagcgctccaaagcaaacacctg

SEQ ID NO: 6107 - DNA, 201 bp, Homo sapiens
cagcaggaggtgatgagaaagacattaaagcatttatgggaactccagtgcagaaactggacctggcaggaactttacctggcagcaaaagacagctacaractcctaaggaaaaggcccaggctctagaagacctggctggctttaaagagctcttccagactcctggtcacaccgaggaattagtggctgctggtaaaa

SEQ ID NO: 6108 - DNA, 201 bp, Homo sapiens
gcagatcacaaccagacccagtggacacaccaacaagctccaagccacagtccaagagaagtctcaggaaagtggacgtagaagaagaattcttcgcactyaggaaacgaacaccatcagcaggcaaagccatgcacacacccaaaccagcagtaagtggtgagaaaaacatctacgcatttatgggaactccagtgcaga

SEQ ID NO: 6109 - DNA, 201 bp, Homo sapiens
cctaaggaaaaggcccaggctctagaagacctggctggctttaaagagctcttccagactcctggtcacaccgaggaattagtggctgctggtaaaaccaytaaaataccctgcgactctccacagtcagacccagtggacaccccaacaagcacaaagcaacgacccaagagaagtatcaggaaagcagatgtagaggga

SEQ ID NO: 6110 - DNA, 201 bp, Homo sapiens
aaggcccaacccctagaagacctggctggcttgaaagagctcttccagacaccagtatgcactgacaagcccacgactcacgagaaaactaccaaaatagmctgcagatcacaaccagacccagtggacacaccaacaagctccaagccacagtccaagagaagtctcaggaaagtggacgtagaagaagaattcttcgca

SEQ ID NO: 6111 - DNA, 201 bp, Homo sapiens
agagaagtttgaggacttctgcaaaaagaattgaacctgcggaagagctgaacagcaacgacatgaaaaccaacaaagaggaacacaaattacaagactcrgtccctgaaaataagggaatatccctgcgctccagacgccaaaataagactgaggcagaacagcaaataactgaggtctttgtattagcagaaagaatag

SEQ ID NO: 6112 - DNA, 201 bp, Homo sapiens
agagctgaacagcaacgacatgaaaaccaacaaagaggaacacaaattacaagactcggtccctgaaaataagggaatatccctgcgctccagacgccaarataagactgaggcagaacagcaaataactgaggtctttgtattagcagaaagaatagaaataaacagaaatgaaaagaagcccatgaagacctccccaga

SEQ ID NO: 6113 - DNA, 201 bp, Homo sapiens
ttgtgataagttctagtgcagtttttgtcataaattacaagtgaattctgtaagtaaggctgtcagtctgcttaagggaagaaaactttggatttgctggstctgaatcggcttcataaactccactgggagcactgctgggctcctggactgagaatagttgaacaccgggggctttgtgaaggagtctgggccaaggtt

SEQ ID NO: 6114 - DNA, 201 bp, Homo sapiens
tgaaagaagagctcctagcagtcggcaagttcacacggacgtcaggggagaccacgcacacgcacagagagccagcaggagatggcaagagcatcagaacrtttaaggagtctccaaagcagatcctggacccagcagcccgtgtaactggaatgaagaagtggccaagaacgcctaaggaagaggcccagtcactagaag

SEQ ID NO: 6115 - DNA, 201 bp, Homo sapiens
actgcaaaacagaaactggacccagcagcaagtgtaactggtagcaagaggcacccaaaaactaaggaaaaggcccaacccctagaagacctggctggctkgaaagagctcttccagacaccagtatgcactgacaagcccacgactcacgagaaaactaccaaaatagcctgcagatcacaaccagacccagtggacaca

SEQ ID NO: 6116 - DNA, 201 bp, Homo sapiens
cagactccatgtgcctgagatcaagaaagacaaaaagccagcctgcagcaagcactttggagagcgaatctgtgcagagagtaacgcggagtgtcaagagrtgtgcagaaaatccaaagaaggctgaggacaatgtgtgtgtcaagaaaataagaaccagaagtcatagggacagtgaagatatttgacagaaaaatcgaa

SEQ ID NO: 6117 - DNA, 201 bp, Homo sapiens
caatagacggctacaaactcgtaaggaaaaggcccaggctctagaagaactgactggcttcagagagcttttccagacaccatgcactgataaccccacgrctgatgagaaaactaccaaaaaaatactctgcaaatctccgcaatcagacccagcggacaccccaacaaacacaaagcaacggcccaagagaagcctcaa

SEQ ID NO: 6118 - DNA, 201 bp, Homo sapiens
agcaagtgtaactggtagcaagaggcagccaagaactcctaagggaaaagcccaacccctagaagacttggctggcttgaaagagctcttccagacaccartatgcactgacaagcccacgactcatgagaaaactaccaaaatagcctgcagatctccacaaccagacccagtgggtaccccaacaatcttcaagccaca

SEQ ID NO: 6119 - DNA, 201 bp, Homo sapiens
ctgggggagggagagatctgacaaatactgcccattcccctaggctgactggatttgagaacaaatacccacccatttccaccatggtatggtaacttctstgagcttcagtttccaagtgaatttccatgtaataggacattcccattaaatacaagctgtttttactttttcgcctcccagggcctgtgggatctggtc

SEQ ID NO: 6120 - DNA, 201 bp, Homo sapiens
caaagcaacggcccaagagaagcctcaggaaagcagacgtagaggaagaatttttagcactcaggaaacgaacaccatcagcaggcaaagccatggacacmccaaaaccagcagtaagtgatgagaaaaatatcaacacatttgtggaaactccagtgcagaaactggacctgctaggaaatttacctggcagcaagagac

SEQ ID NO: 6121 - DNA, 201 bp, Homo sapiens
gaagaggcccaatcactagaagacctggccggcttcaaagagctcttccagacaccagaccacactgaggaatcaacaactgatgacaaaactaccaaaayagcctgcaaatctccaccaccagaatcaatggacactccaacaagcacaaggaggcggcccaaaacacctttggggaaaagggatatagtggaagagctc

SEQ ID NO: 6122 - DNA, 201 bp, Homo sapiens
ctggcagcaagagacggccacaaactcctaaagaaaaggccaaggctctagaagatctggctggcttcaaagagctcttccagacaccaggtcacactgasgaatcaatgaccgatgacaaaatcacagaagtatcctgcaaatctccacaaccagacccagtcaaaaccccaacaagctccaagcaacgactcaagatat

SEQ ID NO: 6123 - DNA, 201 bp, Homo sapiens
gagagacagcaggagatggaaagagcatcaaagcgtttaaggaatctgcaaagcagatgctggacccagcaaactatggaactgggatggagaggtggccragaacacctaaggaagaggcccaatcactagaagacctggccggcttcaaagagctcttccagacaccagaccacactgaggaatcaacaactgatgaca

SEQ ID NO: 6124 - DNA, 201 bp, Homo sapiens
gtaaatgggtctgttattgatgagcctgtacggctaaaacatggagatgtaataactattattgatcgttccttcaggtatgaaaatgaaagtcttcagartggaaggaagtcaactgaatttccaagaaaaatacgtgaacaggagccagcacgtcgtgtctcaagatctagcttctcttctgaccctgatgagagtgac

SEQ ID NO: 6125 - DNA, 201 bp, Homo sapiens
agaaactggacctgctaggaaatttacctggcagcaagagacggccacaaactcctaaagaaaaggccaaggctctagaagatctggctggcttcaaagarctcttccagacaccaggtcacactgaggaatcaatgaccgatgacaaaatcacagaagtatcctgcaaatctccacaaccagacccagtcaaaaccccaa

SEQ ID NO: 6126 - DNA, 201 bp, Homo sapiens
gctccccacctcagagagttttggaggaaatgtgttcttcagtgcacagaatgcagcaaaacagccatctgataaatgctctgcaagccctcccttaagayggcagtgtattagagaaaatggaaacgtagcaaaaacgcccaggaacacctacaaaatgacttctctggagacaaaaacttcagatactgagacagagcc

SEQ ID NO: 6127 - DNA, 201 bp, Homo sapiens
tcgtttgtttgcctatgtcctccagggcacggtggcaggaacaactatcctcgtctgtcccaacactgagcaggcactcggtaaacacgaatgaatggatragcgcacggatgaatggagcttacaagatctgtctttccaatggccgggggcatttggtccccaaattaaggctattggacatctgcacaggacagtcct

SEQ ID NO: 6128 - DNA, 201 bp, Homo sapiens
atcaaagcattgaaggaatctgcaaaacagacaccggctccagcagcaagtgtaactggcagcaggagacggccaagagcacccagggaaagtgcccaagycatagaagacctagctggcttcaaagacccagcagcaggtcacactgaagaatcaatgactgatgacaaaaccactaaaataccctgcaaatcatcacca

SEQ ID NO: 6129 - DNA, 201 bp, Homo sapiens
aggctctagaagacctggctggctttaaagagctcttccagactcctggtcacaccgaggaattagtggctgctggtaaaaccactaaaataccctgcgahtctccacagtcagacccagtggacaccccaacaagcacaaagcaacgacccaagagaagtatcaggaaagcagatgtagagggagaactcttagcgtgca

SEQ ID NO: 6130 - DNA, 201 bp, Homo sapiens
tggattcctccccattcacccaccttgccaggtgcaggtgaggatggtgcaccagacagggtagctgtcccccaaaatgtgccctgtgcgggcagtgcccygtctccacgtttgtttccccagtgtctggcggggagccaggtgacatcataaatacttgctgaatgaatgcagaaatcagcggtactgacttgtactata

SEQ ID NO: 6131 - DNA, 201 bp, Homo sapiens
gacccaagagaagtatcaggaaagcagatgtagagggagaactcttagcgtgcaggaatctaatgccatcagcaggcaaagccatgcacacgcctaaaccrtcagtaggtgaagagaaagacatcatcatatttgtgggaactccagtgcagaaactggacctgacagagaacttaaccggcagcaagagacggccacaaa

SEQ ID NO: 6132 - DNA, 201 bp, Homo sapiens
gcaagctcacacaaacctcaggggagaccacgcacaccgacaaagagccggtaggtgagggcaaaggcacgaaagcatttaagcaacctgcaaagcggaasctggacgcagaagatgtaattggcagcaggagacagccaagagcacctaaggaaaaggcccaacccctggaagatctggccagcttccaagagctctctc

SEQ ID NO: 6133 - DNA, 201 bp, Homo sapiens
gtaacttctctgagcttcagtttccaagtgaatttccatgtaataggacattcccattaaatacaagctgtttttactttttcgcctcccagggcctgtgsgatctggtcccccagcctctcttgggctttcttacactaactctgtacctaccatctcctgcctcccttaggcaggcacctccaaccaccacacactccc

SEQ ID NO: 6134 - DNA, 201 bp, Homo sapiens
actccagtgcagaaactggacctggcaggaactttacctggcagcaaaagacagctacagactcctaaggaaaaggcccaggctctagaagacctggctgkctttaaagagctcttccagactcctggtcacaccgaggaattagtggctgctggtaaaaccactaaaataccctgcgactctccacagtcagacccagtg

SEQ ID NO: 6135 - DNA, 201 bp, Homo sapiens
caaactcctaaggaaaaggcccaggctctagaagacctggctggcttcaaagagctcttccagacaccaggcactgacaagcccacgactgatgagaaaamtaccaaaatagcctgcaaatctccacaaccagacccagtggacaccccagcaagcacaaagcaacggcccaagagaagcctcaggaaagcagacgtagag

SEQ ID NO: 6136 - DNA, 176 bp, Homo sapiens
cctctttgtagcacgtagtgttgtggaaactaagccactaattgagtttctggctcccctcctggggttgtaagttttgttcattcatgagggccgactgyatttcctggttactgtatcccagtgaccagccacaggagatgtccaataaagtatgtgatgaaatggtcttaaaa

SEQ ID NO: 6137 - DNA, 161 bp, Homo sapiens
tagtgttgtggaaactaagccactaattgagtttctggctcccctcctggggttgtaagttttgttcattcatgagggccgactgtatttcctggttactstatcccagtgaccagccacaggagatgtccaataaagtatgtgatgaaatggtcttaaaa

SEQ ID NO: 6138 - DNA, 201 bp, Homo sapiens
actttggagagcgaatctgtgcagagagtaacgcggagtgtcaagagatgtgcagaaaatccaaagaaggctgaggacaatgtgtgtgtcaagaaaataasaaccagaagtcatagggacagtgaagatatttgacagaaaaatcgaactgggaaaaatataataaagttagttttgtgataagttctagtgcagtttttg

SEQ ID NO: 6139 - DNA, 201 bp, Homo sapiens
accgacaaagagccggtaggtgagggcaaaggcacgaaagcatttaagcaacctgcaaagcggaagctggacgcagaagatgtaattggcagcaggagacrgccaagagcacctaaggaaaaggcccaacccctggaagatctggccagcttccaagagctctctcaaacaccaggccacactgaggaactggcaaatggt

SEQ ID NO: 6140 - DNA, 201 bp, Homo sapiens
tgcagaatgaagccttgaggtctgtcaccacccacagccaccctacagcagccttaactgtgacacttgccacactgtgtcgtcgtttgtttgcctatgtyctccagggcacggtggcaggaacaactatcctcgtctgtcccaacactgagcaggcactcggtaaacacgaatgaatggatgagcgcacggatgaatgga

SEQ ID NO: 6141 - DNA, 201 bp, Homo sapiens
gcaacaagctcaaagagacggcccaggacacgtgcccagaaagtagaagtgaaggaggagctgttagcagttggcaagctcacacaaacctcaggggagascacgcacaccgacaaagagccggtaggtgagggcaaaggcacgaaagcatttaagcaacctgcaaagcggaagctggacgcagaagatgtaattggcagc

SEQ ID NO: 6142 - DNA, 201 bp, Homo sapiens
aaaatgccctgcgaatcttctccaccagaatcagcagacaccccaacaagcacaagaaggcagcccaagacacctttggagaaaagggacgtacagaaggwgctctcagccctgaagaagctcacacagacatcaggggaaaccacacacacagataaagtaccaggaggtgaggataaaagcatcaacgcgtttagggaa

SEQ ID NO: 6143 - DNA, 201 bp, Homo sapiens
gaagaatcaatgactgatgacaaaaccactaaaataccctgcaaatcatcaccagaactagaagacaccgcaacaagctcaaagagacggcccaggacacrtgcccagaaagtagaagtgaaggaggagctgttagcagttggcaagctcacacaaacctcaggggagaccacgcacaccgacaaagagccggtaggtgag

SEQ ID NO: 6144 - DNA, 201 bp, Homo sapiens
tgcactgataaccccacgactgatgagaaaactaccaaaaaaatactctgcaaatctccgcaatcagacccagcggacaccccaacaaacacaaagcaacrgcccaagagaagcctcaagaaagcagacgtagaggaagaatttttagcattcaggaaactaacaccatcagcaggcaaagccatgcacacgcctaaagca

SEQ ID NO: 6145 - DNA, 201 bp, Homo sapiens
cgcactcaggaaacgaacaccatcagcaggcaaagccatgcacacacccaaaccagcagtaagtggtgagaaaaacatctacgcatttatgggaactccartgcagaaactggacctgacagagaacttaactggcagcaagagacggctacaaactcctaaggaaaaggcccaggctctagaagacctggctggctttaa

SEQ ID NO: 6146 - DNA, 201 bp, Homo sapiens
agcagcaagtgtaactggtagcaagaggcagccaagaactcctaagggaaaagcccaacccctagaagacttggctggcttgaaagagctcttccagacascaatatgcactgacaagcccacgactcatgagaaaactaccaaaatagcctgcagatctccacaaccagacccagtgggtaccccaacaatcttcaagcc

SEQ ID NO: 6147 - DNA, 201 bp, Homo sapiens
caacacatttgtggggactccagtggagaaactggacctgctaggaaatttacctggcagcaagagacggccacaaactcctaaagaaaaggccaaggctmtagaagatctggctggcttcaaagagctcttccagacaccaggtcacactgaggaatcaatgaccgatgacaaaatcacagaagtatcctgcaaatctcc

SEQ ID NO: 6148 - DNA, 201 bp, Homo sapiens
caagctcacacaaacctcaggggagaccacgcacaccgacaaagagccggtaggtgagggcaaaggcacgaaagcatttaagcaacctgcaaagcggaagstggacgcagaagatgtaattggcagcaggagacagccaagagcacctaaggaaaaggcccaacccctggaagatctggccagcttccaagagctctctca

SEQ ID NO: 6149 - DNA, 201 bp, Homo sapiens
tgaaagaagagcccctagcagtcagcaagctcacacggacatcaggggagactacgcaaacacacacagagccaacaggagatagtaagagcatcaaagcrtttaaggagtctccaaagcagatcctggacccagcagcaagtgtaactggtagcaggaggcagctgagaactcgtaaggaaaaggcccgtgctctagaag

SEQ ID NO: 6150 - DNA, 201 bp, Homo sapiens
aagcccacgactgatgagaaaactaccaaaatagcctgcaaatctccacaaccagacccagtggacaccccagcaagcacaaagcaacggcccaagagaarcctcaggaaagcagacgtagaggaagaatttttagcactcaggaaacgaacaccatcagcaggcaaagccatggacacaccaaaaccagcagtaagtgat

SEQ ID NO: 6151 - DNA, 201 bp, Homo sapiens
ctggcttcaaagacccagcagcaggtcacactgaagaatcaatgactgatgacaaaaccactaaaataccctgcaaatcatcaccagaactagaagacacygcaacaagctcaaagagacggcccaggacacgtgcccagaaagtagaagtgaaggaggagctgttagcagttggcaagctcacacaaacctcaggggaga

SEQ ID NO: 6152 - DNA, 201 bp, Homo sapiens
gtggaaggaagtcaactgaatttccaagaaaaatacgtgaacaggagccagcacgtcgtgtctcaagatctagcttctcttctgaccctgatgagagtgasggaatacctttgaaaagaaggcgtgtgtcctttggtgggcacctaagacctgaactatttgatgaaaacttgcctcctaatacgcctctcaaaaggggag

SEQ ID NO: 6153 - DNA, 201 bp, Homo sapiens
ctctcagcagttgagaggctcacgcaaacatcagggcaaagcacacacacacacaaagaaccagcaagcggtgatgagggcatcaaagtattgaagcaacrtgcaaagaagaaaccaaacccagtagaagaggaacccagcaggagaaggccaagagcacctaaggaaaaggcccaacccctggaagacctggccggcttc

SEQ ID NO: 6154 - DNA, 201 bp, Homo sapiens
accagcaagcggtgatgagggcatcaaagtattgaagcaacgtgcaaagaagaaaccaaacccagtagaagaggaacccagcaggagaaggccaagagcayctaaggaaaaggcccaacccctggaagacctggccggcttcacagagctctctgaaacatcaggtcacactcaggaatcactgactgctggcaaagccac

SEQ ID NO: 6155 - DNA, 201 bp, Homo sapiens
gcaatagacggctacaaactcgtaaggaaaaggcccaggctctagaagaactgactggcttcagagagcttttccagacaccatgcactgataaccccacractgatgagaaaactaccaaaaaaatactctgcaaatctccgcaatcagacccagcggacaccccaacaaacacaaagcaacggcccaagagaagcctca

SEQ ID NO: 6156 - DNA, 201 bp, Homo sapiens
atgagggcatcaaagtattgaagcaacgtgcaaagaagaaaccaaacccagtagaagaggaacccagcaggagaaggccaagagcacctaaggaaaaggcycaacccctggaagacctggccggcttcacagagctctctgaaacatcaggtcacactcaggaatcactgactgctggcaaagccactaaaataccctgcg

SEQ ID NO: 6157 - DNA, 201 bp, Homo sapiens
gctggacgcagaagatgtaattggcagcaggagacagccaagagcacctaaggaaaaggcccaacccctggaagatctggccagcttccaagagctctctmaaacaccaggccacactgaggaactggcaaatggtgctgctgatagctttacaagcgctccaaagcaaacacctgacagtggaaaacctctaaaaatatc

SEQ ID NO: 6158 - DNA, 201 bp, Homo sapiens
atctgataaatgctctgcaagccctcccttaagacggcagtgtattagagaaaatggaaacgtagcaaaaacgcccaggaacacctacaaaatgacttctstggagacaaaaacttcagatactgagacagagccttcaaaaacagtatccactgcaaacaggtcaggaaggtctacagagttcaggaatatacagaagct

SEQ ID NO: 6159 - DNA, 201 bp, Homo sapiens
gtcattacaaccagaaccaataaacaccccaacacacacaaaacaacagttgaaggcatccctggggaaagtaggtgtgaaagaagagctcctagcagtcrgcaagttcacacggacgtcaggggagaccacgcacacgcacagagagccagcaggagatggcaagagcatcagaacgtttaaggagtctccaaagcagat

SEQ ID NO: 6160 - DNA, 201 bp, Homo sapiens
tggtccccaaattaaggctattggacatctgcacaggacagtcctatttttgatgtcctttcctttctgaaaataaagttttgtgctttggagaatgactygtgagcacatctttagggaccaagagtgactttctgtaaggagtgactcgtggcttgccttggtctcttgggaatacttttctaactagggttgctctca

SEQ ID NO: 6161 - DNA, 201 bp, Homo sapiens
agccaagaactcctaagggaaaagcccaacccctagaagacttggctggcttgaaagagctcttccagacaccaatatgcactgacaagcccacgactcaygagaaaactaccaaaatagcctgcagatctccacaaccagacccagtgggtaccccaacaatcttcaagccacagtccaagagaagtctcaggaaagcag

SEQ ID NO: 6162 - DNA, 201 bp, Homo sapiens
ggtttgccctcagctttgcagaatgaagccttgaggtctgtcaccacccacagccaccctacagcagccttaactgtgacacttgccacactgtgtcgtcrtttgtttgcctatgtcctccagggcacggtggcaggaacaactatcctcgtctgtcccaacactgagcaggcactcggtaaacacgaatgaatggatgag

SEQ ID NO: 6163 - DNA, 201 bp, Homo sapiens
atgcacactccacctgtcctgaagaaaatcatcaaggaacagcctcaaccatcaggaaaacaagagtcaggttcagaaatccatgtggaagtgaaggcacmaagcttggttataagccctccagctcctagtcctaggaaaactccagttgccagtgatcaacgccgtaggtcctgcaaaacagcccctgcttccagcagc

SEQ ID NO: 6164 - DNA, 201 bp, Homo sapiens; identical to SEQ ID NO: 6074

SEQ ID NO: 6165 - DNA, 201 bp, Homo sapiens; identical to SEQ ID NO: 6075

SEQ ID NO: 6166 - DNA, 201 bp, Homo sapiens; identical to SEQ ID NO: 6076

SEQ ID NO: 6167 - DNA, 201 bp, Homo sapiens; identical to SEQ ID NO: 6077

SEQ ID NO: 6168 - DNA, 201 bp, Homo sapiens; identical to SEQ ID NO: 6078

SEQ ID NO: 6169 - DNA, 201 bp, Homo sapiens; identical to SEQ ID NO: 6079

SEQ ID NO: 6170 - DNA, 201 bp, Homo sapiens; identical to SEQ ID NO: 6080

SEQ ID NO: 6171 - DNA, 201 bp, Homo sapiens; identical to SEQ ID NO: 6081

SEQ ID NO: 6172 - DNA, 201 bp, Homo sapiens; identical to SEQ ID NO: 6082

SEQ ID NO: 6173 - DNA, 201 bp, Homo sapiens; identical to SEQ ID NO: 6083

SEQ ID NO: 6174 - DNA, 201 bp, Homo sapiens; identical to SEQ ID NO: 6084

SEQ ID NO: 6175 - DNA, 201 bp, Homo sapiens; identical to SEQ ID NO: 6085

SEQ ID NO: 6176 - DNA, 201 bp, Homo sapiens; identical to SEQ ID NO: 6086

SEQ ID NO: 6177 - DNA, 201 bp, Homo sapiens; identical to SEQ ID NO: 6087

SEQ ID NO: 6178 - DNA, 201 bp, Homo sapiens; identical to SEQ ID NO: 6088

SEQ ID NO: 6179 - DNA, 201 bp, Homo sapiens; identical to SEQ ID NO: 6089

SEQ ID NO: 6180 - DNA, 201 bp, Homo sapiens; identical to SEQ ID NO: 6090

SEQ ID NO: 6181 - DNA, 201 bp, Homo sapiens; identical to SEQ ID NO: 6091

SEQ ID NO: 6182 - DNA, 201 bp, Homo sapiens; identical to SEQ ID NO: 6092

SEQ ID NO: 6183 - DNA, 201 bp, Homo sapiens; identical to SEQ ID NO: 6093

SEQ ID NO: 6184 - DNA, 201 bp, Homo sapiens; identical to SEQ ID NO: 6094

SEQ ID NO: 6185 - DNA, 201 bp, Homo sapiens; identical to SEQ ID NO: 6095

SEQ ID NO: 6186 - DNA, 201 bp, Homo sapiens; identical to SEQ ID NO: 6096

SEQ ID NO: 6187 - DNA, 201 bp, Homo sapiens; identical to SEQ ID NO: 6097

SEQ ID NO: 6188 - DNA, 201 bp, Homo sapiens; identical to SEQ ID NO: 6098

SEQ ID NO: 6189 - DNA, 201 bp, Homo sapiens; identical to SEQ ID NO: 6099

SEQ ID NO: 6190 - DNA, 201 bp, Homo sapiens; identical to SEQ ID NO: 6100

SEQ ID NO: 6191 - DNA, 201 bp, Homo sapiens; identical to SEQ ID NO: 6101

SEQ ID NO: 6192 - DNA, 201 bp, Homo sapiens; identical to SEQ ID NO: 6102

SEQ ID NO: 6193 - DNA, 201 bp, Homo sapiens; identical to SEQ ID NO: 6103

SEQ ID NO: 6194 - DNA, 201 bp, Homo sapiens; identical to SEQ ID NO: 6104

SEQ ID NO: 6195 - DNA, 201 bp, Homo sapiens; identical to SEQ ID NO: 6105

SEQ ID NO: 6196 - DNA, 201 bp, Homo sapiens; identical to SEQ ID NO: 6108

SEQ ID NO: 6197 - DNA, 201 bp, Homo sapiens; identical to SEQ ID NO: 6107

SEQ ID NO: 6198 - DNA, 201 bp, Homo sapiens; identical to SEQ ID NO: 6106

SEQ ID NO: 6199 - DNA, 201 bp, Homo sapiens; identical to SEQ ID NO: 6109

SEQ ID NO: 6200 - DNA, 201 bp, Homo sapiens; identical to SEQ ID NO: 6110

SEQ ID NO: 6201 - DNA, 201 bp, Homo sapiens; identical to SEQ ID NO: 6111

SEQ ID NO: 6202 - DNA, 201 bp, Homo sapiens; identical to SEQ ID NO: 6112

SEQ ID NO: 6203 - DNA, 201 bp, Homo sapiens; identical to SEQ ID NO: 6113

SEQ ID NO: 6204 - DNA, 201 bp, Homo sapiens; identical to SEQ ID NO: 6114

SEQ ID NO: 6205 - DNA, 201 bp, Homo sapiens; identical to SEQ ID NO: 6115

SEQ ID NO: 6206 - DNA, 201 bp, Homo sapiens; identical to SEQ ID NO: 6116

SEQ ID NO: 6207 - DNA, 201 bp, Homo sapiens; identical to SEQ ID NO: 6117

SEQ ID NO: 6208 - DNA, 201 bp, Homo sapiens; identical to SEQ ID NO: 6118

SEQ ID NO: 6209 - DNA, 201 bp, Homo sapiens; identical to SEQ ID NO: 6119

SEQ ID NO: 6210 - DNA, 201 bp, Homo sapiens; identical to SEQ ID NO: 6120

SEQ ID NO: 6211 - DNA, 201 bp, Homo sapiens; identical to SEQ ID NO: 6121

SEQ ID NO: 6212 - DNA, 201 bp, Homo sapiens; identical to SEQ ID NO: 6122

SEQ ID NO: 6213 - DNA, 201 bp, Homo sapiens; identical to SEQ ID NO: 6123

SEQ ID NO: 6214 - DNA, 201 bp, Homo sapiens
gtaaatgggtctgttattgatgagcctgtacggctaaaacatggagatgtaataactattattgatcgttccttcaggtatgaaaatgaaagtcttcagartggaaggaagtcaactgaatttccaagaaaaatacgtgaacaggagccagcacgtcgtgtctcaagatctagcttctcttctgaccctgatgagaaagct

SEQ ID NO: 6215 - DNA, 201 bp, Homo sapiens; identical to SEQ ID NO: 6125

SEQ ID NO: 6216 - DNA, 201 bp, Homo sapiens; identical to SEQ ID NO: 6126

SEQ ID NO: 6217 - DNA, 201 bp, Homo sapiens; identical to SEQ ID NO: 6127

SEQ ID NO: 6218 - DNA, 201 bp, Homo sapiens; identical to SEQ ID NO: 6128

SEQ ID NO: 6219 - DNA, 201 bp, Homo sapiens; identical to SEQ ID NO: 6129

SEQ ID NO: 6220 - DNA, 201 bp, Homo sapiens; identical to SEQ ID NO: 6130

SEQ ID NO: 6221 - DNA, 201 bp, Homo sapiens; identical to SEQ ID NO: 6131

SEQ ID NO: 6222 - DNA, 201 bp, Homo sapiens; identical to SEQ ID NO: 6132

SEQ ID NO: 6223 - DNA, 201 bp, Homo sapiens; identical to SEQ ID NO: 6133

SEQ ID NO: 6224 - DNA, 201 bp, Homo sapiens; identical to SEQ ID NO: 6134

SEQ ID NO: 6225 - DNA, 201 bp, Homo sapiens; identical to SEQ ID NO: 6135

SEQ ID NO: 6226 - DNA, 176 bp, Homo sapiens; identical to SEQ ID NO: 6136

SEQ ID NO: 6227 - DNA, 161 bp, Homo sapiens; identical to SEQ ID NO: 6137

SEQ ID NO: 6228 - DNA, 201 bp, Homo sapiens; identical to SEQ ID NO: 6138

SEQ ID NO: 6229 - DNA, 201 bp, Homo sapiens; identical to SEQ ID NO: 6139

SEQ ID NO: 6230 - DNA, 201 bp, Homo sapiens; identical to SEQ ID NO: 6140

SEQ ID NO: 6231 - DNA, 201 bp, Homo sapiens; identical to SEQ ID NO: 6141

SEQ ID NO: 6232 - DNA, 201 bp, Homo sapiens; identical to SEQ ID NO: 6142

SEQ ID NO: 6233 - DNA, 201 bp, Homo sapiens; identical to SEQ ID NO: 6143

SEQ ID NO: 6234 - DNA, 201 bp, Homo sapiens; identical to SEQ ID NO: 6144

SEQ ID NO: 6235 - DNA, 201 bp, Homo sapiens; identical to SEQ ID NO: 6145

SEQ ID NO: 6236 - DNA, 201 bp, Homo sapiens; identical to SEQ ID NO: 6146

SEQ ID NO: 6237 - DNA, 201 bp, Homo sapiens; identical to SEQ ID NO: 6147

SEQ ID NO: 6238 - DNA, 201 bp, Homo sapiens; identical to SEQ ID NO: 6148

SEQ ID NO: 6239 - DNA, 201 bp, Homo sapiens; identical to SEQ ID NO: 6149

SEQ ID NO: 6240 - DNA, 201 bp, Homo sapiens; identical to SEQ ID NO: 6150

SEQ ID NO: 6241 - DNA, 201 bp, Homo sapiens; identical to SEQ ID NO: 6151

SEQ ID NO: 6242 - DNA, 201 bp, Homo sapiens; identical to SEQ ID NO: 6154

SEQ ID NO: 6243 - DNA, 201 bp, Homo sapiens; identical to SEQ ID NO: 6153

SEQ ID NO: 6244 - DNA, 201 bp, Homo sapiens; identical to SEQ ID NO: 6156

SEQ ID NO: 6245 - DNA, 201 bp, Homo sapiens; identical to SEQ ID NO: 6155

SEQ ID NO: 6246 - DNA, 201 bp, Homo sapiens; identical to SEQ ID NO: 6157

SEQ ID NO: 6247 - DNA, 201 bp, Homo sapiens; identical to SEQ ID NO: 6158

SEQ ID NO: 6248 - DNA, 201 bp, Homo sapiens; identical to SEQ ID NO: 6159

SEQ ID NO: 6249 - DNA, 201 bp, Homo sapiens; identical to SEQ ID NO: 6160

SEQ ID NO: 6250 - DNA, 201 bp, Homo sapiens; identical to SEQ ID NO: 6161

SEQ ID NO: 6251 - DNA, 201 bp, Homo sapiens; identical to SEQ ID NO: 6162

SEQ ID NO: 6252 - DNA, 201 bp, Homo sapiens; identical to SEQ ID NO: 6163

SEQ ID NO: 6253 - DNA, 201 bp, Homo sapiens; identical to SEQ ID NO: 6074

SEQ ID NO: 6254 - DNA, 201 bp, Homo sapiens; identical to SEQ ID NO: 6075

SEQ ID NO: 6255 - DNA, 201 bp, Homo sapiens; identical to SEQ ID NO: 6076

SEQ ID NO: 6256 - DNA, 201 bp, Homo sapiens; identical to SEQ ID NO: 6077

SEQ ID NO: 6257 - DNA, 201 bp, Homo sapiens; identical to SEQ ID NO: 6078

SEQ ID NO: 6258 - DNA, 201 bp, Homo sapiens
attcctcagaacatgctggacgtaatggcagaaatgcagctgatcccatttctggggattttaaagaaatttccagcgttaaattagtgagccgttatggwgaattgaagtctgttcccactacacaatgtcttgacaatagcaaaaaaaatgaatctcccttttggaagctttatgagtcagtgaagaaagagttggatg

SEQ ID NO: 6259 - DNA, 201 bp, Homo sapiens; identical to SEQ ID NO: 6079

SEQ ID NO: 6260 - DNA, 201 bp, Homo sapiens; identical to SEQ ID NO: 6080

SEQ ID NO: 6261 - DNA, 201 bp, Homo sapiens; identical to SEQ ID NO: 6081

SEQ ID NO: 6262 - DNA, 201 bp, Homo sapiens; identical to SEQ ID NO: 6082

SEQ ID NO: 6263 - DNA, 201 bp, Homo sapiens; identical to SEQ ID NO: 6083

SEQ ID NO: 6264 - DNA, 201 bp, Homo sapiens; identical to SEQ ID NO: 6084

SEQ ID NO: 6265 - DNA, 201 bp, Homo sapiens; identical to SEQ ID NO: 6085

SEQ ID NO: 6266 - DNA, 201 bp, Homo sapiens; identical to SEQ ID NO: 6086

SEQ ID NO: 6267 - DNA, 201 bp, Homo sapiens; identical to SEQ ID NO: 6087

SEQ ID NO: 6268 - DNA, 201 bp, Homo sapiens; identical to SEQ ID NO: 6088

SEQ ID NO: 6269 - DNA, 201 bp, Homo sapiens; identical to SEQ ID NO: 6089

SEQ ID NO: 6270 - DNA, 201 bp, Homo sapiens; identical to SEQ ID NO: 6090

SEQ ID NO: 6271 - DNA, 201 bp, Homo sapiens; identical to SEQ ID NO: 6091

SEQ ID NO: 6272 - DNA, 201 bp, Homo sapiens; identical to SEQ ID NO: 6092

SEQ ID NO: 6273 - DNA, 201 bp, Homo sapiens; identical to SEQ ID NO: 6093

SEQ ID NO: 6274 - DNA, 201 bp, Homo sapiens; identical to SEQ ID NO: 6094

SEQ ID NO: 6275 - DNA, 201 bp, Homo sapiens; identical to SEQ ID NO: 6095

SEQ ID NO: 6276 - DNA, 201 bp, Homo sapiens; identical to SEQ ID NO: 6096

SEQ ID NO: 6277 - DNA, 201 bp, Homo sapiens; identical to SEQ ID NO: 6097

SEQ ID NO: 6278 - DNA, 201 bp, Homo sapiens; identical to SEQ ID NO: 6098

SEQ ID NO: 6279 - DNA, 201 bp, Homo sapiens; identical to SEQ ID NO: 6099

SEQ ID NO: 6280 - DNA, 201 bp, Homo sapiens; identical to SEQ ID NO: 6100

SEQ ID NO: 6281 - DNA, 201 bp, Homo sapiens; identical to SEQ ID NO: 6101

SEQ ID NO: 6282 - DNA, 201 bp, Homo sapiens; identical to SEQ ID NO: 6102

SEQ ID NO: 6283 - DNA, 201 bp, Homo sapiens; identical to SEQ ID NO: 6103

SEQ ID NO: 6284 - DNA, 201 bp, Homo sapiens; identical to SEQ ID NO: 6104

SEQ ID NO: 6285 - DNA, 201 bp, Homo sapiens; identical to SEQ ID NO: 6105

SEQ ID NO: 6286 - DNA, 201 bp, Homo sapiens; identical to SEQ ID NO: 6106

SEQ ID NO: 6287 - DNA, 201 bp, Homo sapiens; identical to SEQ ID NO: 6107

SEQ ID NO: 6288 - DNA, 201 bp, Homo sapiens; identical to SEQ ID NO: 6108

SEQ ID NO: 6289 - DNA, 201 bp, Homo sapiens; identical to SEQ ID NO: 6109

SEQ ID NO: 6290 - DNA, 201 bp, Homo sapiens; identical to SEQ ID NO: 6110

SEQ ID NO: 6291 - DNA, 201 bp, Homo sapiens; identical to SEQ ID NO: 6111

SEQ ID NO: 6292 - DNA, 201 bp, Homo sapiens; identical to SEQ ID NO: 6112

SEQ ID NO: 6293 - DNA, 201 bp, Homo sapiens; identical to SEQ ID NO: 6113

SEQ ID NO: 6294 - DNA, 201 bp, Homo sapiens; identical to SEQ ID NO: 6114

SEQ ID NO: 6295 - DNA, 201 bp, Homo sapiens; identical to SEQ ID NO: 6115

SEQ ID NO: 6296 - DNA, 201 bp, Homo sapiens; identical to SEQ ID NO: 6116

SEQ ID NO: 6297 - DNA, 201 bp, Homo sapiens
agaaatttccagcgttaaattagtgagccgttatggagaattgaagtctgttcccactacacaatgtcttgacaatagcaaaaaaaatgaatctccctttwggaagctttatgagtcagtgaagaaagagttggatgtaaaatcacaaaaagaaaatgtcctacagtattgtagaaaatctggattacaaactgattacgc

SEQ ID NO: 6298 - DNA, 201 bp, Homo sapiens; identical to SEQ ID NO: 6117

SEQ ID NO: 6299 - DNA, 201 bp, Homo sapiens; identical to SEQ ID NO: 6118

SEQ ID NO: 6300 - DNA, 201 bp, Homo sapiens; identical to SEQ ID NO: 6119

SEQ ID NO: 6301 - DNA, 201 bp, Homo sapiens; identical to SEQ ID NO: 6120

SEQ ID NO: 6302 - DNA, 201 bp, Homo sapiens; identical to SEQ ID NO: 6121

SEQ ID NO: 6303 - DNA, 201 bp, Homo sapiens; identical to SEQ ID NO: 6122

SEQ ID NO: 6304 - DNA, 201 bp, Homo sapiens; identical to SEQ ID NO: 6123

SEQ ID NO: 6305 - DNA, 201 bp, Homo sapiens; identical to SEQ ID NO: 6214

SEQ ID NO: 6306 - DNA, 201 bp, Homo sapiens; identical to SEQ ID NO: 6125

SEQ ID NO: 6307 - DNA, 201 bp, Homo sapiens; identical to SEQ ID NO: 6126

SEQ ID NO: 6308 - DNA, 201 bp, Homo sapiens; identical to SEQ ID NO: 6127

SEQ ID NO: 6309 - DNA, 201 bp, Homo sapiens; identical to SEQ ID NO: 6128

SEQ ID NO: 6310 - DNA, 201 bp, Homo sapiens; identical to SEQ ID NO: 6129

SEQ ID NO: 6311 - DNA, 201 bp, Homo sapiens; identical to SEQ ID NO: 6130

SEQ ID NO: 6312 - DNA, 201 bp, Homo sapiens; identical to SEQ ID NO: 6131

SEQ ID NO: 6313 - DNA, 201 bp, Homo sapiens; identical to SEQ ID NO: 6132

SEQ ID NO: 6314 - DNA, 201 bp, Homo sapiens; identical to SEQ ID NO: 6133

SEQ ID NO: 6315 - DNA, 201 bp, Homo sapiens; identical to SEQ ID NO: 6134

SEQ ID NO: 6316 - DNA, 201 bp, Homo sapiens; identical to SEQ ID NO: 6135

SEQ ID NO: 6317 - DNA, 176 bp, Homo sapiens; identical to SEQ ID NO: 6136

SEQ ID NO: 6318 - DNA, 161 bp, Homo sapiens; identical to SEQ ID NO: 6137

SEQ ID NO: 6319 - DNA, 201 bp, Homo sapiens; identical to SEQ ID NO: 6138

SEQ ID NO: 6320 - DNA, 201 bp, Homo sapiens; identical to SEQ ID NO: 6139

SEQ ID NO: 6321 - DNA, 201 bp, Homo sapiens; identical to SEQ ID NO: 6140

SEQ ID NO: 6322 - DNA, 201 bp, Homo sapiens; identical to SEQ ID NO: 6141

SEQ ID NO: 6323 - DNA, 201 bp, Homo sapiens; identical to SEQ ID NO: 6142

SEQ ID NO: 6324 - DNA, 201 bp, Homo sapiens; identical to SEQ ID NO: 6143

SEQ ID NO: 6325 - DNA, 201 bp, Homo sapiens; identical to SEQ ID NO: 6144

SEQ ID NO: 6326 - DNA, 201 bp, Homo sapiens; identical to SEQ ID NO: 6145

SEQ ID NO: 6327 - DNA, 201 bp, Homo sapiens; identical to SEQ ID NO: 6146

SEQ ID NO: 6328 - DNA, 201 bp, Homo sapiens; identical to SEQ ID NO: 6147

SEQ ID NO: 6329 - DNA, 201 bp, Homo sapiens; identical to SEQ ID NO: 6148

SEQ ID NO: 6330 - DNA, 201 bp, Homo sapiens; identical to SEQ ID NO: 6149

SEQ ID NO: 6331 - DNA, 201 bp, Homo sapiens; identical to SEQ ID NO: 6150

SEQ ID NO: 6332 - DNA, 201 bp, Homo sapiens; identical to SEQ ID NO: 6151

SEQ ID NO: 6333 - DNA, 201 bp, Homo sapiens
ctgagaaattgggcactacagctggacagatgtgctctgggttacctggtcttagttcagttgatatcaacaactttggtgattccattaatgagagtgasggaatacctttgaaaagaaggcgtgtgtcctttggtgggcacctaagacctgaactatttgatgaaaacttgcctcctaatacgcctctcaaaaggggag

SEQ ID NO: 6334 - DNA, 201 bp, Homo sapiens; identical to SEQ ID NO: 6153

SEQ ID NO: 6335 - DNA, 201 bp, Homo sapiens; identical to SEQ ID NO: 6154

SEQ ID NO: 6336 - DNA, 201 bp, Homo sapiens; identical to SEQ ID NO: 6155

SEQ ID NO: 6337 - DNA, 201 bp, Homo sapiens; identical to SEQ ID NO: 6156

SEQ ID NO: 6338 - DNA, 201 bp, Homo sapiens; identical to SEQ ID NO: 6157

SEQ ID NO: 6339 - DNA, 201 bp, Homo sapiens; identical to SEQ ID NO: 6158

SEQ ID NO: 6340 - DNA, 201 bp, Homo sapiens; identical to SEQ ID NO: 6159

SEQ ID NO: 6341 - DNA, 201 bp, Homo sapiens; identical to SEQ ID NO: 6160

SEQ ID NO: 6342 - DNA, 201 bp, Homo sapiens; identical to SEQ ID NO: 6161

SEQ ID NO: 6343 - DNA, 201 bp, Homo sapiens; identical to SEQ ID NO: 6162

SEQ ID NO: 6344 - DNA, 201 bp, Homo sapiens; identical to SEQ ID NO: 6163

SEQ ID NO: 6345 - DNA, 201 bp, Homo sapiens
ggaacacaaattacaagactcggtccctgaaaataagggaatatccctgcgctccagacgccaagataagactgaggcagaacagcaaataactgaggtcwttgtattagcagaaagaatagaaataaacagaaatgaaaagaagcccatgaagacctccccagagatggacattcagaatccagatgatggagcccggaa

SEQ ID NO: 6346 - DNA, 201 bp, Homo sapiens; identical to SEQ ID NO: 6090

SEQ ID NO: 6347 - DNA, 201 bp, Homo sapiens
gcagaatcagaaagggaaaggagaagcaggaaattcagactccatgtgcctgagatcaagaaagacaaaaagccagcctgcagcaagcactttggagagcraatctgtgcagagagtaacgcggagtgtcaagaggtgtgcagaaaatccaaagaaggctgaggacaatgtgtgtgtcaagaaaataacaaccagaagtca

SEQ ID NO: 6348 - DNA, 201 bp, Homo sapiens
ttcttacactaactctgtacctaccatctcctgcctcccttaggcaggcacctccaaccaccacacactccctgctgttttccctgcctggaactttcccwccagccccaccaagatcatttcatccagtcctgagctcagcttaagggaggcttcttgcctgtgggttccctcacccccatgcctgtcctccaggctggg

SEQ ID NO: 6349 - DNA, 201 bp, Homo sapiens
ttacactaactctgtacctaccatctcctgcctcccttaggcaggcacctccaaccaccacacactccctgctgttttccctgcctggaactttcccaccwgccccaccaagatcatttcatccagtcctgagctcagcttaagggaggcttcttgcctgtgggttccctcacccccatgcctgtcctccaggctggggca

SEQ ID NO: 6350 - DNA, 201 bp, Homo sapiens; identical to SEQ ID NO: 6107

SEQ ID NO: 6351 - DNA, 201 bp, Homo sapiens
agccaagaactcctaagggaaaagcccaacccctagaagacttggctggcttgaaagagctcttccagacaccagtatgcactgacaagcccacgactcaygagaaaactaccaaaatagcctgcagatctccacaaccagacccagtgggtaccccaacaatcttcaagccacagtccaagagaagtctcaggaaagcag

SEQ ID NO: 6352 - DNA, 201 bp, Homo sapiens; identical to SEQ ID NO: 6163

SEQ ID NO: 6353 - DNA, 201 bp, Homo sapiens; identical to SEQ ID NO: 6109

SEQ ID NO: 6354 - DNA, 201 bp, Homo sapiens; identical to SEQ ID NO: 6333

SEQ ID NO: 6355 - DNA, 201 bp, Homo sapiens
atctgataaatgctctgcaagccctcccttaagacggcagtgtattagagaaaatggaaacgtagcaaaaacgcccaggaacacctacaaaatgacttctstggagacaaaaacttcagatactgagacagagccttcaaaaacagtatccactgtaaacaggtcaggaaggtctacagagttcaggaatatacagaagct

SEQ ID NO: 6356 - DNA, 201 bp, Homo sapiens; identical to SEQ ID NO: 6159

SEQ ID NO: 6357 - DNA, 201 bp, Homo sapiens; identical to SEQ ID NO: 6084

SEQ ID NO: 6358 - DNA, 201 bp, Homo sapiens; identical to SEQ ID NO: 6086

SEQ ID NO: 6359 - DNA, 201 bp, Homo sapiens; identical to SEQ ID NO: 6087

SEQ ID NO: 6360 - DNA, 201 bp, Homo sapiens
agagaagtttgaggacttctgcaaaaagaattgaacctgcggaagagctgaacagcaacgacatgaaaaccaacaaagaggaacacaaattacaagactcrgtccctgaaaataagggaatatccctgcgctccagacgccaagataagactgaggcagaacagcaaataactgaggtctttgtattagcagaaagaatag

SEQ ID NO: 6361 - DNA, 201 bp, Homo sapiens; identical to SEQ ID NO: 6130

SEQ ID NO: 6362 - DNA, 201 bp, Homo sapiens; identical to SEQ ID NO: 6133

SEQ ID NO: 6363 - DNA, 193 bp, Homo sapiens
cctctttgtagcacgtagtgttgtgaaactaagccactaattgagtttctggctcccctcctggggttgtaagttttgttcattcatgagggccgactgtytttcctggttactgtatcccagtgaccagccacaggagatgtccaataaagtatgtgatgaaatggtcttaaaaaaaaaaaaaaaaaaaaaa

SEQ ID NO: 6364 - DNA, 178 bp, Homo sapiens
tagtgttgtgaaactaagccactaattgagtttctggctcccctcctggggttgtaagttttgttcattcatgagggccgactgtatttcctggttactgsatcccagtgaccagccacaggagatgtccaataaagtatgtgatgaaatggtcttaaaaaaaaaaaaaaaaaaaaaa

SEQ ID NO: 6365 - DNA, 201 bp, Homo sapiens; identical to SEQ ID NO: 6214

SEQ ID NO: 6366 - DNA, 201 bp, Homo sapiens; identical to SEQ ID NO: 6160

SEQ ID NO: 6367 - DNA, 201 bp, Homo sapiens
ggtttgccctcagctttgcagaatgaagccttgaggtctgtcaccacccacagccaccctacagcagccttaactgtgacacttgccacactgtgtcgtcrtttgtttgcctatgttctccagggcacggtggcaggaacaactatcctcgtctgtcccaacactgagcaggcactcggtaaacacgaatgaatggataag

SEQ ID NO: 6368 - DNA, 201 bp, Homo sapiens
catttaagcaacctgcaaagcggaacgtggacgcagaagatgtaattggcagcaggagacagccaagagcacctaaggaaaaggcccaacccctggaagayctggccagcttccaagagctctctcaaacaccaggccacactgaggaactggcaaatggtgctgctgatagctttacaagcgctccaaagcaaacacctg

SEQ ID NO: 6369 - DNA, 201 bp, Homo sapiens
gcaagctcacacaaacctcaggggagaccacgcacaccgacaaagagccggtaggtgagggcaaaggcacgaaagcatttaagcaacctgcaaagcggaasgtggacgcagaagatgtaattggcagcaggagacagccaagagcacctaaggaaaaggcccaacccctggaagacctggccagcttccaagagctctctc

SEQ ID NO: 6370 - DNA, 201 bp, Homo sapiens
actttggagagcaaatctgtgcagagagtaacgcggagtgtcaagaggtgtgcagaaaatccaaagaaggctgaggacaatgtgtgtgtcaagaaaataasaaccagaagtcatagggacagtgaagatatttgacagaaaaatcgaactgggaaaaatataataaagttagttttgtgataagttctagtgcagtttttg

SEQ ID NO: 6371 - DNA, 201 bp, Homo sapiens
caaactcctaaggaaaaggcccaggctctagaagacctggctggcttcaaagagctcttccagacaccaggcactgacaagcccacgactgatgagaaaamtaccaaaatagcctgcaaatctccacaaccagacccagtggacaccccagcaagcacaaagcaacggcccaagagaaacctcaggaaagcagacgtagag

SEQ ID NO: 6372 - DNA, 201 bp, Homo sapiens; identical to SEQ ID NO: 6085

SEQ ID NO: 6373 - DNA, 201 bp, Homo sapiens; identical to SEQ ID NO: 6112

SEQ ID NO: 6374 - DNA, 201 bp, Homo sapiens; identical to SEQ ID NO: 6142

SEQ ID NO: 6375 - DNA, 201 bp, Homo sapiens
tcaagaaagacaaaaagccagcctgcagcaagcactttggagagcaaatctgtgcagagagtaacgcggagtgtcaagaggtgtgcagaaaatccaaagarggctgaggacaatgtgtgtgtcaagaaaataacaaccagaagtcatagggacagtgaagatatttgacagaaaaatcgaactgggaaaaatataataaag

SEQ ID NO: 6376 - DNA, 201 bp, Homo sapiens
gcctaaggtggcagaggagagcggagggcagaagagtgcgaaggttctcatgcagaatcagaaagggaaaggagaagcaggaaattcagactccatgtgcytgagatcaagaaagacaaaaagccagcctgcagcaagcactttggagagcaaatctgtgcagagagtaacgcggagtgtcaagaggtgtgcagaaaatcc

SEQ ID NO: 6377 - DNA, 201 bp, Homo sapiens; identical to SEQ ID NO: 6098

SEQ ID NO: 6378 - DNA, 201 bp, Homo sapiens; identical to SEQ ID NO: 6121

SEQ ID NO: 6379 - DNA, 201 bp, Homo sapiens; identical to SEQ ID NO: 6122

SEQ ID NO: 6380 - DNA, 201 bp, Homo sapiens; identical to SEQ ID NO: 6123

SEQ ID NO: 6381 - DNA, 201 bp, Homo sapiens; identical to SEQ ID NO: 6125

SEQ ID NO: 6382 - DNA, 201 bp, Homo sapiens; identical to SEQ ID NO: 6147

SEQ ID NO: 6383 - DNA, 201 bp, Homo sapiens; identical to SEQ ID NO: 6149

SEQ ID NO: 6384 - DNA, 201 bp, Homo sapiens
aagcccacgactgatgagaaaactaccaaaatagcctgcaaatctccacaaccagacccagtggacaccccagcaagcacaaagcaacggcccaagagaarcctcaggaaagcagacgtagaggaagaatttttagcactcaggaaacgaacaccatcagcaggcaaagccatggacaccccaaaaccagcagtaagtgat

SEQ ID NO: 6385 - DNA, 201 bp, Homo sapiens
acaaagcaacggcccaagagaaacctcaggaaagcagacgtagaggaagaatttttagcactcaggaaacgaacaccatcagcaggcaaagccatggacascccaaaaccagcagtaagtgatgagaaaaatatcaacacatttgtggaaactccagtgcagaaactggacctgctaggaaatttacctggcagcaagaga

SEQ ID NO: 6386 - DNA, 201 bp, Homo sapiens; identical to SEQ ID NO: 6079

SEQ ID NO: 6387 - DNA, 201 bp, Homo sapiens; identical to SEQ ID NO: 6080

SEQ ID NO: 6388 - DNA, 201 bp, Homo sapiens; identical to SEQ ID NO: 6101

SEQ ID NO: 6389 - DNA, 201 bp, Homo sapiens; identical to SEQ ID NO: 6102

SEQ ID NO: 6390 - DNA, 201 bp, Homo sapiens; identical to SEQ ID NO: 6104

SEQ ID NO: 6391 - DNA, 201 bp, Homo sapiens; identical to SEQ ID NO: 6126

SEQ ID NO: 6392 - DNA, 201 bp, Homo sapiens; identical to SEQ ID NO: 6128

SEQ ID NO: 6393 - DNA, 201 bp, Homo sapiens; identical to SEQ ID NO: 6151

SEQ ID NO: 6394 - DNA, 201 bp, Homo sapiens; identical to SEQ ID NO: 6154

SEQ ID NO: 6395 - DNA, 201 bp, Homo sapiens; identical to SEQ ID NO: 6156

SEQ ID NO: 6396 - DNA, 201 bp, Homo sapiens
gtggacgcagaagatgtaattggcagcaggagacagccaagagcacctaaggaaaaggcccaacccctggaagacctggccagcttccaagagctctctcmaacaccaggccacactgaggaactggcaaatggtgctgctgatagctttacaagcgctccaaagcaaacacctgacagtggaaaacctctaaaaatatcc

SEQ ID NO: 6397 - DNA, 201 bp, Homo sapiens
gaagaactgactggcttcagagagcttttccagacaccatgcactgataaccccacagctgatgagaaaactaccaaaaaaatactctgcaaatctccgcwatcagacccagcggacaccccaacaaacacaaagcaacggcccaagagaagcctcaagaaagcagacgtagaggaagaatttttagcattcaggaaacta

SEQ ID NO: 6398 - DNA, 201 bp, Homo sapiens; identical to SEQ ID NO: 6082

SEQ ID NO: 6399 - DNA, 201 bp, Homo sapiens; identical to SEQ ID NO: 6083

SEQ ID NO: 6400 - DNA, 201 bp, Homo sapiens; identical to SEQ ID NO: 6105

SEQ ID NO: 6401 - DNA, 201 bp, Homo sapiens; identical to SEQ ID NO: 6108

SEQ ID NO: 6402 - DNA, 201 bp, Homo sapiens
aaggcccaacccctagaagacctggctggctggaaagagctcttccagacaccagtatgcactgacaagcccacgactcacgagaaaactaccaaaatagmctgcagatcacaaccagacccagtggacacaccaacaagctccaagccacagtccaagagaagtctcaggaaagtggacgtagaagaagaattcttcgca

SEQ ID NO: 6403 - DNA, 201 bp, Homo sapiens; identical to SEQ ID NO: 6129

SEQ ID NO: 6404 - DNA, 201 bp, Homo sapiens; identical to SEQ ID NO: 6131

SEQ ID NO: 6405 - DNA, 201 bp, Homo sapiens; identical to SEQ ID NO: 6134

SEQ ID NO: 6406 - DNA, 201 bp, Homo sapiens
gcaatagacggctacaaactcgtaaggaaaaggcccaggctctagaagaactgactggcttcagagagcttttccagacaccatgcactgataaccccacrgctgatgagaaaactaccaaaaaaatactctgcaaatctccgcaatcagacccagcggacaccccaacaaacacaaagcaacggcccaagagaagcctca

SEQ ID NO: 6407 - DNA, 201 bp, Homo sapiens; identical to SEQ ID NO: 6075

SEQ ID NO: 6408 - DNA, 201 bp, Homo sapiens
accgacaaagagccggtaggtgagggcaaaggcacgaaagcatttaagcaacctgcaaagcggaacgtggacgcagaagatgtaattggcagcaggagacrgccaagagcacctaaggaaaaggcccaacccctggaagacctggccagcttccaagagctctctcaaacaccaggccacactgaggaactggcaaatggt

SEQ ID NO: 6409 - DNA, 201 bp, Homo sapiens
gcaacaagctcaaagagacggcccaggacacgtgcccagaaagtagaagtgaaggaggagctgttagcagttggcaagctcacacaaacctcaggggagascacgcacaccgacaaagagccggtaggtgagggcaaaggcacgaaagcatttaagcaacctgcaaagcggaacgtggacgcagaagatgtaattggcagc

SEQ ID NO: 6410 - DNA, 201 bp, Homo sapiens; identical to SEQ ID NO: 6143

SEQ ID NO: 6411 - DNA, 201 bp, Homo sapiens; identical to SEQ ID NO: 6145

SEQ ID NO: 6412 - DNA, 201 bp, Homo sapiens
gacatgaaaaccaacaaagaggaacacaaattacaagactcggtccctgaaaataagggaatatccctgcgctccagacgccaagataagactgaggcagracagcaaataactgaggtctttgtattagcagaaagaatagaaataaacagaaatgaaaagaagcccatgaagacctccccagagatggacattcagaat

SEQ ID NO: 6413 - DNA, 201 bp, Homo sapiens; identical to SEQ ID NO: 6077

SEQ ID NO: 6414 - DNA, 201 bp, Homo sapiens; identical to SEQ ID NO: 6099

SEQ ID NO: 6415 - DNA, 201 bp, Homo sapiens; identical to SEQ ID NO: 6103

SEQ ID NO: 6416 - DNA, 201 bp, Homo sapiens; identical to SEQ ID NO: 6100

SEQ ID NO: 6417 - DNA, 201 bp, Homo sapiens
tcgtttgtttgcctatgttctccagggcacggtggcaggaacaactatcctcgtctgtcccaacactgagcaggcactcggtaaacacgaatgaatggatragcgcacggatgaatggagcttacaagatctgtctttccaatggccgggggcatttggtccccaaattaaggctattggacatctgcacaggacagtcct

SEQ ID NO: 6418 - DNA, 201 bp, Homo sapiens
caagctcacacaaacctcaggggagaccacgcacaccgacaaagagccggtaggtgagggcaaaggcacgaaagcatttaagcaacctgcaaagcggaacstggacgcagaagatgtaattggcagcaggagacagccaagagcacctaaggaaaaggcccaacccctggaagacctggccagcttccaagagctctctca

SEQ ID NO: 6419 - DNA, 201 bp, Homo sapiens
agcagcaagtgtaactggtagcaagaggcagccaagaactcctaagggaaaagcccaacccctagaagacttggctggcttgaaagagctcttccagacascagtatgcactgacaagcccacgactcacgagaaaactaccaaaatagcctgcagatctccacaaccagacccagtgggtaccccaacaatcttcaagcc

SEQ ID NO: 6420 - DNA, 201 bp, Homo sapiens; identical to SEQ ID NO: 6258

SEQ ID NO: 6421 - DNA, 201 bp, Homo sapiens
aacaacattgcaaaattgaaatccatgagcaggaggcaatattacataatttcagttccacaaatccaacacaagtaaatgggtctgttattgatgagccwgtacggctaaaacatggagatgtaataactattattgatcgttccttcaggtatgaaaatgaaagtcttcagaatggaaggaagtcaactgaatttccaa

SEQ ID NO: 6422 - DNA, 201 bp, Homo sapiens
gtcctgcaaaacagcccctgcttccagcagcaaatctcagacagaggttcctaagagaggaggagaaagagtggcaacctgccttcaaaagagagtgtctmtcagccgaagtcaacatgatattttacagatgatatgttccaaaagaagaagtggtgcttcggaagcaaatctgattgttgcaaaatcatgggcagatgt

SEQ ID NO: 6423 - DNA, 201 bp, Homo sapiens; identical to SEQ ID NO: 6115

SEQ ID NO: 6424 - DNA, 201 bp, Homo sapiens
caatagacggctacaaactcgtaaggaaaaggcccaggctctagaagaactgactggcttcagagagcttttccagacaccatgcactgataaccccacarctgatgagaaaactaccaaaaaaatactctgcaaatctccgcaatcagacccagcggacaccccaacaaacacaaagcaacggcccaagagaagcctcaa

SEQ ID NO: 6425 - DNA, 201 bp, Homo sapiens
agcaagtgtaactggtagcaagaggcagccaagaactcctaagggaaaagcccaacccctagaagacttggctggcttgaaagagctcttccagacaccartatgcactgacaagcccacgactcacgagaaaactaccaaaatagcctgcagatctccacaaccagacccagtgggtaccccaacaatcttcaagccaca

SEQ ID NO: 6426 - DNA, 201 bp, Homo sapiens
caaagcaacggcccaagagaaacctcaggaaagcagacgtagaggaagaatttttagcactcaggaaacgaacaccatcagcaggcaaagccatggacacmccaaaaccagcagtaagtgatgagaaaaatatcaacacatttgtggaaactccagtgcagaaactggacctgctaggaaatttacctggcagcaagagac

SEQ ID NO: 6427 - DNA, 201 bp, Homo sapiens
tgcagaatgaagccttgaggtctgtcaccacccacagccaccctacagcagccttaactgtgacacttgccacactgtgtcgtcgtttgtttgcctatgtyctccagggcacggtggcaggaacaactatcctcgtctgtcccaacactgagcaggcactcggtaaacacgaatgaatggataagcgcacggatgaatgga

SEQ ID NO: 6428 - DNA, 201 bp, Homo sapiens
tgcactgataaccccacagctgatgagaaaactaccaaaaaaatactctgcaaatctccgcaatcagacccagcggacaccccaacaaacacaaagcaacrgcccaagagaagcctcaagaaagcagacgtagaggaagaatttttagcattcaggaaactaacaccatcagcaggcaaagccatgcacacgcctaaagca

SEQ ID NO: 6429 - DNA, 201 bp, Homo sapiens
actgataaccccacagctgatgagaaaactaccaaaaaaatactctgcaaatctccgcaatcagacccagcggacaccccaacaaacacaaagcaacggcycaagagaagcctcaagaaagcagacgtagaggaagaatttttagcattcaggaaactaacaccatcagcaggcaaagccatgcacacgcctaaagcagca

SEQ ID NO: 6430 - DNA, 201 bp, Homo sapiens; identical to SEQ ID NO: 6113

SEQ ID NO: 6431 - DNA, 201 bp, Homo sapiens
cagactccatgtgcctgagatcaagaaagacaaaaagccagcctgcagcaagcactttggagagcaaatctgtgcagagagtaacgcggagtgtcaagagrtgtgcagaaaatccaaagaaggctgaggacaatgtgtgtgtcaagaaaataacaaccagaagtcatagggacagtgaagatatttgacagaaaaatcgaa

SEQ ID NO: 6432 - DNA, 201 bp, Homo sapiens; identical to SEQ ID NO: 6297

SEQ ID NO: 6433 - DNA, 201 bp, Homo sapiens; identical to SEQ ID NO: 6153

SEQ ID NO: 6434 - DNA, 201 bp, Homo sapiens; identical to SEQ ID NO: 6114

SEQ ID NO: 6435 - DNA, 201 bp, Homo sapiens
ctgggggagggagagatctgacaaatactgcccattcccctaggctgactggatttgagaacaaatacccacccatttccaccatggtatggtaacttctstgagcttcagtttccaagtgaatttccatgtaataggacattcccattaaatacaagctgtttttactttttcgcctcccagggcctgtgcgatctggtc

SEQ ID NO: 6436 - DNA, 201 bp, Homo sapiens
atctgagtgtagctgggtagcatcagccacccagaatgtccccaaacctcccagcttgacggttctagaaggtgacggaagggatagcccagttctccatrtctgcgagtcaaaagcagaagaagaagaaggggaaggagaaggagaagaaaaagaagaagatgtgtgcttcactgaagctctcgagcaaagcaagaaaac

SEQ ID NO: 6437 - DNA, 201 bp, Homo sapiens
agcaagaaaaccctactggctttggagggtgatgggctagtgagaagcccagaagatccctctagaaatgaggactttggtaagcctgctgtgagcacagkcaccttagagcatcagaaggaactggaaaacgtggcacaaccccctcaagctccgcaccagcccactgagaggacaggcaggagcgagatggttctctac

SEQ ID NO: 6438 - DNA, 201 bp, Homo sapiens
gccactcggattctgggatgccttaggaaggagagacaggaaagcctacgattgcatgcttcaagatcctggaagttttaacttcgcgccccgcctgttcrtcctcagcagctcctctggggattttgcagccacagagtttgtgtaccctgcccgagccccctctgtggtcagttccatgcccttcctgcaggaagatct

SEQ ID NO: 6439 - DNA, 201 bp, Homo sapiens
tcaccctggcgggtttagccagtaaagaaaacttcagcaacgtcagcctgcggagcgtcaacctgacggaacagaactctaacaacagcgccgtgccctayaagaggctgatgctgttgcagattaaaggaagaagacatgtgcagaccaggctggtggaacctcgagcttcggcgctcaacagtggggactgcttcctcc

SEQ ID NO: 6440 - DNA, 201 bp, Homo sapiens
acaggaaagcctacgattgcatgcttcaagatcctggaagttttaacttcgcgccccgcctgttcatcctcagcagctcctctggggattttgcagccacrgagtttgtgtaccctgcccgagccccctctgtggtcagttccatgcccttcctgcaggaagatctgtacagcgcgccccagccagcacttttccttgttg

SEQ ID NO: 6441 - DNA, 201 bp, Homo sapiens
tcccggagggggtcgatcctctgaagcttgagatctatctcaccgacgaagacttcgagtttgcactagacatgacgagggatgaatacaacgccctgccygcctggaagcaggtgaacctgaagaaagcaaaaggcctgttctgagtggggagacgccagaggagcctcacggtcacgtccaacaacaccactgcaccag

SEQ ID NO: 6442 - DNA, 201 bp, Homo sapiens
tccccagaaaaggacaggggcggcccgactgggcgatatttgggagacttactgaacacaatgagacgattttgttcaaagagaagtttctggattggacrgaactgaagagatcgaatgagaagaaccccggggaacttgcccagcacaaggaagaccccaggactgatgtcaaggcatacgatgtgacacggatggtgt

SEQ ID NO: 6443 - DNA, 201 bp, Homo sapiens
tggagagacagaaagcaagagagctttgacaggtcgagacagtgggatggagaagtatgggtcctttgaggaagcagaagcatcctaccccatcctgaacmgagccagggaaggagacagccataaggaatctaaatatgctgttcccagaagaggaagcctggaacgggcgaaccctcccatcacccacctcggggatga

SEQ ID NO: 6444 - DNA, 201 bp, Homo sapiens
tccatgtgcgatgtttgctgctggagagatcaaaacgccgacaggggagggccttcttgactcacccagcaaaaccatgtctattaaagaaagattggcaytgttgaagaaaagcggggaggaagattggagaaacagactcagcaggaggcaggagggcggcaaggcgccggccagcagcctgcacacccaggaagcagg

SEQ ID NO: 6445 - DNA, 201 bp, Homo sapiens
tttaccgcagcgtggattataatatgccaagaagtcctgtggagatggatgaggacttcgatgtcattttcgatccttatgcacccaaattgacgtcttcygtggccgagcacaagcgggcagttaggcccaagcgccgggttcaggcctccaaaaaccccctgaaaatgctggcggcaagagaagatctccttcaggaat

SEQ ID NO: 6446 - DNA, 201 bp, Homo sapiens
cctgattcctccactctaagcttggccgaaaagttggccttgtttaacaaattgtcccagccagtctcaaaagcgatttctacccggaacagaatagacaygagacagaggagaatgaacgctcgctatcaaactcagccagtcacactgggagaggtggagcaggtgcagagtggaaagctcattcctttctcacctgcc

SEQ ID NO: 6447 - DNA, 201 bp, Homo sapiens
ctcacccatttgcggtaaaacaagaggcaccacacccgtttccaaacccctggaagatatcgaagccagaccagatatgcagttagaatcggacctgaagytggacaggctggaaacctttctaagaaggctgaataacaaagttggcgggatgcacgaaacggtgctcactgtcaccggcaaatctgtgaaggaggtgat

SEQ ID NO: 6448 - DNA, 201 bp, Homo sapiens
tgaagaaaagcggggaggaagattggagaaacagactcagcaggaggcaggagggcggcaaggcgccggccagcagcctgcacacccaggaagcagggcgrtccctcatcaagaagcgggtcacagaaagtcgagagagccaaatgacgattgaggagaggaagcagctcatcactgtgagagaggaggcctggaagacga

SEQ ID NO: 6449 - DNA, 201 bp, Homo sapiens
gccccagacgacagcaggcaccatcctggacggagtgaacgtcggccgtggctatggcctggtggaaggacacgacaggaggcagtttgagatcaccagcrtttccgtggatgtctggcacatcctggaattcgactatagcaggctccccaaacaaagcatcgggcagttccatgagggggatgcctatgtggtcaagtg

SEQ ID NO: 6450 - DNA, 201 bp, Homo sapiens
cacttcctaaagttgcagaattaagacaaatctttgaaccaaagaagaaagaattcttagaaatgaaaagaaaagaaagaattgccaggcgcctggaaggrattgaaaatgacactcagcccatcctcttgcagagctgcacaggattggtgactcaccgcctgctggaggaagacacccctcgatacatgagagccagcg

SEQ ID NO: 6451 - DNA, 201 bp, Homo sapiens
ccacaatgcaagtgccactgactataagttttcttcttcaatagaaaattcggactctccagttagaagcattctgaaatcgcaagcttggcagcctttgrtagagggtagcgagaacaagggaatgttgagagaatatggagagacagaaagcaagagagctttgacaggtcgagacagtgggatggagaagtatgggtc

SEQ ID NO: 6452 - DNA, 201 bp, Homo sapiens
tcattcactttcaagatttgttttggtgtcaaaataacatgaaaaggtagatggagttgcttctgttgaattagctctgccaccaatatgtatcttcatayacgtttggaaatgtttcctgcagcattaggtatgacttgttctgagtactgcttccggtgctaaaatgaacaaagaatttgtacttaatggcatggactc

SEQ ID NO: 6453 - DNA, 201 bp, Homo sapiens
atccaaggactatgccctccatgtgggtgacggctcttccgacccggaggtgctgctgaacatagaaaaccaaagacgaggtcaagagctgagtgccaccyggcaggcccatgacctgtccccagcagccgagagttcctcgaccttctctttctctgggcgagactcctccttcactgaagtgccacggtcccccaagca

SEQ ID NO: 6454 - DNA, 201 bp, Homo sapiens
tgctcccttctgcaacccaaagaggtactggtgtttgattttggtagtgaagtttacgtatggcatgggaaagaagtcacattagcacaacgaaaaatagmatttcagctggcaaagcacttatggaatggaacctttgactatgagaactgtgacatcaatcccctggatcctggagaatgcaatccgcttatccccaga

SEQ ID NO: 6455 - DNA, 201 bp, Homo sapiens
actcagcctttgatagggtccccagcaaggcagcaggctctacacgacagccaatccgtggctatgtccaacccgcagataccggtcacaccgccaagctrgtgacgccagaaaccccagaaaatgcatctgagtgtagctgggtagcatcagccacccagaatgtccccaaacctcccagcttgacggttctagaaggtg

SEQ ID NO: 6456 - DNA, 201 bp, Homo sapiens
gaaggaattaatacacacactcatgcagccaaagacttctggaagcttctgggtggccaaaccagttaccaatctgctggagacccaaaagaagatgaackctatgaagcagccataatagaaactaactgcatttaccgtctcatggatgacaaacttgttcctgatgacgactactgggggaaaattccgaagtgctcc

SEQ ID NO: 6457 - DNA, 201 bp, Homo sapiens
acaaggaagaccccaggactgatgtcaaggcatacgatgtgacacggatggtgtccatgccccagacgacagcaggcaccatcctggacggagtgaacgtyggccgtggctatggcctggtggaaggacacgacaggaggcagtttgagatcaccagcgtttccgtggatgtctggcacatcctggaattcgactatagca

SEQ ID NO: 6458 - DNA, 201 bp, Homo sapiens
aggccttgaagtataaggacccagcttccaggagagagctggagctgcccagctccaagaccgaagggccttatggggagatcagcatgctggacacaaargtctctgtcgcccagctccgaagtgcgttcctggcatctgccaacgcctgcaggagacctgaactcaaatcacgggtggagaggtcggctgaaggacctg

SEQ ID NO: 6459 - DNA, 201 bp, Homo sapiens
ccagaacttccatggtggtgcttaacgtcaacaaggccctcatctacctgtggcacggatgcaaagcccaggcccacacgaaggaggtcggaaggaccgcygcgaacaagatcaaggaacaatgtcccctggaagcaggactgcatagtagcagcaaagtcacaatacacgagtgtgatgaaggctccgagccactcggat

SEQ ID NO: 6460 - DNA, 201 bp, Homo sapiens
agatcagcatgctggacacaaaagtctctgtcgcccagctccgaagtgcgttcctggcatctgccaacgcctgcaggagacctgaactcaaatcacgggtrgagaggtcggctgaaggacctggcttgcccaccggtgtggaacgggagagagggtcccggaaaccaagacgctatttttctcctggtgaaagtagaaaaa

SEQ ID NO: 6461 - DNA, 201 bp, Homo sapiens
ctcagcagctcctctggggattttgcagccacagagtttgtgtaccctgcccgagccccctctgtggtcagttccatgcccttcctgcaggaagatctgtwcagcgcgccccagccagcacttttccttgttgacaatcaccacgaggtgtacctctggcaaggctggtggcccatcgagaacaagatcactggttccgcc

SEQ ID NO: 6462 - DNA, 201 bp, Homo sapiens
acacggaagtttccaatcagatcaccctcgtggaagacgtcttagccaagctctgtaaaaccatttacccgctggccgacctcctggccaggccactcccrgagggggtcgatcctctgaagcttgagatctatctcaccgacgaagacttcgagtttgcactagacatgacgagggatgaatacaacgccctgcccgcct

SEQ ID NO: 6463 - DNA, 201 bp, Homo sapiens
ttgaagaaaagcggggaggaagattggagaaacagactcagcaggaggcaggagggcggcaaggcgccggccagcagcctgcacacccaggaagcagggcrgtccctcatcaagaagcgggtcacagaaagtcgagagagccaaatgacgattgaggagaggaagcagctcatcactgtgagagaggaggcctggaagacg

SEQ ID NO: 6464 - DNA, 201 bp, Homo sapiens
tgactcaccgcctgctggaggaagacacccctcgatacatgagagccagcgaccctgccagcccccacatcggccgatcaaatgaagaggaggaaacttcygattcttctctagaaaagcaaactcgatccaaatactgcacagaaacctccggtgtccacggtgactcaccctatggttcgggtaccatggacacccaca

SEQ ID NO: 6465 - DNA, 201 bp, Homo sapiens
aggcagaggagcggccaacgactcgacccagttcactgtggctggcaggatggtgaagaaaggtttggcgtcacctactgccataaccccagtagcctcasccatttgcggtaaaacaagaggcaccacacccgtttccaaacccctggaagatatcgaagccagaccagatatgcagttagaatcggacctgaagttgga

SEQ ID NO: 6466 - DNA, 201 bp, Homo sapiens
gatccaaatactgcacagaaacctccggtgtccacggtgactcaccctatggttcgggtaccatggacacccacagtctggagtccaaagccgaaagaatygcaaggtacaaagcagaaagaaggcgacagctggcagagaagtatgggctgactctggatcccgaggccgactccgagtatttatcccgctataccaagt

SEQ ID NO: 6467 - DNA, 201 bp, Homo sapiens
ccgagtatttatcccgctataccaagtccaggaaggagcctgatgctgtcgagaagcggggaggaaaaagtgacaaacaggaagagtcaagcagagatgckagttctctgtaccccgggaccgagacgatggggctcaggacctgtgccggtgaatccaaggactatgccctccatgtgggtgacggctcttccgacccgg

SEQ ID NO: 6468 - DNA, 201 bp, Homo sapiens; identical to SEQ ID NO: 6450

SEQ ID NO: 6469 - DNA, 201 bp, Homo sapiens; identical to SEQ ID NO: 6451

SEQ ID NO: 6470 - DNA, 201 bp, Homo sapiens; identical to SEQ ID NO: 6452

SEQ ID NO: 6471 - DNA, 201 bp, Homo sapiens; identical to SEQ ID NO: 6438

SEQ ID NO: 6472 - DNA, 201 bp, Homo sapiens; identical to SEQ ID NO: 6439

SEQ ID NO: 6473 - DNA, 201 bp, Homo sapiens; identical to SEQ ID NO: 6440

SEQ ID NO: 6474 - DNA, 201 bp, Homo sapiens; identical to SEQ ID NO: 6441

SEQ ID NO: 6475 - DNA, 201 bp, Homo sapiens; identical to SEQ ID NO: 6453

SEQ ID NO: 6476 - DNA, 106 bp, Homo sapiens
tcggcrggaagcggcgatcctgccaccgggaggtgtggaagagccgggtagattctggctacattggagattggttgctttctaaaactgaaggagaagcccatga

SEQ ID NO: 6477 - DNA, 201 bp, Homo sapiens; identical to SEQ ID NO: 6454

SEQ ID NO: 6478 - DNA, 201 bp, Homo sapiens; identical to SEQ ID NO: 6456

SEQ ID NO: 6479 - DNA, 201 bp, Homo sapiens; identical to SEQ ID NO: 6457

SEQ ID NO: 6480 - DNA, 201 bp, Homo sapiens; identical to SEQ ID NO: 6442

SEQ ID NO: 6481 - DNA, 201 bp, Homo sapiens; identical to SEQ ID NO: 6461

SEQ ID NO: 6482 - DNA, 201 bp, Homo sapiens; identical to SEQ ID NO: 6443

SEQ ID NO: 6483 - DNA, 201 bp, Homo sapiens; identical to SEQ ID NO: 6444

SEQ ID NO: 6484 - DNA, 201 bp, Homo sapiens; identical to SEQ ID NO: 6445

SEQ ID NO: 6485 - DNA, 201 bp, Homo sapiens; identical to SEQ ID NO: 6459

SEQ ID NO: 6486 - DNA, 201 bp, Homo sapiens; identical to SEQ ID NO: 6462

SEQ ID NO: 6487 - DNA, 201 bp, Homo sapiens; identical to SEQ ID NO: 6446

SEQ ID NO: 6488 - DNA, 201 bp, Homo sapiens; identical to SEQ ID NO: 6463

SEQ ID NO: 6489 - DNA, 201 bp, Homo sapiens; identical to SEQ ID NO: 6447

SEQ ID NO: 6490 - DNA, 201 bp, Homo sapiens; identical to SEQ ID NO: 6448

SEQ ID NO: 6491 - DNA, 201 bp, Homo sapiens; identical to SEQ ID NO: 6464

SEQ ID NO: 6492 - DNA, 201 bp, Homo sapiens; identical to SEQ ID NO: 6466

SEQ ID NO: 6493 - DNA, 201 bp, Homo sapiens; identical to SEQ ID NO: 6465

SEQ ID NO: 6494 - DNA, 201 bp, Homo sapiens; identical to SEQ ID NO: 6449

SEQ ID NO: 6495 - DNA, 201 bp, Homo sapiens; identical to SEQ ID NO: 6467

SEQ ID NO: 6496 - DNA, 201 bp, Homo sapiens; identical to SEQ ID NO: 6436

SEQ ID NO: 6497 - DNA, 201 bp, Homo sapiens; identical to SEQ ID NO: 6437

SEQ ID NO: 6498 - DNA, 201 bp, Homo sapiens; identical to SEQ ID NO: 6438

SEQ ID NO: 6499 - DNA, 201 bp, Homo sapiens; identical to SEQ ID NO: 6439

SEQ ID NO: 6500 - DNA, 201 bp, Homo sapiens; identical to SEQ ID NO: 6440

SEQ ID NO: 6501 - DNA, 201 bp, Homo sapiens; identical to SEQ ID NO: 6441

SEQ ID NO: 6502 - DNA, 106 bp, Homo sapiens; identical to SEQ ID NO: 6476

SEQ ID NO: 6503 - DNA, 201 bp, Homo sapiens; identical to SEQ ID NO: 6442

SEQ ID NO: 6504 - DNA, 201 bp, Homo sapiens; identical to SEQ ID NO: 6443

SEQ ID NO: 6505 - DNA, 201 bp, Homo sapiens; identical to SEQ ID NO: 6444

SEQ ID NO: 6506 - DNA, 201 bp, Homo sapiens; identical to SEQ ID NO: 6445

SEQ ID NO: 6507 - DNA, 201 bp, Homo sapiens; identical to SEQ ID NO: 6446

SEQ ID NO: 6508 - DNA, 201 bp, Homo sapiens; identical to SEQ ID NO: 6447

SEQ ID NO: 6509 - DNA, 201 bp, Homo sapiens; identical to SEQ ID NO: 6448

SEQ ID NO: 6510 - DNA, 201 bp, Homo sapiens; identical to SEQ ID NO: 6449

SEQ ID NO: 6511 - DNA, 201 bp, Homo sapiens; identical to SEQ ID NO: 6450

SEQ ID NO: 6512 - DNA, 201 bp, Homo sapiens; identical to SEQ ID NO: 6451

SEQ ID NO: 6513 - DNA, 201 bp, Homo sapiens; identical to SEQ ID NO: 6452

SEQ ID NO: 6514 - DNA, 201 bp, Homo sapiens; identical to SEQ ID NO: 6453

SEQ ID NO: 6515 - DNA, 201 bp, Homo sapiens; identical to SEQ ID NO: 6454

SEQ ID NO: 6516 - DNA, 201 bp, Homo sapiens; identical to SEQ ID NO: 6455

SEQ ID NO: 6517 - DNA, 201 bp, Homo sapiens; identical to SEQ ID NO: 6456

SEQ ID NO: 6518 - DNA, 201 bp, Homo sapiens; identical to SEQ ID NO: 6457

SEQ ID NO: 6519 - DNA, 201 bp, Homo sapiens; identical to SEQ ID NO: 6458

SEQ ID NO: 6520 - DNA, 201 bp, Homo sapiens; identical to SEQ ID NO: 6459

SEQ ID NO: 6521 - DNA, 201 bp, Homo sapiens; identical to SEQ ID NO: 6460

SEQ ID NO: 6522 - DNA, 201 bp, Homo sapiens; identical to SEQ ID NO: 6461

SEQ ID NO: 6523 - DNA, 201 bp, Homo sapiens; identical to SEQ ID NO: 6462

SEQ ID NO: 6524 - DNA, 201 bp, Homo sapiens; identical to SEQ ID NO: 6463

SEQ ID NO: 6525 - DNA, 201 bp, Homo sapiens; identical to SEQ ID NO: 6464

SEQ ID NO: 6526 - DNA, 201 bp, Homo sapiens; identical to SEQ ID NO: 6465

SEQ ID NO: 6527 - DNA, 201 bp, Homo sapiens; identical to SEQ ID NO: 6466

SEQ ID NO: 6528 - DNA, 201 bp, Homo sapiens; identical to SEQ ID NO: 6467

SEQ ID NO: 6529 - DNA, 201 bp, Homo sapiens
ggcgcggacgtggcggcccgtgacgcccagggccgcacggcgctgttctacgcccgccaggctggaagccagctgtgcgccgacatccttctccagcacgsctgcccgggtgagggcggcagcgcggccaccacgcccagcgcggccaccacgcccagcatcaccgccacgcccagcccccgccgccggagcagcgccgct

SEQ ID NO: 6530 - DNA, 201 bp, Homo sapiens
ttttggcccatgcgcgacacgggccgctcgacaccagcgtagaggacccacagctgcgctccccactccacctggcggccgagctcgcccacgtcgtcatsacgcaactgctgctgtggtacggcgcggacgtggcggcccgtgacgcccagggccgcacggcgctgttctacgcccgccaggctggaagccagctgtgcg

SEQ ID NO: 6531 - DNA, 201 bp, Homo sapiens
gtcccgggcaagcggcccccgagggccatctctgcctttggcccctcagccagcattaacgggctcgtcaaggacatgagcactgtccagatgggtgaagscctggaagccactactcccatgccaagccctagccccagccccagttccctgcagccaccaccagatcagacatccaaacacctgctgaagccagaccgg

SEQ ID NO: 6532 - DNA, 201 bp, Homo sapiens
ccagctccccaagccactcagctgcatccactccggtagctggccaggctagtaacgggggccacactagcgactactcttcttccctcccgtcctcaccraatgttggtcaccgggagctccgagccgaggcagctgcagtggctggattgagcaccccagggtccctgcaccgggcagccaagcgcaggaccagccttt

SEQ ID NO: 6533 - DNA, 201 bp, Homo sapiens
tcctgaactgcgcctgggtgtgctgggcgatgccaggagtgggaagtcatcgctcatccaccgattcctgactggctcataccaggtgctggagaagacasagagtgagcagtacaagaaagaaatgttggtggatggacagacacatctggtgctaatccgagaggaagctggggcacctgatgccaagttctcaggctg

SEQ ID NO: 6534 - DNA, 201 bp, Homo sapiens
tcgtcatcacgcaactgctgctgtggtacggcgcggacgtggcggcccgtgacgcccagggccgcacggcgctgttctacgcccgccaggctggaagccakctgtgcgccgacatccttctccagcacggctgcccgggtgagggcggcagcgcggccaccacgcccagcgcggccaccacgcccagcatcaccgccacgc

SEQ ID NO: 6535 - DNA, 201 bp, Homo sapiens
tgctgtgatcttcgtcttcagcctggaggatgagaacagtttccaggctgtgagccgtctccatgggcagctgagttcccttcgcggggagggacgaggargcctggccttggcactggtggggacacaagacaggatcagtgcttcctcccctcgggtggtgggagatgctcgtgccagagctctgtgcgcggacatgaa

SEQ ID NO: 6536 - DNA, 201 bp, Homo sapiens
ctgcgctccccactccacctggcggccgagctcgcccacgtcgtcatcacgcaactgctgctgtggtacggcgcggacgtggcggcccgtgacgcccaggkccgcacggcgctgttctacgcccgccaggctggaagccagctgtgcgccgacatccttctccagcacggctgcccgggtgagggcggcagcgcggccacc

SEQ ID NO: 6537 - DNA, 201 bp, Homo sapiens
tgtccacaaactcagtgtcagctgatgcaggcatttatccacctccgtgccatcaaagggaccaccaaggccacagcggcctgaagccggtgctgcctccrtgagctgcagtgccactaggctcagcacatagccaatcctaccatttctcgagggcagctgaaagtgtttactcaggtagaggggctggacagggtaggg

SEQ ID NO: 6538 - DNA, 201 bp, Homo sapiens
ggtcagggcatggccttggtcaagatggggtactggggttggacagggacaggcagaggtgcctcccactggggctggtggcaggacagtacccatgggcrtggaggtggttccatcatgtacaacagttctgggttcatgtagtggaggacgtgggcaggttggagtcagtggggaccctgggaacagagaaggcactga

SEQ ID NO: 6539 - DNA, 201 bp, Homo sapiens
caacctatgggctcaatgtggatcgggtcttccaggaggtggcccagaaggtggtgaccttgcgcaagcagcaacagcttctggctgcctgcaagtccctkcccagctccccaagccactcagctgcatccactccggtagctggccaggctagtaacgggggccacactagcgactactcttcttccctcccgtcctcac

SEQ ID NO: 6540 - DNA, 201 bp, Homo sapiens
tgcgtacctgtgactgtgcagcgcccgtggtgatctggggtagggggcacccctacagtgggacccctcccccattattctttctgtccagcccctccctmccactggagcagctccagagccattcctcacccccgtgacctctcccagccagggctgagaggattcgaggtggctgggagggtttccaggccccctgcc

SEQ ID NO: 6541 - DNA, 201 bp, Homo sapiens; identical to SEQ ID NO: 6529

SEQ ID NO: 6542 - DNA, 201 bp, Homo sapiens
cagctttgtttaagagcaggaactttggagacagatctgattttgaaacctgcccctccactgcacagctaggtgcagtgacaagtacagaggcagctccmctccttcctcgtggccaaagtttgctcccttcttcagaagtttgggagtgtgagagaatatgggaaggaaataaggaccctggagagaatgaaattgcct

SEQ ID NO: 6543 - DNA, 201 bp, Homo sapiens; identical to SEQ ID NO: 6530

SEQ ID NO: 6544 - DNA, 201 bp, Homo sapiens; identical to SEQ ID NO: 6531

SEQ ID NO: 6545 - DNA, 201 bp, Homo sapiens
gcagctccactccttcctcgtggccaaagtttgctcccttcttcagaagtttgggagtgtgagagaatatgggaaggaaataaggaccctggagagaatgraattgccttcaaagagcaagtgggaagttcctttcatttccagccagtgaaaaatggtcaaggtgtcagcaaacctcacaacaaatcccaacaccaagta

SEQ ID NO: 6546 - DNA, 201 bp, Homo sapiens; identical to SEQ ID NO: 6532

SEQ ID NO: 6547 - DNA, 135 bp, Homo sapiens
agccctccaggttatgacaaaataggagcccagaaggggactccctgggtgggtgaaggagagctgctgcccctttgtgcccatgcccccttcacagctcrccctgggctgccttgcttggatgccctgccatgc

SEQ ID NO: 6548 - DNA, 201 bp, Homo sapiens; identical to SEQ ID NO: 6533

SEQ ID NO: 6549 - DNA, 201 bp, Homo sapiens; identical to SEQ ID NO: 6534

SEQ ID NO: 6550 - DNA, 201 bp, Homo sapiens; identical to SEQ ID NO: 6535

SEQ ID NO: 6551 - DNA, 201 bp, Homo sapiens; identical to SEQ ID NO: 6536

SEQ ID NO: 6552 - DNA, 201 bp, Homo sapiens; identical to SEQ ID NO: 6538

SEQ ID NO: 6553 - DNA, 201 bp, Homo sapiens; identical to SEQ ID NO: 6539

SEQ ID NO: 6554 - DNA, 201 bp, Homo sapiens; identical to SEQ ID NO: 6540

SEQ ID NO: 6555 - DNA, 201 bp, Homo sapiens; identical to SEQ ID NO: 6529

SEQ ID NO: 6556 - DNA, 201 bp, Homo sapiens
atggagaggggtgggaagatgggacagctttgtttaagagcaggaactttggagacagatctgattttgaaacctgcccctccactgcacagctagctccmctccttcctcgtggccaaagtttgctcccttcttcagaagtttgggagtgtgagagaatatgggaaggaaataaggaccctggagagaatgaaattgcct

SEQ ID NO: 6557 - DNA, 201 bp, Homo sapiens; identical to SEQ ID NO: 6530

SEQ ID NO: 6558 - DNA, 201 bp, Homo sapiens; identical to SEQ ID NO: 6531

SEQ ID NO: 6559 - DNA, 201 bp, Homo sapiens
ctagctccactccttcctcgtggccaaagtttgctcccttcttcagaagtttgggagtgtgagagaatatgggaaggaaataaggaccctggagagaatgraattgccttcaaagagcaagtgggaagttcctttcatttccagccagtgaaaaatggtcaaggtgtcagcaaacctcacaacaaatcccaacaccaagta

SEQ ID NO: 6560 - DNA, 201 bp, Homo sapiens; identical to SEQ ID NO: 6532

SEQ ID NO: 6561 - DNA, 135 bp, Homo sapiens; identical to SEQ ID NO: 6547

SEQ ID NO: 6562 - DNA, 201 bp, Homo sapiens; identical to SEQ ID NO: 6533

SEQ ID NO: 6563 - DNA, 201 bp, Homo sapiens; identical to SEQ ID NO: 6534

SEQ ID NO: 6564 - DNA, 201 bp, Homo sapiens; identical to SEQ ID NO: 6535

SEQ ID NO: 6565 - DNA, 201 bp, Homo sapiens; identical to SEQ ID NO: 6536

SEQ ID NO: 6566 - DNA, 201 bp, Homo sapiens; identical to SEQ ID NO: 6538

SEQ ID NO: 6567 - DNA, 201 bp, Homo sapiens; identical to SEQ ID NO: 6539

SEQ ID NO: 6568 - DNA, 201 bp, Homo sapiens; identical to SEQ ID NO: 6540

SEQ ID NO: 6569 - DNA, 201 bp, Homo sapiens; identical to SEQ ID NO: 6529

SEQ ID NO: 6570 - DNA, 201 bp, Homo sapiens; identical to SEQ ID NO: 6530

SEQ ID NO: 6571 - DNA, 201 bp, Homo sapiens; identical to SEQ ID NO: 6531

SEQ ID NO: 6572 - DNA, 201 bp, Homo sapiens; identical to SEQ ID NO: 6532

SEQ ID NO: 6573 - DNA, 201 bp, Homo sapiens; identical to SEQ ID NO: 6533

SEQ ID NO: 6574 - DNA, 201 bp, Homo sapiens; identical to SEQ ID NO: 6534

SEQ ID NO: 6575 - DNA, 201 bp, Homo sapiens; identical to SEQ ID NO: 6535

SEQ ID NO: 6576 - DNA, 201 bp, Homo sapiens; identical to SEQ ID NO: 6536

SEQ ID NO: 6577 - DNA, 201 bp, Homo sapiens; identical to SEQ ID NO: 6537

SEQ ID NO: 6578 - DNA, 201 bp, Homo sapiens; identical to SEQ ID NO: 6538

SEQ ID NO: 6579 - DNA, 201 bp, Homo sapiens; identical to SEQ ID NO: 6539

SEQ ID NO: 6580 - DNA, 201 bp, Homo sapiens; identical to SEQ ID NO: 6540

SEQ ID NO: 6581 - DNA, 201 bp, Homo sapiens
tcattgacctcaactacatggtctgtgtgttccagtatgattttgtctgtggcaaattccatggcactgccaaggctgagaatgggaagcttgtcatcaaygaaaatcctatcaccatcttccaggagcgagatccctccaaaatcagatggggcaatgctggtgctgagtatatcatggaatccaccggtgtcttcacca

SEQ ID NO: 6582 - DNA, 201 bp, Homo sapiens
gatccctccaaaatcagatggggcaatgctggtgctgagtatatcatggaatccaccggtgtcttcaccaccatggagaaggctgggactcacttgcagcrgggagccaaaagggtcatcatctctgccccttctgctgacacccccatgtctgtgatgggcatgaagcatgagaagtaatgacaacagcctcaagatcat

SEQ ID NO: 6583 - DNA, 201 bp, Homo sapiens
gcggtttttaactctggtaaagtggatattgttgccatcaatgaccccttcattgacctcaactacatggtctgtgtgttccagtatgattttgtctgtgrcaaattccatggcactgccaaggctgagaatgggaagcttgtcatcaacgaaaatcctatcaccatcttccaggagcgagatccctccaaaatcagatgg

SEQ ID NO: 6584 - DNA, 201 bp, Homo sapiens
caactcaacaagagcaaaacacaaaggctgctaccaagtgttgttgtatttcagttcctttcataggcctccgaggtggccattgactatttggggtatayatgtcatatttattttatctagagtagctggggcagccattttcaggtgtaaatggcagaggactcttcagcctgtcaagctgccagcttatctacgggt

SEQ ID NO: 6585 - DNA, 201 bp, Homo sapiens
tgaagttcccccttatatatggagaaggcaagaaggcccgggtaatggcaactattggagtgaccaggggacttggggaccatgacctgaaggtgcatgaytccaacatctacattaaaccattcctgtcttcagctccagaggtaagaatctacgatctttcaaaatatgatcatggatcagatgatgtgctgatcttgg

SEQ ID NO: 6586 - DNA, 201 bp, Homo sapiens
cgccgtggtgctcctgtctatgctgagagagggaaccagtgtatctgtgggcaccatgcagatggcgggagaagaggcgagtgaagatgcaaaacagaagmttttcatgcaggaatcagatgcctcgaatttcctcaagaggcgcggcaagcggtcccccaagtcccgagatgaggtcaatgtggaaaacaggcagaagct

SEQ ID NO: 6587 - DNA, 201 bp, Homo sapiens
aacaggcagaagcttcgggttgatgagctgcggagagaatattacgaggaacaaaggaatgaatttgagaacttcgtggaggaacaaaacgatgagcaggragagaggagccgggaggctgtggagcagtggcgccagtggcactatgacggcctgcacccatcctatctctacaaccgccaccacacctgatcccatcct

SEQ ID NO: 6588 - DNA, 201 bp, Homo sapiens
agcggaacaaaaatgttgaccagtatgttgtcagggtccaagagatatactgccattggagaactggggaaagctactgatacactagattctacggggarggtaacagaagaaaaaccttacgataaaataacacaagaagatattgaaggcattctacagaaatttactggaaatataatgcaagtgccccccctctat

SEQ ID NO: 6589 - DNA, 201 bp, Homo sapiens
cagtgagcccaggaagccatggatcttcacaagcctcaggaaaagtcaacatttaaaattttctatttaaagtccaagggcacagcaagctcttggtctakatgggaaggccatggactacaattcccacaagtccgtgcgacctctccgttctgcgcagcttcgcggtatgaggaagagggtcctgtcaggcgcactctt

SEQ ID NO: 6590 - DNA, 201 bp, Homo sapiens
taccaagttattaagtaacataatttttaaaatttaaagaatgtgtcttcaactaaaaactttattctttagcatttatttatatttctctgtagggtgtwccctgtgacattgtctctttagtttgctctttcaagagatacttacagatgttgagatggctgccctgcatttccagctaatctcttctgctctaaatat

SEQ ID NO: 6591 - DNA, 201 bp, Homo sapiens
ttttttgcatgaagaaaaatgtctatcatttacagtttcaatagcacataatttattttctatgcattataaatggccttgcagttggctcagttgtttgytgtgttgtgaaatgttttaggattttttgtattgtgaaaatatgaatatgattggattcagaaaaattaactttctgaatttgatctgtcttcagtcttg

SEQ ID NO: 6592 - DNA, 201 bp, Homo sapiens
ggcgtgttcgccgtgcacaagcccaaagggcccacttcagccgagctgctgaatcggttgaaggagaagctgctggcagaagctggaatgccttctccagmatggaccaagaggaaaaagcagactttgaaaattgggcatggagggactctagacagcgcagcccgaggagttctggttgttggaattggaagcggaaca

SEQ ID NO: 6593 - DNA, 201 bp, Homo sapiens
atgggaaggccatggactacaattcccacaagtccgtgcgacctctccgttctgcgcagcttcgcggtatgaggaagagggtcctgtcaggcgcactcttsttgcatcatcagcgtgcacctccacgatgaaacaggtctgggctacaaaagtatggccgcttctgaggcggcggtggtgtcttcgccgtctttgaaaaca

SEQ ID NO: 6594 - DNA, 201 bp, Homo sapiens
gaacctgaatgtaagagcacaatacaatcaatgaagcagtgagcccaggaagccatggatcttcacaagcctcaggaaaagtcaacatttaaaattttctrtttaaagtccaagggcacagcaagctcttggtctatatgggaaggccatggactacaattcccacaagtccgtgcgacctctccgttctgcgcagcttcg

SEQ ID NO: 6595 - DNA, 201 bp, Homo sapiens
actctagacagcgcagcccgaggagttctggttgttggaattggaagcggaacaaaaatgttgaccagtatgttgtcagggtccaagagatatactgccaytggagaactggggaaagctactgatacactagattctacggggagggtaacagaagaaaaaccttacgataaaataacacaagaagatattgaaggcatt

SEQ ID NO: 6596 - DNA, 201 bp, Homo sapiens
aaaaacgatagccactctttttcttttatgtttaaaactgaagttttgccaaatgggaaaattactgttacctctaccatcttaatgtagtaactttagawtttaaatttttatattactattttcctttttgttgttcacatagtcttaaggcacctatacttttaaattgactttttcatttgatattatctatatgta

SEQ ID NO: 6597 - DNA, 201 bp, Homo sapiens
atcatgccattgcactccagcctgggcaacaagaggaaaacccagtctcaaaaaaaaaaaaaaaatcatgtgggtattgcttaattctgatttcatatcaytgaacactgtagatattaaaatgttcagcaggcacagttctgtaaaattgttcgtgatacattaagaatgaaagaatcaagttgtataataaggataaca

SEQ ID NO: 6598 - DNA, 201 bp, Homo sapiens
aaactagctgggcattgtggcacatgcctgcaatcccagctacttgagaggctggggcaggagaatcactagaaccgggaggcggaagttgcagtgagccmagatcatgccattgcactccagcctgggcaacaagaggaaaacccagtctcaaaaaaaaaaaaaaaatcatgtgggtattgcttaattctgatttcatat

SEQ ID NO: 6599 - DNA, 201 bp, Homo sapiens
ccatgtgataggagacagtcggcacccccctctgaatttctgcatctgcatcttaacaatggggatgactatcccctctctggttattgtatcagagatgytaagagggtcatgtggcatgattggagaacctgggggaattggaaggccttattatctcagctattgtcccaaacaccacagacacagattgggtcagtc

SEQ ID NO: 6600 - DNA, 201 bp, Homo sapiens
cccatggcagcagaaccaggatggagctgggactgtccagctctgccccctgctgctgccatgtgataggagacagtcggcacccccctctgaatttctgyatctgcatcttaacaatggggatgactatcccctctctggttattgtatcagagatgctaagagggtcatgtggcatgattggagaacctgggggaattg

SEQ ID NO: 6601 - DNA, 201 bp, Homo sapiens
tggatttgaaaataccttcagcacttagaagagacattcaaatacatttcatttcctgttacccagattgttcggaaagtattaaaaatttttcatttacmtgctgatacggtttggatctgtgtccctaacaaatcccatgtcgagctgtggtccccggtgttggagatggagcctggtgggaggcagctggatcgtgag

SEQ ID NO: 6602 - DNA, 201 bp, Homo sapiens
gggaaacaaatgtccagatgccagcctcatagttgaacttggatttgaaaataccttcagcacttagaagagacattcaaatacatttcatttcctgttayccagattgttcggaaagtattaaaaatttttcatttacatgctgatacggtttggatctgtgtccctaacaaatcccatgtcgagctgtggtccccggtg

SEQ ID NO: 6603 - DNA, 201 bp, Homo sapiens
agagctaaagcactaatcaaatcggggggtgttagagcaaaaacaggcttcagaaagagtattttaccatgcttcacatggaaaaaatcgagccccggagmgatgaaaggcatattttctttgtttctccaagtttcataaccgttcagttgcagaaccaagaatctaaaaccagctctgggaaacaaatgtccagatgcc

SEQ ID NO: 6604 - DNA, 201 bp, Homo sapiens
ttcttttatataaataggaaaacaaaggcagagagctaaagcactaatcaaatcggggggtgttagagcaaaaacaggcttcagaaagagtattttaccaygcttcacatggaaaaaatcgagccccggagcgatgaaaggcatattttctttgtttctccaagtttcataaccgttcagttgcagaaccaagaatctaaa

SEQ ID NO: 6605 - DNA, 201 bp, Homo sapiens
agcctgcagaactgtggaccaatcaaacctcttttcttataaattacctggtcttggggatttctttatttaatgtgagaacgcatgcccttttggatctrctgtttctacttttataaatttatcatgcagaaatacacaaatacacaaagatacatgtaaaaaaagtagtttactgcagtactgtttgtaataataaaa

SEQ ID NO: 6606 - DNA, 201 bp, Homo sapiens
tgatacggtttggatctgtgtccctaacaaatcccatgtcgagctgtggtccccggtgttggagatggagcctggtgggaggcagctggatcgtgaggtcrtgggggtggagttctcacgaaggagttagcatcatccccttggcgctgttctcgtgatagtaagttctcgtgagatctggttgtttaaaagtgtgcagca

SEQ ID NO: 6607 - DNA, 201 bp, Homo sapiens
acctcttttcttataaattacctggtcttggggatttctttatttaatgtgagaacgcatgcccttttggatctgctgtttctacttttataaatttatcmtgcagaaatacacaaatacacaaagatacatgtaaaaaaagtagtttactgcagtactgtttgtaataataaaaaatcaggctggacgtggtggttcatg

SEQ ID NO: 6608 - DNA, 201 bp, Homo sapiens
cacagaccacaaatgaccaaaagggtaatatccccgatgaaagccaagtggagaaactgaacgttttcctttctcctcctgatgtcatcaactatcttgcyctcacagaagccacaggacggatatgtgtgtctcagtgggaaggccccccacgtttgggatgcatattttgccacggagatcatcttctggcagtgaatg

SEQ ID NO: 6609 - DNA, 201 bp, Homo sapiens
aggaattgattggtgtctttcccctgccgatgtggaagcacagaccacaaatgaccaaaagggtaatatccccgatgaaagccaagtggagaaactgaacrttttcctttctcctcctgatgtcatcaactatcttgctctcacagaagccacaggacggatatgtgtgtctcagtgggaaggccccccacgtttgggatg

SEQ ID NO: 6610 - DNA, 201 bp, Homo sapiens
agagcctggaggaggtctccctgtttcttacccggtccatccagaaggagaaattaaagcttaccatcggcaggatcccaaattcagagacattccatgcygcatcctgtatgtgtccctcaaaatgccaaagtgctgcaccttctcagctggataagcctagactgaacagagctcccaagaggagtccggccattaaaa

SEQ ID NO: 6611 - DNA, 201 bp, Homo sapiens
tctctactaaaaatacaaaactagctgggcattgtggcacatgcctgcaatcccagctacttgagaggctggggcaggagaatcactagaaccgggaggcsgaagttgcagtgagccaagatcatgccattgcactccagcctgggcaacaagaggaaaacccagtctcaaaaaaaaaaaaaaaatcatgtgggtattgct

SEQ ID NO: 6612 - DNA, 201 bp, Homo sapiens; identical to SEQ ID NO: 6597

SEQ ID NO: 6613 - DNA, 201 bp, Homo sapiens; identical to SEQ ID NO: 6598

SEQ ID NO: 6614 - DNA, 201 bp, Homo sapiens; identical to SEQ ID NO: 6599

SEQ ID NO: 6615 - DNA, 201 bp, Homo sapiens; identical to SEQ ID NO: 6600

SEQ ID NO: 6616 - DNA, 201 bp, Homo sapiens; identical to SEQ ID NO: 6601

SEQ ID NO: 6617 - DNA, 201 bp, Homo sapiens; identical to SEQ ID NO: 6602

SEQ ID NO: 6618 - DNA, 201 bp, Homo sapiens; identical to SEQ ID NO: 6603

SEQ ID NO: 6619 - DNA, 201 bp, Homo sapiens; identical to SEQ ID NO: 6604

SEQ ID NO: 6620 - DNA, 201 bp, Homo sapiens; identical to SEQ ID NO: 6605

SEQ ID NO: 6621 - DNA, 201 bp, Homo sapiens; identical to SEQ ID NO: 6606

SEQ ID NO: 6622 - DNA, 201 bp, Homo sapiens; identical to SEQ ID NO: 6607

SEQ ID NO: 6623 - DNA, 201 bp, Homo sapiens; identical to SEQ ID NO: 6608

SEQ ID NO: 6624 - DNA, 201 bp, Homo sapiens; identical to SEQ ID NO: 6609

SEQ ID NO: 6625 - DNA, 201 bp, Homo sapiens; identical to SEQ ID NO: 6610

SEQ ID NO: 6626 - DNA, 201 bp, Homo sapiens; identical to SEQ ID NO: 6611

SEQ ID NO: 6627 - DNA, 201 bp, Homo sapiens; identical to SEQ ID NO: 6597

SEQ ID NO: 6628 - DNA, 201 bp, Homo sapiens; identical to SEQ ID NO: 6598

SEQ ID NO: 6629 - DNA, 201 bp, Homo sapiens; identical to SEQ ID NO: 6599

SEQ ID NO: 6630 - DNA, 201 bp, Homo sapiens; identical to SEQ ID NO: 6600

SEQ ID NO: 6631 - DNA, 201 bp, Homo sapiens; identical to SEQ ID NO: 6601

SEQ ID NO: 6632 - DNA, 201 bp, Homo sapiens; identical to SEQ ID NO: 6602

SEQ ID NO: 6633 - DNA, 201 bp, Homo sapiens; identical to SEQ ID NO: 6603

SEQ ID NO: 6634 - DNA, 201 bp, Homo sapiens; identical to SEQ ID NO: 6604

SEQ ID NO: 6635 - DNA, 201 bp, Homo sapiens; identical to SEQ ID NO: 6605

SEQ ID NO: 6636 - DNA, 201 bp, Homo sapiens; identical to SEQ ID NO: 6606

SEQ ID NO: 6637 - DNA, 201 bp, Homo sapiens; identical to SEQ ID NO: 6607

SEQ ID NO: 6638 - DNA, 201 bp, Homo sapiens; identical to SEQ ID NO: 6608

SEQ ID NO: 6639 - DNA, 201 bp, Homo sapiens; identical to SEQ ID NO: 6609

SEQ ID NO: 6640 - DNA, 201 bp, Homo sapiens; identical to SEQ ID NO: 6610

SEQ ID NO: 6641 - DNA, 201 bp, Homo sapiens; identical to SEQ ID NO: 6611

SEQ ID NO: 6642 - DNA, 201 bp, Homo sapiens
gaccacaaatgaccaaaaggggtcggcctcactaactgttgtgcaattgtctatattaatcaataatatccccgatgaaagccaagtggagaaactgaacrttttcctttctcctcctgatgtcatcaactatcttgctctcacagaagccacaggacggatatgtgtgtctcagtgggaaggcccccgacgtttgggatg

SEQ ID NO: 6643 - DNA, 201 bp, Homo sapiens; identical to SEQ ID NO: 6599

SEQ ID NO: 6644 - DNA, 201 bp, Homo sapiens
agagctaaagcactaatcaaatcggggggtgttagagcaaaaacaggcttcagaaagagtattttaccatgcttcacatgaaaaaaatcgagccccggagmgatgaaaggcatattttctttgtttctccaagtttcataaccgttcagttgcagaaccaagaatctaaaaccagctctgggaaacaaatgtccagatgcc

SEQ ID NO: 6645 - DNA, 201 bp, Homo sapiens
ttcttttatataaataggaaaacaaaggcagagagctaaagcactaatcaaatcggggggtgttagagcaaaaacaggcttcagaaagagtattttaccaygcttcacatgaaaaaaatcgagccccggagcgatgaaaggcatattttctttgtttctccaagtttcataaccgttcagttgcagaaccaagaatctaaa

SEQ ID NO: 6646 - DNA, 201 bp, Homo sapiens
ttgtgcaattgtctatattaatcaataatatccccgatgaaagccaagtggagaaactgaacgttttcctttctcctcctgatgtcatcaactatcttgcyctcacagaagccacaggacggatatgtgtgtctcagtgggaaggcccccgacgtttgggatgcatattttgccacggagatcatcttctggcagtgaatg

SEQ ID NO: 6647 - DNA, 201 bp, Homo sapiens; identical to SEQ ID NO: 6610

SEQ ID NO: 6648 - DNA, 201 bp, Homo sapiens; identical to SEQ ID NO: 6600

SEQ ID NO: 6649 - DNA, 139 bp, Homo sapiens
cctgaatccttggagactgacatttttcccccctaaagscatagacaacaaaagaaattttattgagaggaaaacacaagtccttaaactgcaaagatgtttgccaggatgtctgatctccatgttctgctgttaatgg

SEQ ID NO: 6650 - DNA, 127 bp, Homo sapiens
cctgaatccttggagactgacattttycccccctaaaggcatagacaacaaaagaaattttattgagaggaaaacacaagtccttaaactgcaaagatgtttgccaggatgtctgatctccatgttc

SEQ ID NO: 6651 - DNA, 201 bp, Homo sapiens
gtcccgaccagttcaaggggaaattctgtgaaataggttctgatgactgctatgttggcgatggctactcttaccgagggaaaatgaataggacagtcaaycagcatgcgtgcctttactggaactcccacctcctcttgcaggagaattacaacatgtttatggaggatgctgaaacccatgggattggggaacacaatt

SEQ ID NO: 6652 - DNA, 201 bp, Homo sapiens
ctgggctgccctggcccgggattgatgtagccccggtaggtttgcctctgcagaactaatggctgtgacttcagagaaagccctgcaggaagtttaacctrcgtgtcatctgcctggtcatctcagacccatgaaattaggcgccttgtttgagctgcgtttcacacttctttagagctagctgacctttggccaaaaata

SEQ ID NO: 6653 - DNA, 201 bp, Homo sapiens
ctttctctgggaataagtgtcagaaagtgcaaaatacgtgcaaggacaacccatgtggccggggccaatgtctcattacccagagtcctccctactaccgmtgtgtctgtaaacacccttacacaggtcccagctgctcccaagtggttcctgtatgcaggccaaacccctgccagaatggggctacctgctcccggcata

SEQ ID NO: 6654 - DNA, 201 bp, Homo sapiens
aaagccccactgagccatcaaccaagcttccggggtttgactcctgtggaaagactgagatagcagagaggaagatcaagagaatctatggaggctttaaragcacggcgggcaagcacccatggcaggcgtccctccagtcctcgctgcctctgaccatctccatgccccagggccacttctgtggtggggcgctgatcc

SEQ ID NO: 6655 - DNA, 201 bp, Homo sapiens
gctttaagagcacggcgggcaagcacccatggcaggcgtccctccagtcctcgctgcctctgaccatctccatgccccagggccacttctgtggtggggcrctgatccacccctgctgggtgctcactgctgcccactgcaccgacataaaaaccagacatctaaaggtggtgctaggggaccaggacctgaagaaagaag

SEQ ID NO: 6656 - DNA, 201 bp, Homo sapiens
gctttagggtggagaagatattcaagtacagccactacaatgaaagagatgagattccccacaatgatattgcattgctcaagttaaagccagtggatggycactgtgctctagaatccaaatacgtgaagactgtgtgcttgcctgatgggtcctttccctctgggagtgagtgccacatctctggctggggtgttacag

SEQ ID NO: 6657 - DNA, 201 bp, Homo sapiens
agcctgggctgccctggcccgggattgatgtagccccggtaggtttgcctctgcagaactaatggctgtgacttcagagaaagccctgcaggaagtttaamctgcgtgtcatctgcctggtcatctcagacccatgaaattaggcgccttgtttgagctgcgtttcacacttctttagagctagctgacctttggccaaaa

SEQ ID NO: 6658 - DNA, 201 bp, Homo sapiens
cccggttcccacaggacacgctaagaagcacagggagcatttaacaggctcaccctccctttccttttcccctcttctaccctccccaagaaaaagggccktcaaggcaggaatgagaaagcaaagccaatctctcatttagacctggcttctttcttctgaacaaagtagggttcaaaatgcagactgtcatatccagcg

SEQ ID NO: 6659 - DNA, 201 bp, Homo sapiens
ctttattggaaagcctggacccagactggacccctgaccagtatgattacagctacgaggattataatcaggaagagaacaccagtagcacacttacccaygctgagaatcctgactggtactacactgaggaccaagctgatccatgccagcccaacccctgtgaacacggtggggactgcctcgtccatgggagcacct

SEQ ID NO: 6660 - DNA, 201 bp, Homo sapiens
gggcaagacacctgccagggtgactctggaggccccctgacctgtgagaaggacggcacctactacgtctatgggatagtgagctggggcctggagtgtgrgaagaggccaggggtctacacccaagttaccaaattcctgaattggatcaaagccaccatcaaaagtgaaagtggcttctaaggtactgtcttctggacc

SEQ ID NO: 6661 - DNA, 201 bp, Homo sapiens
gaagaagatgatgacagctgtggtttttttaaaaaacgacatggtcccttactgaaggaccaggatgagagctgccccaaagtgaacagcttcttaactcrggataagtatgatgaaggattgtatagattcaatagtctaaatgatttgtctcaacctatttctcaaaataatgagagtactttgccttatgatctggca

SEQ ID NO: 6662 - DNA, 201 bp, Homo sapiens
acacattttcattctgatcattatgctggattgtctaaacacttcacatttccagtttattgtagtgagataactggcaatttgttgaagaacaagcttcrtgtgcaagaacaatatattcacccattgccactggacactgaatgtattgtgaatggtgtcaaagttgttttgcttgatgccaatcactgtccaggtgct

SEQ ID NO: 6663 - DNA, 201 bp, Homo sapiens
gaggtgaaggaccatgaagtgccccttggaaatgcaggttgtcagacttctgttgcttctagtcagaattcaagttgtggagatggtattcagcagacccragacaaggaaactactccaggaaaactctgtagaactcaaaaaagccaacacgtgtccccaaagatacgtccagtttatgatggatactgtccaaattgc

SEQ ID NO: 6664 - DNA, 201 bp, Homo sapiens
aaataatggctctaaaaatattctaaaatctgttgaaaaagcaacagatggaaaataccagtcaaaacggagtagaaacagaaaaagagccgcagaagctraagaggtgaaggaccatgaagtgccccttggaaatgcaggttgtcagacttctgttgcttctagtcagaattcaagttgtggagatggtattcagcagac

SEQ ID NO: 6665 - DNA, 201 bp, Homo sapiens
ggaaacatttcaatatatggaattccttacagtgaacacagcagctacctagaaatgaagcgctttgtccagtggctgaagccccagaaaatcatacctastgtaaatgtgggcacctggaaatctaggagcacaatggagaaatattttagagagtggaaattggaagctggatattgatgatacctccgaggattcagt

SEQ ID NO: 6666 - DNA, 201 bp, Homo sapiens
cataaatttgccattgccagaaaatgacttcagtgactgtgaaatctcctattctccacttcaaagtgatgaagacactcatgatatcgatgaaaaaccgsatgattcacaagaacaactgttttttaccgaaagctcaaaagatggcagcctcgaagaagatgatgacagctgtggtttttttaaaaaacgacatggtcc

SEQ ID NO: 6667 - DNA, 201 bp, Homo sapiens
aaacagaaacaggtaattgaagaatcatctgtttacaatcaagtttctcttccgttagttaagagtttaatgttgaaaccttttgaaagtcaggtagaagrgtatctttcttcccaaccaacccaaaatacaattagaaaattatcaagtgagaacttgaatgctaagaataatactaactcagcatgtttctgcagaaag

SEQ ID NO: 6668 - DNA, 201 bp, Homo sapiens
tgtgtggaaaaacctcatgaagattgttcagatactttattttctcatttatgtttgaacaacatgttcgtggtgctgaatgcctctcagcatcatcaagrataactgaaactgggtctccctgggacccttaatttcttgtcccctgccctccatgggcagttatattctgcatcaagccttagaagaggaagcaaaggc

SEQ ID NO: 6669 - DNA, 201 bp, Homo sapiens; identical to SEQ ID NO: 6661

SEQ ID NO: 6670 - DNA, 201 bp, Homo sapiens; identical to SEQ ID NO: 6662

SEQ ID NO: 6671 - DNA, 201 bp, Homo sapiens; identical to SEQ ID NO: 6663

SEQ ID NO: 6672 - DNA, 201 bp, Homo sapiens; identical to SEQ ID NO: 6664

SEQ ID NO: 6673 - DNA, 201 bp, Homo sapiens; identical to SEQ ID NO: 6665

SEQ ID NO: 6674 - DNA, 201 bp, Homo sapiens; identical to SEQ ID NO: 6666

SEQ ID NO: 6675 - DNA, 201 bp, Homo sapiens; identical to SEQ ID NO: 6667

SEQ ID NO: 6676 - DNA, 201 bp, Homo sapiens; identical to SEQ ID NO: 6668

SEQ ID NO: 6677 - DNA, 201 bp, Homo sapiens
gcccggaggccggggccgcagcctctccggcctgctccccgcgcagacctcgctagagtacgccctgctcgacgccgttacccagcaggagaaggacagcytggtctaccagtatctgcagaaggtggacggctgggagcaggacttgtcagtacccgagtttccggaaggattagaatggctgaacacagaagaacctat

SEQ ID NO: 6678 - DNA, 201 bp, Homo sapiens
tccacagggtgtagccataatgaataatatcatatatgtggcagacactgaaaaccaccttataagaaagattgacctagaagctgagaaggtgagcactrtagctggtattggaattcaaggtacagataaagaaggtggagcaaaaggagaacaacaacccattagttccccttgggatgtagtttttggaacatcaga

SEQ ID NO: 6679 - DNA, 201 bp, Homo sapiens
ttgaccatctccgagaaactagggctgacaagaagagactgcggaaagccttaagagaatttgaagaacagttttttaaacaaacaggaaggtatgtgtcrgcagagagatttttaaagctaatacttcctagagaattgctgttaaaaatgagctgcaattttttgcaggaacggtgactttttacaaaatgtatataat

SEQ ID NO: 6680 - DNA, 105 bp, Homo sapiens
gctctaactcccggagagcaatcagggagacggctccccggccagacttggctgatgttttcttgtttctgtttcagccttcaggataattccttcagcagcacc

SEQ ID NO: 6681 - DNA, 106 bp, Homo sapiens
gctctaactcccggagagcaatcagggagacggctccccggccagacttggctgatgttttcttgtttctgtttcagccttcaggataattccttcagcagcacca

SEQ ID NO: 6682 - DNA, 201 bp, Homo sapiens
gtgtcgttacgagcatgtgcagacagcagcccaaggtagagcgagcgtgccgggcgagcccggagacttgccttgcaatgccatgtttgtgtatgtgctctaactcccggagagcaatcagggagacggctccccggccagacttggctgatgttttcttgtttctgtttcagccttcaggataattccttcagcagcacc

SEQ ID NO: 6683 - DNA, 201 bp, Homo sapiens
ccaacactgatattacaggttttgcagctgggatctttctttgcatttgcagtagacaaactcatgagctgatgaccagtgatttctgccacggtgcccasagaaagatccacagggtcagtgtaaatgacttctaaaatgacatcctgggcatggtggtaaaccagcaccccatcttcttctgtacaggtcaaaaattta

SEQ ID NO: 6684 - DNA, 201 bp, Homo sapiens
ttcaaccaagaatagaccagaggactgccatttcgccaaaggatgcttttgaaactcggcaggacttaaatgagaattccttgctgaagctgcaagccctygaatctgatctgtgctctgcatttttaacaaaccaggaagaagctgctcaggtgcatggagtcaaggacccggcgccagcatcaacccagagcgtgcttg

SEQ ID NO: 6685 - DNA, 201 bp, Homo sapiens
tgtcgttacgagcatgtgcagacagcagcccaaggtagagcgagcgtgccgggcgagcccggagacttgccttgcaatgccatgtttgtgtatgtgctctaactcccggagagcaatcagggagacggctccccggccagacttggctgatgttttcttgtttctgtttcagccttcaggataattccttcagcagcacca

SEQ ID NO: 6686 - DNA, 201 bp, Homo sapiens
tccaacatctatactttgtaaagtcaaaacatttcccatgagctgtagttattcatccttctgtacaaaatgaaaagtttggaaattgtttgccctgataycttgaaaaagaagccagaatatttatttgcttcatcaacttcagtgtatatcattttgtgttattttatacgaaaacatgtttattattttcatttttgt

SEQ ID NO: 6687 - DNA, 201 bp, Homo sapiens; identical to SEQ ID NO: 6682

SEQ ID NO: 6688 - DNA, 201 bp, Homo sapiens; identical to SEQ ID NO: 6683

SEQ ID NO: 6689 - DNA, 201 bp, Homo sapiens; identical to SEQ ID NO: 6684

SEQ ID NO: 6690 - DNA, 201 bp, Homo sapiens; identical to SEQ ID NO: 6685

SEQ ID NO: 6691 - DNA, 201 bp, Homo sapiens; identical to SEQ ID NO: 6686

SEQ ID NO: 6692 - DNA, 201 bp, Homo sapiens; identical to SEQ ID NO: 6682

SEQ ID NO: 6693 - DNA, 201 bp, Homo sapiens; identical to SEQ ID NO: 6685

SEQ ID NO: 6694 - DNA, 201 bp, Homo sapiens; identical to SEQ ID NO: 6682

SEQ ID NO: 6695 - DNA, 201 bp, Homo sapiens; identical to SEQ ID NO: 6683

SEQ ID NO: 6696 - DNA, 201 bp, Homo sapiens; identical to SEQ ID NO: 6684

SEQ ID NO: 6697 - DNA, 201 bp, Homo sapiens; identical to SEQ ID NO: 6685

SEQ ID NO: 6698 - DNA, 201 bp, Homo sapiens; identical to SEQ ID NO: 6686

SEQ ID NO: 6699 - DNA, 201 bp, Homo sapiens
taaatttttgacctgtacagaagaagatggggtgctggtttaccaccatgcccaggatgtcattttagaagtcatttacactgaccctgtggatctttctstgggcaccgtggcagaaatcactggtcatcagctcatgagtttgtctactgcaaatgcaaagaaagatcccagctgcaaaacctgtaatatcagtgttgg

SEQ ID NO: 6700 - DNA, 201 bp, Homo sapiens
acaaaaatgaaaataataaacatgttttcgtataaaataacacaaaatgatatacactgaagttgatgaagcaaataaatattctggcttctttttcaagrtatcagggcaaacaatttccaaacttttcattttgtacagaaggatgaataactacagctcatgggaaatgttttgactttacaaagtatagatgttgga

SEQ ID NO: 6701 - DNA, 201 bp, Homo sapiens
ccgtggtgctgtccatggacaacaaccgcaacctggacctggatagtatcatcgccgaggtcaaagcacaatacgaggacattgccaaccgcagccgggcygaggctgagtcctggtaccagaccaagtacgaggagctgcaggtcaccgcaggcagacatggggatgaccttcgaaacaccaaacaagagatctctgaaa

SEQ ID NO: 6702 - DNA, 201 bp, Homo sapiens
ctgggcctcggtgggggcagcggctactccttcaccaccagtggtgggcatagcctgggtgcaggcctgggaggttctggattcagtgccaccagcaaccrgggcttagggggcagtggttctagcgtcaagtttgtctccaccacatcctccagccagaagagctacacgcactaagagagccccatggctccctctacc

SEQ ID NO: 6703 - DNA, 104 bp, Homo sapiens
gttgtcacccacctgtctcatagtgtttataagtggcctgctgggagtgagtgctccctctgttccctccctggaatgtgtctattaaatgcatgtgtcayctg

SEQ ID NO: 6704 - DNA, 201 bp, Homo sapiens
tccagtggctatggaagcggcagcagcattggaggtggaaacctgggcctcggtgggggcagcggctactccttcaccaccagtggtgggcatagcctggrtgcaggcctgggaggttctggattcagtgccaccagcaaccggggcttagggggcagtggttctagcgtcaagtttgtctccaccacatcctccagccag

SEQ ID NO: 6705 - DNA, 201 bp, Homo sapiens
gccattgctgatgcagagcagcggggagaactggctctcaaggatgcacgggccaagctggtggaccttgaggaggccctgcagaaggccaagcaggacayggctcggctcctgcgtgagtaccaggagctgatgaacatcaagctggccctggacgtggagatcgccacctaccgcaagctgctggaaggcgaggagtgc

SEQ ID NO: 6706 - DNA, 201 bp, Homo sapiens
agcgcacagctgctgagaatgaatttgtagccctgaaaaaggacgtagatgctgcctatatgaacaaggtggagctggaagccaaggtcaaatctctgccygaggagatcaacttcatccactcagtctttgatgcagagctgtcccagttgcagacccaggtcggtgacacatccgtggtgctgtccatggacaacaacc

SEQ ID NO: 6707 - DNA, 201 bp, Homo sapiens
ccagagtctcctgactcctcttcacctgcaaatcgaccccaccatccagcgggtgcgggccgaggagcgcgagcagatcaagaccctcaacaataagttcrcctccttcatcgacaaggtgaggttcttggagcagcagaacaaggtcctggagaccaagtgggccctcctgcaggagcagggctccaggactgtgaggca

SEQ ID NO: 6708 - DNA, 201 bp, Homo sapiens
ctttggtggcagggccagcaacaggtttggagtcaacagtggatttggctatgggggtggagttggaggaggcttcagtggccccagcttccccgtgtgtscccctggaggcatccaagaggtcactgtcaaccagagtctcctgactcctcttcacctgcaaatcgaccccaccatccagcgggtgcgggccgaggagcg

SEQ ID NO: 6709 - DNA, 201 bp, Homo sapiens
cagccgggctgaggctgagtcctggtaccagaccaagtacgaggagctgcaggtcaccgcaggcagacatggggatgaccttcgaaacaccaaacaagagrtctctgaaatgaaccgcatgatccagaggctgagagctgagattgacagcgtcaagaagcagtgctccagcttgcaaacggccattgctgatgcagagca

SEQ ID NO: 6710 - DNA, 201 bp, Homo sapiens
agagcagcggggagaactggctctcaaggatgcacgggccaagctggtggaccttgaggaggccctgcagaaggccaagcaggacatggctcggctcctgygtgagtaccaggagctgatgaacatcaagctggccctggacgtggagatcgccacctaccgcaagctgctggaaggcgaggagtgcaggttgagtggaga

SEQ ID NO: 6711 - DNA, 201 bp, Homo sapiens
ccaagcgggtctccatcaatgggtgtggcagcagctgccgaagtggctttggtggcagggccagcaacaggtttggagtcaacagtggatttggctatggrggtggagttggaggaggcttcagtggccccagcttccccgtgtgtccccctggaggcatccaagaggtcactgtcaaccagagtctcctgactcctcttc

SEQ ID NO: 6712 - DNA, 201 bp, Homo sapiens
ctccatcaccttccagtctggcagccgcaggggcttcagcaccacctcggccatcaccccggcagctggccgctcccgcttcagctctgtctctgtggccygctctgcagcagggagtgggggcctgggaaggatcagcagtgctggggccagctttggaagccgcagcctctacaacctggggggtgccaagcgggtctc

SEQ ID NO: 6713 - DNA, 201 bp, Homo sapiens
cggcagctggaaagcatcaccaccgagaggggcaggcttgaagctgaactgaggaacatgcaggatgttgtggaagatttcaaagtcaggtacgaagatgraattaacaagcgcacagctgctgagaatgaatttgtagccctgaaaaaggacgtagatgctgcctatatgaacaaggtggagctggaagccaaggtcaaa

SEQ ID NO: 6714 - DNA, 201 bp, Homo sapiens
tggaagccgcagcctctacaacctggggggtgccaagcgggtctccatcaatgggtgtggcagcagctgccgaagtggctttggtggcagggccagcaacrggtttggagtcaacagtggatttggctatgggggtggagttggaggaggcttcagtggccccagcttccccgtgtgtccccctggaggcatccaagaggt

SEQ ID NO: 6715 - DNA, 201 bp, Homo sapiens
acccattcccaggcctaagccagcctctccctcctgacagtgcccagactgccagcagcacccgtctgttacacatgtgaaaccaaagcctgctctctccyaaggctctcattcagcctatcttgcgaggcccgggcagctggaaagtcctcctccagctccacctccctccctccctccagatgcagaggctggggagtc

SEQ ID NO: 6716 - DNA, 201 bp, Homo sapiens
gtcctggagaccaagtgggccctcctgcaggagcagggctccaggactgtgaggcagaacctagagcccctctttgattcctataccagtgagctccgacrgcagctggaaagcatcaccaccgagaggggcaggcttgaagctgaactgaggaacatgcaggatgttgtggaagatttcaaagtcaggtacgaagatgaa

SEQ ID NO: 6717 - DNA, 201 bp, Homo sapiens
cgtggtgctgtccatggacaacaaccgcaacctggacctggatagtatcatcgccgaggtcaaagcacaatacgaggacattgccaaccgcagccgggctraggctgagtcctggtaccagaccaagtacgaggagctgcaggtcaccgcaggcagacatggggatgaccttcgaaacaccaaacaagagatctctgaaat

SEQ ID NO: 6718 - DNA, 201 bp, Homo sapiens
caaggtcctggagaccaagtgggccctcctgcaggagcagggctccaggactgtgaggcagaacctagagcccctctttgattcctataccagtgagctcygacggcagctggaaagcatcaccaccgagaggggcaggcttgaagctgaactgaggaacatgcaggatgttgtggaagatttcaaagtcaggtacgaaga

SEQ ID NO: 6719 - DNA, 201 bp, Homo sapiens
cacatccgtggtgctgtccatggacaacaaccgcaacctggacctggatagtatcatcgccgaggtcaaagcacaatacgaggacattgccaaccgcagcygggctgaggctgagtcctggtaccagaccaagtacgaggagctgcaggtcaccgcaggcagacatggggatgaccttcgaaacaccaaacaagagatctc

SEQ ID NO: 6720 - DNA, 201 bp, Homo sapiens
cggtgacacatccgtggtgctgtccatggacaacaaccgcaacctggacctggatagtatcatcgccgaggtcaaagcacaatacgaggacattgccaacygcagccgggctgaggctgagtcctggtaccagaccaagtacgaggagctgcaggtcaccgcaggcagacatggggatgaccttcgaaacaccaaacaaga

SEQ ID NO: 6721 - DNA, 201 bp, Homo sapiens
ccgcaagctgctggaaggcgaggagtgcaggttgagtggagagggagtttctccagttaacatttctgtggtcacctctactctttccagtggctatggamgcggcagcagcattggaggtggaaacctgggcctcggtgggggcagcggctactccttcaccaccagtggtgggcatagcctgggtgcaggcctgggagg

SEQ ID NO: 6722 - DNA, 201 bp, Homo sapiens
gggccgaggagcgcgagcagatcaagaccctcaacaataagttcgcctccttcatcgacaaggtgaggttcttggagcagcagaacaaggtcctggagacyaagtgggccctcctgcaggagcagggctccaggactgtgaggcagaacctagagcccctctttgattcctataccagtgagctccgacggcagctggaaa

SEQ ID NO: 6723 - DNA, 201 bp, Homo sapiens
gacatggggatgaccttcgaaacaccaaacaagagatctctgaaatgaaccgcatgatccagaggctgagagctgagattgacagcgtcaagaagcagtgytccagcttgcaaacggccattgctgatgcagagcagcggggagaactggctctcaaggatgcacgggccaagctggtggaccttgaggaggccctgcaga

SEQ ID NO: 6724 - DNA, 201 bp, Homo sapiens
cagccgggccgaggctgagtcctggtaccagaccaagtacgaggagctgcaggtcaccgcaggcagacatggggatgaccttcgaaacaccaaacaagagrtctctgaaatgaaccgcatgatccagaggctgagagctgagattgacagcgtcaagaagcagtgttccagcttgcaaacggccattgctgatgcagagca

SEQ ID NO: 6725 - DNA, 201 bp, Homo sapiens; identical to SEQ ID NO: 6723

SEQ ID NO: 6726 - DNA, 201 bp, Homo sapiens
cgtggtgctgtccatggacaacaaccgcaacctggacctggatagtatcatcgccgaggtcaaagcacaatacgaggacattgccaaccgcagccgggccraggctgagtcctggtaccagaccaagtacgaggagctgcaggtcaccgcaggcagacatggggatgaccttcgaaacaccaaacaagagatctctgaaat

SEQ ID NO: 6727 - DNA, 201 bp, Homo sapiens
cacatccgtggtgctgtccatggacaacaaccgcaacctggacctggatagtatcatcgccgaggtcaaagcacaatacgaggacattgccaaccgcagcygggccgaggctgagtcctggtaccagaccaagtacgaggagctgcaggtcaccgcaggcagacatggggatgaccttcgaaacaccaaacaagagatctc

SEQ ID NO: 6728 - DNA, 201 bp, Homo sapiens
cggtgacacatccgtggtgctgtccatggacaacaaccgcaacctggacctggatagtatcatcgccgaggtcaaagcacaatacgaggacattgccaacygcagccgggccgaggctgagtcctggtaccagaccaagtacgaggagctgcaggtcaccgcaggcagacatggggatgaccttcgaaacaccaaacaaga

SEQ ID NO: 6729 - DNA, 201 bp, Homo sapiens; identical to SEQ ID NO: 6721

SEQ ID NO: 6730 - DNA, 201 bp, Homo sapiens
tccagtggctatggacgcggcagcagcattggaggtggaaacctgggcctcggtgggggcagcggctactccttcaccaccagtggtgggcatagcctggrtgcaggcctgggaggttctggattcagtgccaccagcaaccggggcttagggggcagtggttctagcgtcaagtttgtctccaccacatcctccagccag

SEQ ID NO: 6731 - DNA, 201 bp, Homo sapiens; identical to SEQ ID NO: 6714

SEQ ID NO: 6732 - DNA, 201 bp, Homo sapiens; identical to SEQ ID NO: 6705

SEQ ID NO: 6733 - DNA, 201 bp, Homo sapiens
agcgcacagctgctgagaatgaatttgtagccctgaaaaaggacgtagatgctgcctatatgaacaaggtggagctggaagccaaggtcaaatctctgccygaggagatcaacttcagccactcagtctttgatgcagagctgtcccagttgcagacccaggtcggtgacacatccgtggtgctgtccatggacaacaacc

SEQ ID NO: 6734 - DNA, 201 bp, Homo sapiens; identical to SEQ ID NO: 6701

SEQ ID NO: 6735 - DNA, 201 bp, Homo sapiens; identical to SEQ ID NO: 6702

SEQ ID NO: 6736 - DNA, 201 bp, Homo sapiens; identical to SEQ ID NO: 6715

SEQ ID NO: 6737 - DNA, 201 bp, Homo sapiens; identical to SEQ ID NO: 6710

SEQ ID NO: 6738 - DNA, 201 bp, Homo sapiens; identical to SEQ ID NO: 6713

SEQ ID NO: 6739 - DNA, 201 bp, Homo sapiens; identical to SEQ ID NO: 6716

SEQ ID NO: 6740 - DNA, 201 bp, Homo sapiens; identical to SEQ ID NO: 6718

SEQ ID NO: 6741 - DNA, 201 bp, Homo sapiens; identical to SEQ ID NO: 6707

SEQ ID NO: 6742 - DNA, 201 bp, Homo sapiens
ctttggtggcagggccagcaacgggtttggagtcaacagtggatttggctatgggggtggagttggaggaggcttcagtggccccagcttccccgtgtgtscccctggaggcatccaagaggtcactgtcaaccagagtctcctgactcctcttcacctgcaaatcgaccccaccatccagcgggtgcgggccgaggagcg

SEQ ID NO: 6743 - DNA, 201 bp, Homo sapiens
ccaagcgggtctccatcaatgggtgtggcagcagctgccgaagtggctttggtggcagggccagcaacgggtttggagtcaacagtggatttggctatggrggtggagttggaggaggcttcagtggccccagcttccccgtgtgtccccctggaggcatccaagaggtcactgtcaaccagagtctcctgactcctcttc

SEQ ID NO: 6744 - DNA, 201 bp, Homo sapiens; identical to SEQ ID NO: 6712

SEQ ID NO: 6745 - DNA, 201 bp, Homo sapiens; identical to SEQ ID NO: 6722

SEQ ID NO: 6746 - DNA, 201 bp, Homo sapiens
ttcctggagcagcagaacaaactgctggagaccaagctgcagttctaccagaaccgcgagtgctgcgagagcaacctggagcccctgttgcagggctacayggcgactctgcggcgggaggctgagtgcgtggaggccgacagtggcaggctggcctcagagctcaactgcacgcaggaggcgctggagggctacaagaag

SEQ ID NO: 6747 - DNA, 201 bp, Homo sapiens
aggatgagctcaacgagctgaactgcatgatccagaggctgacggcagaggtggagaacgacaagcagcagcgctgcaagctggaggctgcggtggcccaktctgagcagcagggtgaggcagccctcagcaatgcccactgcaagctggctgagctggaggacgccctgcagaaggccaagcaggacatggcctgcatgc

SEQ ID NO: 6748 - DNA, 201 bp, Homo sapiens
aagaagagctggccctcagggccacagctgagaatgagttcatgatgctgaagaaggatgtaggctacacctatctgcacgagacggacctggaggccaaygtgagccgctgaaggaggagtcagtcttcctgcagtccctctacggggaggaaatctgcctccttcaatcacaaatctctgacacctccatggtggtgaa

SEQ ID NO: 6749 - DNA, 201 bp, Homo sapiens
gcttagatcaaggctcagtatgatgatattgccagctgcagccgggtggaggctgagacctgataccaaaccaagtgcgaggaggtgaaggccacagtgayccaacagggtgagaacctccgcagaaccaaggatgagctcaacgagctgaactgcatgatccagaggctgacggcagaggtggagaacgacaagcagcag

SEQ ID NO: 6750 - DNA, 201 bp, Homo sapiens
agcaggacatggcctgcatgctcaagcagtaccaggaggtgatgaactccaagctgggcttggacgtggagatcgccacttatcgcaaactgctggagggygaggagatccggctgtgtgaaggcgtgggctcagtcaatatctgtaaccattcccagggtggtgtggtctgcggggacctggactccactgcctcctgtg

SEQ ID NO: 6751 - DNA, 201 bp, Homo sapiens
gagtgctgcgagagcaacctggagcccctgttgcagggctacatggcgactctgcggcgggaggctgagtgcgtggaggccgacagtggcaggctggcctyagagctcaactgcacgcaggaggcgctggagggctacaagaagaagtatgaagaagagctggccctcagggccacagctgagaatgagttcatgatgctg

(The sequence listing continues in the following parts.)
